United States Patent Application Publication US 2024/0301379 A1 - sequence listing, part 9

SEQ ID NO: 17130 - protein, 993 aa, unidentified
  REGION 1..993: note = Cas Enzyme sequence
MKYRLGIDLGTTSLGWALLRLDEQNEPYAVIRAGVRIFNNGRDPKTEASLAVARRLARQQRRTRDRKIRRKERLIGELVDMGFFPKDPVKRRQLASLDPFKLRTEALDRALSPEEFARAIFHLARRRGFKSNRKIDSGDTESSKMKEAIKRTLNELQNKGFRTVGEWLNMRHQQRLGTRSRIKNVPTGSGKQTTAYDFYLNRFMIEYEFDRIWEKQSQMNPGLFTNERKAILKDIIFYQRPLRPVEPGRCTLMPDNPRAPLALPQQQDFRIYQEVNNLRKIDPTSLLEVNLTLPERDRIVELLQRKPALTFDAVRKALCFNGTFNLEGENRSELKGNLTNCSLAKKKLFGESWYSFDAHKRFEIVEHLLQEESEENLVSWLQKECNLSEEYAKNVASVRLPAGYGALCQEAIDLILPYLKAEVITYDKAVQKAGMNHSELTLAQETGEILPELPYYGQYLKRHVGFGTGKLEDSAEKRYGKIPNPTVHIALNQLRTVVNALIRRYGKPTQIVIELARELKQNKKAKDQYRIEMNHNQIRNERIREDISMILGINPENVKRKDIEKQILWEELNLKDATARCCPYSGKQISAEMLFTDEVEIDHILPFSRTLDDSKNNKVVCIREANRIKGNRTPWEARKDFEKRGWSVEAMTARAQAMPKSKRFRFAEDGYKVWLKDFDGFEARALTDTQYMSRVAREYLQLICPGQTWSVPGQLTGMLRRFLGLNDILGVNGEKNRDDHRHHAVDACVIALTDRSMLQRISTASARAENKHLTRLLESFPPPWPTFYEHVTRAVKSICVSHKPEHAYQGAMNEQTNYGLRPDGYVKYRQNGKVEHKKLNVIPQVSVKGTWRHGLNSDGSLKAYKGLKGGSNFCIEIVMGEGGRWEGDVITTYEAYQIVRAKGEAALYGSVSRSGKPLVMRLMQKDIVEMTLADGRCKMLLYKIGQNKQMFFYRIENAGGGREDVSKRPGSLQKALAKKIIVSPIGDFRKEKL

SEQ ID NO: 17131 - protein, 1063 aa, unidentified
  REGION 1..1063: note = Cas Enzyme sequence
MVIYPKEFMSKVLGLDIGANSVGWALIDDNLNKIVDIGVRVFPEGVSDYDTSKEKSKMANRREARSARRRFWRRRRRLNKLLHLFKEYDMSQMNVQQFNEMDPYYLRRKALDEMISLDEFARIIYHMSKRRGYFDISSAAGSAEEKKERGVVKAGISELYKKISESCSRTLGEYFSTLKPEEVRIRSRWTERKMFQDEFLLIWENQSKFYPDKLKNEFKDIIYEVAFLQRPLKSSKKLIGYCEFEPKHQRAPKSHTISQLFRMYQVVNNLTISGGSRILPEQQELTEDERIRLIDFLSNHEKIELKDGNKELANKLKLFAGKKYITNYDDAKKIHGINTYCKIKNALKNSTAFSKKPDKLNEDDLRLIWRIIYEENSFEKRFLKLKKYCKLDDGSALKLADISLEPGYASLSLKAMAKMLPFLKNGMKYHEAALAAGYRHSLDDRQVEEMEYLPDPVSIRNPVVTVALHQVKLVVNELIKIYGKPDIVRIEMARDMKKTKDERDEIRKKNKANEDERDLAKKEIANYFKDMNISNKDFPRETYILKYRLWKQQDETCVYSGRNISISQLFSGETDIDHILPYSRTLDDSFMNKVVCFKSENSYKTNKIPWEAFAHFDGKYEAILDRVKNWPYSKAKKFKMDKKMFADYLGEEGMISRYLNDTRYISREAKSYLQHVCTKVNVANGTTTSYLRHLWGLNTILSGNGADVKNRHDHRHHAIDAAIIALTNQSALQKLSTYIGITGDHEFLGIDEDIALREFPMPWEDFRINVADKAANIIVSHKVNKRAKGQLHEETYYGLRKNPDQTFRIDDKGMKLYHVRKALDLSLTHNQIKSIVEPKIKEAIFDRLIEFGINPESKFESLPKEFFREPLIVYGKNGNFYIPKSVRIAVASSTMKNIRGYNLWVETGKNHHMIIYKDIDSGKQKGKIVTLFDAVQRKKNGLPVIDKVLGPNDEFMYSLQINELIFTIATKAGNRNKYDINFPEGFDLKNKDTYHKLFNAIYRVQTCTDGKITFRQHNTSILELKDKNGKTIAYPGRLISTPNDILLIKLIISPSGFLEIADE

SEQ ID NO: 17132 - protein, 1517 aa, unidentified
  REGION 1..1517: note = Cas Enzyme sequence
MKNILGLDLGTNSVGWALISVDENGNLVKDIRLGSRIIPMSQDVLGKFDSGVTVSQTAERTEYRSHRRLLERALLRRERLHRVLHLLGFLPEHYAACIGWDRNNNATYGKFLPETEPKLAWRKADDGGYRFVFMQSFEEMLDDFSASQPSLVANGKRIPLDWTLYYLRTKALTKPIAKEELAWILLNFNQKRGYYQLRGEEEEETPSKRVEYHELKVVKVEATDEGKGGNIWYNVLLENGWVYRRQSKYSLDKWLGQTLPFIVTTDLEADGVTPKRDKEGNVKRSFRSPKEDDWTLVKKRTEDHLEKSGLTVGAFIYQHLLANPSDKVRGQLVRTIDRKYYKRELQAIIAKQMEFHPELRDAELLKACAEELYRNNEAHRAQLLAKDFKHLLVEDVLFYQRPLKSKKSLIANCPYETRQYINKETGEIKDVNVKCIAKSNPYFQEFRLWQWISNLRLLRQADGQDVTAAYIKGNEDKERLFDLLNNQGEIKQEHILRDFLKLKKPKGGEFPLRWNYVGDKIYPANETRHAMNKAIKGMTVDKEEKETLGQLLDQPAVAYMLWNLLYSITDRNELASALRRFALTHGVSSVDAFVESFLKVKPFKKEYGAYSEKATKKLLQVMRLGKYWCGDELPEPAKRTKGNKQAVYDEMANRGICKQTLQNISNIIEEDIDERLMGALLNPDRPLTELSHFQGLSVSDACYVVYGRHSEVAEIVKWKDAGELNTFINNFKQHSMRNPIVEQCVLETLRTVRDVWEQEGQIDEIHVELGRNMKRTAEQRARDTQAIQRNENTNMRISLLLTELKNDPSISDVRPYSPSQRELLKIYEEGALENLTNQDEDIAKISRLAQPSASELRRYKLWLDQKYVSPYTGRPIPLAKLFTPAYEIEHIIPQSRYFDNSFSNKVICEADVNKLKDKLLGMEFIKKFGGKTKGILDEDAYKLHVTTNYAHNPAKRSKLLMEDLPTDFNSRQLNDTRYISKTVMALLSNVVREEGERETRSKHVVVCTGGITDTLKKDWGLQEVWHNLVYPRFIRLNNLTGTKDFGHWESKDGKAVFQTGLPLDLQRGFVKKRIDHRHHAMDALVIACASPDIVNYLNNQSAANPHARQDLQRLLCDRKREIRKPWPTFTQDAQKALEDLVVSFKNTVRVVNKASNTYLRYDKDGKKKRFKQEGEGLKAIRKPMHKETYYGEVNLIRKEMLPLKRALDDVNAIVDKELRACIKGLLRDGFNLQQVLANFKAKDFKFDKRDIKKVEVYVSSEKSTPMVATRKLLDTSFNAKRIADITDTGIQKILLNYLKANDNSPEQAFTPEGIAYLNEHIAEYNNGKRHQPILKVRVSEIRGAKFAVGQTGSKKTKFVEAQSGTNLYFAIYEDKEGKRNFETIALNVAAERLKTGQTPVPETNDAGQPLKFYLSPNDLVYVPTDEDRAAACPSIDKRRIYKMVSATDVNCFFLPFEVASTIYNKVEFESMNKMGRAIDMMEYSDNYDSSAINKLMIKDVCWKLEVDRLGNITKIVR

SEQ ID NO: 17133 - protein, 1081 aa, unidentified
  REGION 1..1081: note = Cas Enzyme sequence
MAAFKPNPINYILGLDIGITSVGWAMVEIDEEENPIRLIDLGVRVFERAEVPKTGDSLAAARRLARSVRRLTRRRAHRLLRARRLLKREGVLQAADFDENGLVKSLPNIPWQLRAAALDRKLTPLEWSAVLLHLIKHRGYLSQRKNEGETADKELGALLKGVADNAHALQTGDFRTPAELALNKFEKESGHIRNQRGDYSHTFSREDLQAELNLLFEKQKEFGNPHVSDGLKEGIETLLMAQRPALSGDAVQKMLGYCTFEPTEPKAAKNTYTAERFIWLTKLNNLRILEQGSERPLTDIERAILINQPYKKKLTYAQARKLLDLDDTAFFKGLRYGKDNAEASTLMEMKAYHAISRALEKEGLKDKKSPLNLSPELQDEIGTAFSLFKTDEDITGRLKDRVPPEILEALLKHINFDKFVQISLKALRRIVPLMEQGKRYDEACAEIYGDHYGKKNTEEKIYLPPIPADEIRNPVVLRALSQARKVINAVVRRYGSPARIHIETAREVGKSFKDRKEIEKRQEENRKDREKAAAKFREYFPNFVGEPKSKDILKLRLYEQQHGKCLYSGKEINLGRLNEKGYVEIDHALPFSRTWDDSFNNKVLVLGSENQNKSNQTPYEYFNGKDNSREWQEFKARVETSRFPRSKKQRILLQKFDEDGFKERNLNDTRYVNRFLCQFVADHMRLTGKGKRRVFASNGQITNLLRGFWGLRKVRAENDRHHALDAVVVGCSTVAMQQKITHFVHHKEMNAFDGKTIDKETGEVLHQKAHFPQPWEFFAQEVMIRVFGKPDGKSEFEEADTPEKLRTLLAEKLSSRPEAVHEYVTPLFVSRAPNRKMSGQGHMETVKSAKRLDEGISVLRVPLTQLKLKDLEKMVNREREPKLCEGLKARLEAHKDDPTKAFAEPFYKYDKAGNRTQQVKAVRVEQVQKTGVWVRNHNGIADNATMVRVDVFEKGGKYYLVPIYSWQVAKGILPDRAIIAFKDEEDWQLIDDSFNFKFSLHPNDLIEVITKKARIFGYFASCHRGTGNINIRIHDLDHKIGKNGILEGIGVKTALSFQKYQIDELGKEIRPCRLKKRPPVR

SEQ ID NO: 17134 - protein, 915 aa, unidentified
  REGION 1..915: note = Cas Enzyme sequence
RHFRGRDLEETETEVATESSEEKEAKSGREKTIQVLKQTGLTLGAHLASTPSGHRKRGIHANRDHVQDEFNRLVTFQARHHPALAQSNLKDQLNDAIFAQKPVFWRKNTLGECRLMPGAQLAPKASWPSIQKRMLEKLNNLAISGGNGRPLEAKERQAILDQLQTQGSMTWAGIKRVLEPLFKARGESAKSIRFNLEEGGDKGLSGNPLEMKLSGIFGDAWHNHPHKQAIRDAADTRLRASDYGDVGQRVVILREGERKKRRQRAAQSFAADFGASPSQVEELEKLSFPSGWDAYSYDALAVILPELEEGHRFGTLLNSPDTEWHDWRNRNFPNRHQATGEILDRLPSPKDKDESQRIRNIRNPTVIRVQNELRKVVNNLISVHGKPDLIRIEMTRDIGLSKAEREEKSKAMRNQEKLRKAASEGLKANGIAEPKRDDIEKWLLWKESGERDPYSGDHIGFAALFLQGEYEVEHIWPRSLSLDDSFANKTLCRKDMNLQKGNRIPHDAFSHDPDLWAAMKDRVSAMLSTKGGTGMSRGKIRRFLAQSMPDEFTSRQLNDTGYAARQSIAFLKRLWPDVGPEGKVNVQPVNGKVTAHLRRLWGLNNILSDDGEKTRADHRHHAIDALVVACTDPGVTQKLSRYWQLKDSLAISAQEPRLDPPWATIRQEADRTVQAIIVSHRVRKKVSGPLHKGTIYGDTGQDEHNGKIAYRMFTVRKDLAELSKSELADIRDEAVKRIVNEWVAERGGVPKKAFPPFPKVSADGPEIKKARIWIKQQLALMAPITTGYADLGNNHHIAIYRKPDGKAEFEVVSLFEASRRIKAKEPVVRREREGAKFVMSLAQGDTIHFAKTAGEKELFWRIQKIASKGQISLLLLADASRDEHSLFEPLVGGIIKRGAQKVSIDPIGRIRTAHD

SEQ ID NO: 17135 - protein, 1043 aa, unidentified
  REGION 1..1043: note = Cas Enzyme sequence
VDANIGELLAKKQELTDKLDEIETAKKLTKNKDEKAELTEEIKALKEEVKAWNAEYGEVIEQMTHYKKNLLERVYLDEYTYPCYMEAARLGLWEVNPITNRGQIFSFKQGNQPQALAQNERLVPRAYRIKELKSLWSQAQRLLTQLQAFEVDYLLFGEAKAPYATVWQRTLKAHRGKGPNYLFRRRGDARLPIAVDEPNRFIDTQGVLGQKVPRFDNRIIAKCQLMPTRNVCNAKDPLASKVGLMLQLKNTRFIDSDGVVRQAGLTPAEFNTLIEAVHPLLNDKGEVTYTKFVKALEDTLKAHGTGLSHLQHPALKENIKVNISGRSRFCRPALKVIHYTLTHGDAFPNIDPLTVTYEGKAVVNASHPQGVTAEEVVKTLKRLGTSWESFSVGDDRDDTFALGQALQTNEARRHAVMKLLGRSNNPIVRNRMLIFYNKLVKLEANLTAKGYNVRQDAKVIIEFIRGADSGFDGKKKGDEWTKHINANEKENEELLKELRENGLPDAYRLRLKLFKQQRGQCAYTLDTEKAKLSITDLGSYEIDHIYPFSLAFSSDAVWNKVLVRREANQDKAKQTPYQWLHGQKGEAVWQQFIAKVEAMYAKDDKSTTKKKALLTSPNPEKQMEKYTGLAETATMARLAQQVLGLHFAWPLQVEGQDRRIFVSDGAWTSRIRSRYDLGRLLLDNEKECALDNAIAKQRENYQRRREAIRFNDTATVQAMETTIKEQADILKKLHKDRTNSKHHALDAFCISFSQDVRPSKDERGRPKLKPSGEQEWTLLNEDSFLTFKQALPAYMEALFPQPYCRNKSKLALEETIYGYRKALRSMVVRKPLFDLLKDADDKKIKNLSLVDKAIEEDLKAHHKTIATKKEWNEFLETYPHPTRGNRVKAVKIIPMAEVDFMGYGTGNRSRFGELQDMGNGQTKGQYKKAAAHNGQIVYQDKQGKWNVFTVPAFMSELEARATLASRGIKTLFSNGDLLYPSLTVRVKQMFLGPKGIMMKAGLYTWKTMNHLGYCIIEDANGFSPSGIAIAKLISVGLEIVKTP

SEQ ID NO: 17136 - protein, 1561 aa, unidentified
  REGION 1..1561: note = Cas Enzyme sequence
MKKILGLDLGTNSIGWAVVNANETARENDTTYLKPVGISSAGSRIIPMSADILGDFDKGNSISQTAERTKQRMIRRLRERNLLRRERLLRVLSLMDFLPEHYANKINRYGKFMDDSEPKLPWRMGPGGKMEFLFQESFQEMLAEFSQCQPELIAGGRKVPYDWTVYYLRKKALTQRITKEELAWILLQFNQKRGYYQLRGEEEEEDTSKKVEFLSQKVIRVEATGERKGDDLWYNVYLENGMIYQRPSRFPLDWEGKTKEFIVTTDLEKDGSPKRNKYGEIKRSFRAPKEDDWTLLKKKTEYDIEQSNKTVGCYIYDALLQNPSQKIIGKLVRTVERKYYKEELRRILEVQQELIPELRDSNLYQRCIEELYPCNEAHRNIISKPDFVRLFVDDILFYQRPLKSKKSLIDNCPYESRFDKEGNMHPVKCIAKSNPLFQEFRLWQFVQNLRIYQREKTVSDGQLDLFSNVPTGKLQTDVDVTAEILKSEEDYVKLFNWLNDRGTIKQDTLLNSYFKIKKEKGKDRYPYRWNYVEDKEYPCNETRATILSGLAKCNVSTDFLTRENEMALWHILYSVEDKTEINKALSSFAGKHNLAANFTEVFSKTKPFKKDYGSYSEKAIKKLLPLMRMGSYWNETAFDANTHDRIEKIITGEYDERIKNRVREKAISLTDISHFRGLPVWLACYIVYNRHSEAKEIEKWKKPEDIDQYLKTFKQHSLRNPIVEQVITETLRTVRDIWKQEGQIDEIHLELGREMKNPADKRRQMTERIQQNENTNLRIKAMLMEFMNPEMEIENVRPYSPSQQDILRIYEENALDNLSRDDKEYDFVSKVSKMAQPSKSDIIRYKCWLEQKYQSPYTGEMIPLSKLFTPAYEIEHVIPQSRYFDDSFSNKVICESEVNKLKDRQLGYEFIKNHAGEIVQLSQGGTVKIQSVEAYERFVKDYYANNRTKMKKLLMDDIPDGFIERQMNDSRYISKLVKGLLSNIVREKQVNGEYEEEAVSKNLISCNGSITDRLKKDWGMNDVWNSIVLPRFQRLNQLTGKDCFTTLNREGHEIPNMPLELQKGFNKKRIDHRHHAMDAIVIACATREHVNLLNNEAAHSKHNANRYQLQRKLRRFETIIINGKEREIAQEFLKPWDTFATDAWQALSNIIVSFKQNLRVINKTTNHYQHYDAKGRKGYEKQHHGDSWAVRKSMHKDTVFGEVNLRMKKTVSLNEAVKKPENIVNKEFKKKVTKLLANGYDAKSIKKYVEDNKDIWSDINLSKIEVYYFTKDEKKRNGEPKERYFATRKSLDTSFDQKKIKESVTDTGIQQILLAHLASKENNPELAFSPDGIDEMNRNIVALNNGKFHQPILKVRVYEKAEKFAVGQTGNKNKKFVEAAKGTNLFFAFFETEKENKESGNKETIRSYMTIPLNVMIDCQKKYGARWRSNIEVFLKDKDMVDAKAKLMFILSPNDLVYLPTKEELQNGIQSLEKQRIYKFIDPGMNTGNFIPFSIAKAVFSSKFTEQKKKGINFSIQDEVGLGSQGTKSPRATTGEMIKETCIPVKVDRLGNIIELNGIKV

SEQ ID NO: 17137 - protein, 1402 aa, unidentified
  REGION 1..1402: note = Cas Enzyme sequence
MKIKNYNLALTPSTSAVGHVEVDDDLNILEPVHHQKAIGVAKFGEGETAEARRLARSARRTTKRRANRINHYFNEIMKPEIDKVDPLMFDRIKQAGLSPLDERKEFRTVIFDRPNVASYYHKQFPTIWHLQKYLMITDEKADIRLIYWALHSLLKHRGHFFNTTPMSQFKPGKLNLKDDMLALDDYNDLEGLSFAVANSPEIEKVIKDRSMRKKEKIAELKTLIVNDVPDKDLAKRNNKIITQIVNAIMGNSFHLNFIFDMELDKLTSKAWSFKLDDPELDTKFDAISGSMTNNQIGIFETLQKIYSAISLLDILNGSSSVVDAKIALYDKHKRDLNLYFKFLNTLPDEMAKTLKAGYTLYIGNRKKDLLSARKLLKVNVAKNFSRDDFYKLINKELKIIDKKGLQTKFSEKVGELVAQNNFLLVQRSSDNAFIPYQLNAITFNKILENQGKYYDFLVKPNPAKKDRKNVTYELSQLMQFTIPYYVGPLVTPEEQVKSGIPKTSRFAWMVRKDNGAITPWNFYDKVDIEATADKFIKRSIAKDSYLLSELVLPKHSLLYEKYEVFNELSNVSLDGKKLSGGVKQILFNEVFKKTNKVNTSRILKALAKHNIPGSKITGLSNPEEFTSSLQTYNAWKKYFPNQIDNFAYQQDLEKMIEWSTVFEDHKILAKKLDEIEWLDDDQKKFVANTRLRGWGRLSKRLLTGLKDNYGKSIMQRLETTKANFQQIVYKPEFREQIDKISQAAAKNQSLEDILANSYTSPSNRKAIRKTMSVVDEYIKLNHGKEPDKIFLMFQRSEQEKGKQTEARSKQLNRILSQLKADKSANKLFSKQLADEFSNAIKKSKYKLNDKQYFYFQQLGRDALTGEVIDYDELYKYTVLHIIPRSKLTDDSQNNKVLTKYKIVDGSVALKFGNSYSDALGMPIKAFWTELNRLKLIPKGKLLNLTTDFSTLNKYQRDGYIARQLVETQQIVKLLATIMQSRFKHTKIIEVRNSQVANIRYQFDYFRIKNLNEYYRGFDAYLAAVVGTYLYKVYPKARRLFVYGQYLKPKKTNQENQDIHLDSEKKSQGFNFLWNLLYGKQDQIFVNGTDVIAFNRKDLITKMNTVYNYKSQKISLAIDYHNGAMFKATLFPRNDRDTAKTRKLIPKKKDYDTDIYGGYTSNVDGYMLLAEIIKRDGNKQYGFYGVPSRLVSELDTLKKTRYTEYEEKLKEIIKPELGVDLKKIKKIKILKNKVPFNQVIIDKGSKFFITSTSYRWNYRQLILSAESQQTLMDLVVDPDFSNHEARKDARKNADERLIKVYEEILYQVKNYMPMFVELHRCYEKLVDAQKTFKSLKISDKAMVLNQILILLHSNATSPVLEKLGYHTRFTLGKKHNLISENAVLVTQSITGLKENHVSIKQML

SEQ ID NO: 17138 - protein, 1415 aa, unidentified
  REGION 1..1415: note = Cas Enzyme sequence
MEKEEYYLGLDIGTNSVGWAATNKEYKLLRAKGENLWGAYLFDEASTAQKRRLARGQRRRLARQHARINRLQALFSPLVFLADPNFFIRLNNSRLYLEDKDDRVKSKYALFADKNFTDYDFYHKYKTIYHLQEALLTEDRKFDIREIYLALHHLVKYRGHFLMEGQSFDNQQDLSSIVTLVEEINEFYDDNFSDFGAPIIVENVSEIIKQMTDNRGVSKTSEALAPFFHLEGCSKEKKDFIKAVIGLLSGAKEKISHLLPGEEIDEDVDKISFSDSDFDEEKAPLLEGLLEGNFLPIGNLRKIYSYATMKKIMGESNYVAESMVKRYEEHKKQLNEFKNFIKVYFSHEDYTKMFRVFDDKENNYPRYIGMNKTQKLKHTGSHCSLDDFYTYVKKLLTSKESSDPVFIETRDSILGLLDKNNPGFLLKINNRDNASLPYQLNVIEARQIIKNQSKYYPELLAKSKDSGQSILDRVITLIEFKIPYYVGPLNDQHKGKKNGFAWLVRKPGKEKEQINPYNIDEVVDYGATQTEFIRRMTNKCTYLYEEDVLPANSLLYREYDLLNHVNTITVNNVRISNEQKQLILSKLEEEKKLTPKQIKKMLENMHPGTEVTIGGIDEEEKLSAGSLRDFRLILNERFEKTKKEIEDVILWLTVFDDKETVRRKIRENYSNVFSEDDIKKMARLNYQGWGRFSQQLLVGPDFIIHDEQGEVTSILQLLRATNRNFMEIINDERYGITQAILDYNAQDESNKDSVQQLIDESYVSPMVKRATHNAIKLVEEIVSIKKKNPPTKIFVEVTRGEDKKKKGKKTSSRKNQLLELWKASKKDIIALNNDVLSSQNHAINFEAKISDINEKTERDFRSDRLFLYYLQFGLCMYTGEPIDLSKLNSNLYDIDHIYPQSKIKDDSLNNRVLVKRSANLDKSDVYPIKPEVQSKMKPLWEHLKKSNLISEEKYKRLTRITHLSEDEMERFINRQIVSTSQSIKLVANIIKKLYPDTKVVYSKASNVSSFRRDFDLVKVREINDLHHAMDAYLNVVVGNAYDTKYTKNFVRERNFYETLNFADLFKFNIKNAWVSGDKGTITTIKEVNRKISSAKVVKKTMVRFSDGDGKGFYNLKLSPKGENDLFPSKTNADNPLSNTEKYGGYTGKNISFFTLAEYEKKGTKKRVLAGVPIIYAKEALLEDEYLKHTVLEGYYGLNNPIIIRRCIPFHSKLIVNGMPTYLAGVSDNRILLHNGVQLLLNSETAQYVKNLGKLLKLYMGDKPESIIEYFQNKNEIVLNEVIDSTTGEIKTKPSYITKERNIEVYDILTQKYNLPIFEGTNHHNYFNKLVSGKEKFIGSNIYDQAKVLLEIIKTLQAKSNAGDLSLIEERSSAEEKKKTRAKGAMIRVSMNINYDLDLVSDSPTGLFSYKIRLNK

SEQ ID NO: 17139 - protein, 1209 aa, unidentified
  REGION 1..1209: note = Cas Enzyme sequence
MKKDYILGLDIGISSVGWGLLELDDNNNPYKIIDVGSRIFTPGEVEKTGDSRAKERREKRGARRIARRREFRLDRVKNLLYENGYLKGNINSNIVSEKNEELSIIFNNMINNYYNGKNTNPYILKVEALDRKLTDEELSIILVHYAKKRGYKSNREEASDKESGKVLTAIKENEKIMKDNNYRTISEMYIKDDKFKNKIKNSPNDYKISVTNEMYLEEINKVLDSQIKFGLITDDFKNQYLEIYNSRRSYAKGPGGNSPYGGDLIERMTGKCNFDGNPRAPKRAFSSEIYVALTKLVNLKYKVNDGEYIKLSEKEIKNIIEKAKEKKSISYKDLTKMIGNNIDFKDLTLSKKEYIKLIEELKKKLNIKKDTKININELSSEDKELYNKLCNDKLLSKTLIELKGYHILKDSVIKAYSKDIWDEVKDNMYLLDDLALYCTNYKVNEDILNKIKESENIDNIFNDIHFVELLPNFKDHLMLSTELIRKLIPIMYGGNTYDKAMNILEYNHSDINGDKEKKDLLVPICVDDNITNQRVIRSLTQTRKVINSIIKKYGMPKIINIETARELAKSRQERNEIAKNNVEKQAENEKIKNQLVELGLFVNTDKISSTDLLKYKLWKEQNEFCGYSMKKISIEDLFGNNIVQIDHILPYSRTYNDNYLNKTLVYTKENQEKGNRTPYEWFGKTDKWDEYETYINNLTISQKKKDNYLLKKLDFDTEREMRSQNLNDTKYISKELSSLIKAYLNVEKVNMYPGAITAKLRARWGFNRLTHSYLSKNYILPKNIKEDINKDRDNHLHHAMDALVIASITPSLQQKITLYEKFSRYIDGLTELQIKNISYIKIEDSEGQYYNDDTGEVETIDIREYIKQQLAENNIYYNRHNISKLEFPLPYENFDKEAKLRVYEQDLDTLKWNLKSYNTYTQKDIDNVHTLIPSIAKTKVSGKMHEETYYGIKEIGKDEDKKIYKTLKTPIEKVKRKDLDNIPDRLGGSKDVYESLVEWFGDYEVGEEVLKANGNKYPVSKSDKEHKEIKKLKLYSEYKNTGHMINKSNVEKGGIYRIDVFKSKDKEDDKLYFAAYDILEIKKINTLKEKNRVDDNFNIKLDYGQGKNSKIMSYTDIINNYDLYISLNKNDLIKITTNDGKESVAYVVGCSSGMLEVKSKLGDGYDIIKTDLNENNIFNKKLDRYQITVSTIKEIKKLSISVLGEISGL

SEQ ID NO: 17140 - protein, 1043 aa, unidentified
  REGION 1..1043: note = Cas Enzyme sequence
MTYTLGIDVGIASIGFAGVNQDQGKIVFCGTHIFEAAENPKDGASLASPRREKRGMRRVISRRRQRKKQIRALLAKHGLKDIDLIDQSKTKACTSPWLLRKEALERLLTDSEFVRILFHIAKRRGFQSNKKGGTDQNDMEGKKVLSGAIELEEKAIQSGAKTIASYLASQEKQRNGDGDYTNSIKRDALREEVKMIFEAQKKFGNIKATPELLYDYAGSGKKEERNTCQGDGIAFYQRSLQSSEHLVGFCTFEEGERRAPKCSYTAELFVIWSKLNNTRIKDVKSNERTLTQDEKNRLSDLAHKNKSGVTYKQARKELRLIDDERFNIGYRKLKDDDNSWEKIRDNTEKSVFLKFTGYHALKDALDTGGQTDWQNWINNRRTALDDIAHVLSFYEDRKEVDDLLSVHGLREEEKKKLSSITNFSKTVDLSLKAIYKILPHLQNGLRYDEACKQVWGHHGLSECKSHALVPPFDDIRNPVVNRALAQTRKVINACIRQYGKPDTIIVELARDVGRNFKDRKDIEREQKKNEAYKNEAKQHAAEILGIIPDNVTGEDILKYRLLQEQQHFCFYCGSKITPEQFQDGTAVQIDHIIPYSRSWNNSYMNKTLCHSDCNQEKGNRTPYEWLGGTKQWNGIITERAKLPLKKVENFLIENFEDREQGWKDRALNDTRYIAKLLRSHLADSLDVKVQTRNGALTSNLRHSWGLGKKNRENDRHHAQDAIILACSTQSMVQKFSNWNKYEARKKNPTQRLMPPKPWATFRDDVLEAIDGIFVSRMPVRKITGAAHEETIRSIRKSDGKVIQRVKLKSLKLSQLENLVDKERNIKLYNLLRQRLEEYGDKSEKAFADPVYMPVNDSSKIAPRVNSVRIETKEKSGITINHGLASNGDMVRVDVFMVNGKYQLVPIYVHHFVQDKLPNKAIVASKDEKDWLEVSDEDFLFSLYKNDLVHIKNKKEEFIGYYNGTHRGTGAINIRTHDSDPSFGKNGVKEGIGVKSLLIFDKYNVDYFGNKHKVKKEKRLGVAKRIDTKSRQPVPAQGAVEAAE

SEQ ID NO: 17141 - protein, 1012 aa, unidentified
  REGION 1..1012: note = Cas Enzyme sequence
MRVVGLDVGINSIGFAYVDLSTQSILEIGSRLFEAAEHPKTGASLAVPRREARGQRRRLYRKRRKVSRLRSLLKAHGLQIEKCLSLSNDDLSPWQLRKQALERKLTDKEFARTLIHFAKRPGFESNRKSAPSNDEGPLITGSKELFEQMRTNGFQTIGSYLASLPKQRNDPESYGRTVLREDLKAELSLIFQKQRGFGNHKATNELLEKVKDTAFHRLPLRSSLALVGDCSLEPEEKRAPKKAYHAELFVALSRLTSLKIEEKGGQTRFLTADQISLLEEKAHSTAKVTFTQARKYLGLGGNETFNLATYRKIKDGDNTWEAVLAQAEKATLIELNGFHTLRKALVPLSKMDWEALANSPDDLDTIAYALSFFEAEDQIREQLSPVDLTEEQIIALLKTTGFSKTIDLSIKATKKLIPHLRQGKKYGEIVRIVYPNFGKHTGLLNYLPPLKESTRNPVVDRAISQIRKVVNALIRKHGMPDHFHIETARELGNSWKIRKDIERNNKKRQAFKEETRKHAIEIFGYEPNGDELAKFRLWKEQAGSCPYSNAKISPPALRDGTQTQIDHILPYSRSFDDSWSNKVLCFASENQAKKNETAWEYMDRKGRLAGLEDFARTQDIHRSKKLLLQDFNDEKAKEWKSRHLNDTRYVSRALSGYLEENLKPNEGIKQLVRTRKGGLTSKLRHLWGLPDKDRENDHRHHGIDALVIACSTQSMVQRVARWNRYQRGTRNDPGFFAEQPWPDFRKDALEKLDHMFVTRQPARKTGGRLHKDTIMRLKEDREGSWQAIKRVKVLDLKLSDLSNLVDVEIKDGVPTGRNTALYNVLKDRLEAYGGDGKKAFSQPIYMPTGPNAKERPQIRRVRLYDNTKSGFQVRKGFADNAEMAWTEVYEKEGKFYLLPIYTHQVATKNWPDRLIFAGKEEKDWPQVDDTYRYKFALFKNDYVVLETRKGQVREGYYKGTHRGVGTIHLEEHKGANSDNPGVKTMKSFKKYHIDLFGERSEVKEKVPWRGER

SEQ ID NO: 17142 - protein, 1397 aa, unidentified
  REGION 1..1397: note = Cas Enzyme sequence
MARKLKNINGPWFAGIDLDGTSVGFVATDEYGEVLYHKGQPVMGTRCFKEALHASEARMPRAARRRLQRARGREREMERVFAPAIAPTDPDFFVRRRMSYKLMRDDIAADPAAAAWQGLLDGYPTLAHLDVDLMESDGPRDPRLVFWAIANHVVRRGHFLMEGNDATSANSDPSAQVEALVRELDALGKACGEAIELDGGALGGMGGSWTARELQKAVSGAVSVTGDDIDAKIARAQAKALGDLVAGYKANMDAFALEGEQIGKISVSDADALDEFLAICPDRLAPTIEAARGLYSAWRLQGLLSFAPGKTLSHNQVAQYEVYGRQLRTLKDLALKYIAHADSEDGPDEDGLALYRDFFGGPKRSGRRGYDKVLVKKLDGAKRNMGYTAYDLNVIPYEEFKKRVERLFKGTDATKDPAYIDMVAALGEHRFLRRIHTTDNSAIPYQLHAEVVGRIIDAQGNFYPWLKDAGPHILKVLTSRIPYYVGPLDSSAAPLDAHGKARFAWSRRLPGHERAFVAPWNYEEHIDTDAAAEAFIRRMTGKCTYLVDEDVLPANSLIYERFRFLNELAGIRYTEDGQDWLPLDAAMRAAVVEAASDGSVMTLSRIANILSRDFTMAHPHVKGVSDAKRMTSRLSVSAWIAGLLGVKSLTAAQKSMAEDIILWNTVFEERSILKRKVAKEYGDILDEGAIEAFCAKRLKGWGQLSERLLTGVWVDTARGDMCIMDVLEQGAPYGRFRGTSMNLMQVLSDTELGFRTRIDEVNATALEKAGEFGIDALPGSPALRRGVSQAMKVIEDMASVAGCAPAKVYVEVTRTASKQLKGKRSRSRAQEIEAALKALDEDARRDLDAARLLRELGMFDEKEINERLYLYFRQAGKSLYSGKPIDIARIASVDYCVDRILPRSVRRDESLDNKVLVLYAESLDRKDSILVPQHVQRKMAPFWMYLRRAGLMTERKLNALMRTQISERMLKSIVGRQLTETSQECKLIAAVLEATYTGVKVVPVKAGVASSVRRRAGIPRSRKANRYYHAHDALIALTTGRFIETRAPMWSNNRAFYERIMRDIEAQERRGGADSELDFFSGGFFRNLVDYDTAEVLWDSDFERERLVRACSWKNLRVTFAPYEEGGAFWKQTVYSPRDSKTKLIPVKGDRDAALFGGYSAQTFAYFMIYETEGKKGNLFRFAPVPTSIASKATDSLTELYARSLCHESGERFVRVVRDRILKETVYEAYGERFRVKGLKTAGPVRQLALDAADTRLLRIVERMVDGEQPSPRRDLESDAKVLCRLWARLLALAPANFPRVSKVLKLGALKTPEKVFADTEADDLAKTVRAVAESEVQVVELLSGIRGTADVRPLGGSAFAGTLSMNFDKIINDPKAGFAIVDISAAGLHERVSTLG

SEQ ID NO: 17143 - protein, 1026 aa, unidentified
  REGION 1..1026: note = Cas Enzyme sequence
MAAYEDPCDCGFDPELVKTALMSREQFGSKPRKLVLGINMGIAGIGVCLMDELNQEIVLMATHLFDCPWNPKNKTSLASARRQARSQRRNIARRAARKKHISMILMAHGVIPEGASSEWFSVRKGEQDNIQLRVKGLSEILSSRELARVLYGFASRRGYIDHGKADNDKDAGKVKKTLKENAEIMDANGYETFAQYLITQPRIRNRQDDYIHCVDIDMVVDEVHAIFRHQRELGNGLATESLEGEYLAALRWLTDTTKRDRIIYSKVGYCTYLGEPIKRGPKSSISSEMVRTYQTLANVKIEHIGSVATQISPLTRNQIVHDLFKVSKNPKPLKWSQLRKKLALADTDTFAGVRQSDEAKDVCVKVPAWNVLCSTLHDLNPALLNRLHDDVDLADAVCAAATFASSSEAFATRIAELTDGLSKEDVDALLELPYGSKLFTGYGSTSLKALQMLRDAFEDTNINRLYDAEVATGLYDARKALSAKRNVTDDGLLKPYSSYSPICTNPVVLRSCARLRRIINSVIRHYGLPDTIRVEVAKELKRTKHEKKLVDDGNKYNKREKEKAVDDIVEYLGLSDADQVRGRDIDKVRLYNEQGGKDPYTGQGIDFGRMLTEKGYVEIDHILPFSRSCDNARTNKVLVLTKSNRDKSNRTPYEWMTSGEPTAPNWDEFCIRMDVWASGKEPKHYYSSKLAKLKEDNFTNNIDSFISRNLNDTRYMSKDVAKWLADCLPFPEDGRKHVFCVSGAATAFMRGIWRIGILDDNGKKNREDDRHYAVDAAVIAACTPSIVKDIALISEEHATNRDADRLLNGSLPYPEYRDQVKAWIPCVVPTYSPTRTATGALFKDNTFSYKGIDGKGKDLIKKKKGALGPCTTAWKDGKGTARAYDEQFGLLAVYDESAARWLLDPLYYIDVQKRKTEEPFIRKFSKDLSIDYWEKIPLTGNEPSLLLKRGVVLIQDGIVGRYYGYDIAHNNVKLSSSGKVSFQKTGPLAAEKFPTPTKWTDELKIMQEDCLGLCWLEFLTERADRC

SEQ ID NO: 17144 - protein, 1026 aa, unidentified
  REGION 1..1026: note = Cas Enzyme sequence
MAAYEDPRDCGFDPELVKTALMSREQFGSKPRKLVLGIDMGIAGIGICLMDKLNQEIVLMATHLFDCPWNPKNKTSLASARRQARSQRRKIARRAARKKHIREILMARGIIPEGVTAEWFSVRKGEQDNIQLRVKGLSQILSSRELARVLYGFASRRGYIDHGKADNDKDAGKVKKALKENAEIMDANGYETFAQYLVTQPRIRNRQNDYSHTIDIDMVVDEVHTIFRHQRELGNGLATETLEGEYLAALRWLTDTTKRDRIIYSKVGYCTYLGEPIRRGPKSSISSEMVRAYQTLANVKIEHIGSVATHISPLTRNQIVHDLFKVSKNPKPLKWSQLRKKLDLADTDTFAGVRQSDEAKDVCVKVPAWNVLCSTLHDLNPALLNRLHDDVDLADAVCAAATFASSSESFATRIAERTDGLKKEDMEALLELPYGSKLFTGYGSTSLKALQMLRDAFEDTNINRLNDAEVATGLYDAREALAAKRNASDDGLLMPYSKYSPICTNPVVLRSCAQMRKIINSIIRHYGLPDTIRVEVANDLKRTEHEKKLITSGNIYNRRTNEKAKDDIVEYLGLSDADQVRGRDIDKVRLYNEQGGKDPYTGQGIDFGRMLTEKGYVEIDHTLPFSRSCDNARTNKVLVLTKSNRNKSNRTPYEWMTSGEPTAPNWDEFCIRMDVWASGKEPKHYYSSKLEKLKEDNFTNNIDSFISRNLNDTRYMSKDVAKWLADCLPFPEDGRKHVFCVSGAATAFMRGIWRIGILDDAGKKNREDDRHYAVDAAVIAACTSSIVKGIALISEEHATNQDADRLLNGSLPYPEYRDQVKAWIPCIVPTYSPTRTATGALFKDNTFSYKGIDGKGKDLIKKKKGALGPCTTAWKDGKGTARAYDEQYSLLAVYEESAARWLFDPLYYIDVQKRKTEEPFIRKFSKDLSIDYWEKIPLTGNEPSLLLKRGVVLIQDGIVGRYYGYDIAHNNVKLSPSGKVSFQKTGPLAAERFPTPTKWTDELRIMQEDCLGLCWLEFLTERANHC

SEQ ID NO: 17145 - protein, 1038 aa, unidentified
  REGION 1..1038: note = Cas Enzyme sequence
MAEYSDPREFGFHPETVMTALMPYEQFSSKTRRLILGIDIGIASVGVCLIDIRNHEIILMASHIFKAPVEGKQKDISARPSGASIRRGYRSVRRTTKRRKNRKKVVRDIEKKYVLIPDDADGQWFAIRKDEPDVLHLRGKALLYKLNARELARILYAFAGRRGYIDHGKGTTDDDSGKVKKALSENRKILDENGYETIAQYLLKQPTSRNREGDYRYRVDIEMVTDEIHTIFRHQRDLGSDIATEELEGEYLSALRWLTDTSARDEKIYGRVGYCTYLGAPEKRAASSLISFEMVRAYEKLSNIKIEHQGREATYISPEKRNEIVASLFAVSKNPKPLKWSQLREKLDMQSSDSFDSRLPTDEKGDCIKIPAWNALCTGLFMSNRALLDRFHDDTDAADAVCSALTYASSGESLRNALENLSLDLSEQDIDSLLDLPYASKLFSGYCSTGVRALQMLRDAFKDPQIEKLYNAEKATGLYEARQALAAERNESKDGLLCPYLEFDPTCTNPVVLRATAQVRRMINSIIRHYGMPDIIRVEVAKDLKRSKHEKAIIAATNKANKDSNEQVKKDLVAFYGLPNDAHVSSTDFEKMWLYREQFGQDPYTGKGINLERMLNDRDYVEIDHILPFSRSCDDSKSNKVLCLTKSNRDKANRTPYEWMTSGEPSAPDFGDFCGRMDAWAGKGKSAHYTKSKLSKLKNSTFGKEEQKFIDRNLNDTRYMSRQLAMWVRECLPFPDDKRQHVFCVAGAATSLMRRIWGIGVVDEKGKKDRSDDRHHAVDGAVIACCSPEIVKGIARVNSGRSNIKERERLRYESMPYPEFKDQVEAWIPCIVPTRTVSRTATGSLLKDTVYPYVGVDDRGKDLYRRNGKIEPASTLWKDGSGGCKLYDGAYGLMAVFDESMKKSGSWRFDPIYYIDVPNVRQDFIREFTKGLSIDYWPKVQLKGDERRIFLKQGDVLLQDGCAMRYYMYNVSNGVVNSYSKIGEKSVPLQKTGPLSDESFPKQAKWDSSLTVMQEDCLGLCWLKFLSDRVGQFENSPV

SEQ ID NO: 17146 - protein, 1404 aa, unidentified
  REGION 1..1404: note = Cas Enzyme sequence
MKKLKQMSGPYSIGFELSSTAHGFVATDPNGNVLYHGKQPVMGTRVFKEGQHAAEARMPRTSRRGIQRRRGREHEMERVFAPVISSIDPDFFIRRRMSYKLGKIRFESDPIGFSYSRLLHSFPTLAHLDVALMESDSAMDPRLIFESVANHVVRRGHFLLENQNVSSTNSDIDTQVANYAEVLVSYFEDTLDERIEPSLEALDINGNVTARELQKRFASAMCVSGDDIQKKTEKAQIKAIADLVAGYKADLTALVPDAEKLPKVSISDGDALEEFLSDSCPDSLVSVLMAAQALYTSWKLQGMLSYAPGKSLSHNQVAQYDVYGKQLRMLKNLALKYVAKQDADGNIDEDGFKDYVRFFGGPKCEDRYRYDKVQVKKQDSPKKNMGYTAYNLNVLGYEEFAKRVELLFKDTDAVNDPQYKTMMEAFANHAFLRRIHTVDNAAIPYQLHAEVVNRIIDNQGRFYPWLIDAREHILKVLTSRIPYYVGPLDSTDHGKAGENGTRFAWVKRLAGHEDAFVSPWNYEDHIDIDTTAELFIRRMTGECSYLDGEDVLAKNSLLYEKYCFFNELASLSFTEDGDSWMPFDAGMRKAIYDAASDGKTMTVKRIESVLQRDFFIAHPHVRGTSNPKAMSSKRSNYAYFCRLFDVKALSASDMSMAEDLVLWNTVFEDRDILRRKILKTYGDLLTEKTVDDFCHKRLSGWGKLSERLLTGIWADTASGDLCVMDVLEQGRPYGRYRGSSMNLMQILNDDALGFKMEIKKINESHMQMAEGFDLNALPGSPALRRGVSQAMKVLDDIVSVAGKAPDRIYLKVTRTASNSRKGKRTAKRSDKIKLALKALDADAAADLGAAKLLRELGMFDEKEINERIYLYFHQAGKCLYTGKPIDITRIASNDYYVDHVVPLAYRKDESLDNKVLVYAEASRYKSETLLVSPAVQRKMLPFWRMLRNAGLMSERKLNALIRTEISEGMLKSIIGRQFTENSWEAKLFTAAIAAKYPGTVVIPVKAGVIGAVRSRIGIPKSLKANQFYHAHDALLAAEVGRYMELAKPVLVHNRVKYEQYMRKIKLVNEENKKTPKSQLDFFAGGFFFDRVDKDTGEVYWNKDEEVERIYRACGWKNLRVTYAAFEDGGAFWKQTIYSPREKSKLIATKSDRPAEIYGGYSSQTFANFFVYEVMKKKVKQLRFGAVPAAIASKSDPDTYNAMLEMYARGLAKTAKEKFVRIVRARVLKNTMIELYGERFRIAGEKQVYPVRQMPLAIDEMYLLKGVETIVAAGNAGASARIDFEKAAESLVGFWDLLLEKLPVNYPKLTVQLKLGSLKHPKDILAATSESEFPAIVYKIAEAEIQVMEQASGLRNMSDTKILGGNTFGGSLVFTFNKVLNDPKSKACFIDTTPAGLHEVKTKIW

SEQ ID NO: 17147 - protein, 1038 aa, unidentified
  REGION 1..1038: note = Cas Enzyme sequence
MAEYSDPREFGFHPETVMTALMPYEQFSSKTRRLILGIDIGIASVGVCLIDIRNHEIILMASHIFKAPVEGKQKDISARPSGASIRRGYRSVRRTTKRRKNRKKVVRDIEKKYVLIPDDADGQWFAIRKDEPDVLHLRGKALLYKLNARELARILYAFAGRRGYIDHGKGTTDDDSGKVKKALSENRKILDENGYETIAQYLLKQPTSRNREGDYRYMVDIEMVTDEIHTIFRHQRDLGSDIATEELEGEYLSALRWLTDTSARDEKIYGRVGYCTYLGAPEKRAASSLISFEMVRAYEKLSNIKIEHQGREATYISPEKRNEIVASLFAVSKNPKPLKWSQLREKLDMQSSDSFDSRLPTDEKGDCIKIPAWNALCTGLFMSNRALLDRFHDDTDAADAVCSALTYASSGESLRNALENLSLDLSEQDIDSLLDLPYASKLFSGYCSTGVRALQMLRDAFKDPQIEKLYNAEKATGLYEARQALAAERNESKDGLLCPYLEFDPTCTNPVVLRATAQVRRMINSIIRYYGMPDIIRVEVAKDLKRSKHEKAIIAATNKANKDSNEQVKKDLVAFYGLPNDAHVSSTDFEKMWLYREQFGQDPYTGKGINLERMLNDRDYVEIDHILPFSRSCDDSKSNKVLCLTKSNRDKANRTPYEWMTSGEPSAPDFGDFCGRMDAWAGKGKSAHYTKSKLSKLKNSTFGKEEQKFIDRNLNDTRYMSRQLAMWVRECLPFPDDKRQHVFCVAGAATSLMRRIWGIGVVDEKGKKDRSDDRHHAVDGAVIACCSPEIVKGIARVNSGRSNIKERERLRYESMPYPEFKDQVEAWIPCIVPTRTVSRTATGSLLKDTVYPYVGVDDRGKDLYRRNGKIEPASTLWKDGSGGCKLYDGAYGLMAVFDESMKKSGSWRFDPIYYIDVPNVRQDFIREFTKGLSIDYWPKVQLKGDERRIFLKQGDVLLQDGCAMRYYMYNVSNGVVNSYSKIGEKSVPLQKTGPLSDESFPKQAKWDSSLTVMQEDCLGLCWLKFLSDRVGQFENSPV

SEQ ID NO: 17148 - protein, 1049 aa, unidentified
  REGION 1..1049: note = Cas Enzyme sequence
SARQEAGSQSAHAPFVLGLDIGTNSVGWALLRLDAGGVATSIERLGVRIFDTGLENFGTSKEASRASGRRLARGMRRQTARRRQRKSKTLGLLIAAGLMPSIDRRRPENVRLALDAIDRELHARHAPKRDDLAHQTLLYRLRARGVHERLGQMELGRVLYHLAQRRGFKSNRRVDGRGKKAADAADESSVVKAGIQSLREEMRAGGHATLGAYFATLDPHVRRIRSRYTSREDYEREFDLLRAMQEPLHPDLPTGFWAGIRAALFDQRPLKSSSHLIGRCDLEERRPRAPLYSDLAQRARILQDVNHLRVSIGSEPERPLTPDERGTLLSALLVGDRLTWPQAAKALGLKKPKVAVQFNLQRGGADNLKGHATAARVRPIVGTDRWDAWTSVERDRVAQWLDSVESPVVLRRLAKEMLELDEEAAEQFANSSVPEGHARHSTRAYRRLLPYLEQGLSYAEAADRAYPDRRRTTEVHSTLPPLVDAFPDLRNPTVARSLTEVRKVVNELIATYGRPERIHVELARDVKRGRKAREEISRKINANRKQREKARAKILAERPNARPSSGDVQKVLLAEECHWICPYTGRSFGMDDLFGDHPTIDVEHIVPFSRCFDDSFANKTLCYVEENRTVKRNQTPFEAYGSDQKRFKEILERVARFDTAYAPRRAKLERFAARDDGEWDLDEFVSRQLVDTAYAARMATEYLGCLYGGRVDADGQRRVQPTNGRVTSYLRRQWGSETLLGKKPDGGSKSREDHRHHALDAAVVALSTPSAVKQLSDAAEKAEARGHTRPFIDIPPPWPGFRSDLERALRPIVVSHRVQRKLNGRLHEETNYQSRKDDEKGWTRKPVSALKDKDLEHIIDPVFRDALMRWIEAGRPDPGPRMRSRDGREQTVRHVRLRGSRGAVPIGEGDRRRYVAPGSNHHMEIVRRLDGKGGYEAFVVTRLEAMERQRLGKPVVRRDFGSERAFMFSLHPGDALARPYGPGWEVLVVSSISDGVVECRFAADARSATDIRKGGAEGGRLAGAPSGFLKQGYIKVDVSAAGRITRSHE

SEQ ID NO: 17149 - protein, 1042 aa, unidentified
  REGION 1..1042: note = Cas Enzyme sequence
MPERVLGLDVGIASCGWGIIDIEGNEIVAAGVRCFDAPLVDKTGEPKSAGRRLARGQRRVIRRRRQRLNAVRRLLCENGLLSSAHAGALQIAAREVRPDTPWSLRAAALERKLEPAEAAVVLGHIARHRGFRSNAKTVAGNAADETSKMKKAMEKTSEKLAQYRSFGDMVANDPAFAARKRNRDKDYALTPYRSDLENEASAIFAAQRRFGNDAMTEELQRRFADIAFSQRPLQDSEDKVGACPFEPGEKRAARRSPSFEMFRFLSRLTALDLSIGRAAARRFEPHEILAAATLFGVNKSLTFSALRKALDLDPNAKFSVPETDKNGKSLDVVARSGAAAEGTKTLRTVLGEAPWASLLKTPERLDRIAEVLSFREDLKRIREGLAETGVEPAVVDCLVNAAEQGEFKEFTRAGHISAKACRAIIPHLMQGLVYSEACERAGYDHAARPQTTLKDVNSPVTRRAFLETIKQVRAVVREYGAIDYVHIELAREVGKSAEERKKLKDGLEERTAEKERRREKASEILGRRVTDDELLRYELALEQQWKCIYSGDPIAPDGFAANDARYQIDHILPWSRFGDDSYLNKTLCTTRANQEKRGRTPFEWYDAEKTEADWSTYVAHVESLSAVKGRKKRNYLLKDAKAIEERFRARNLTDTQWVTRLLADELARMFPPRAERREGERDERRVFTRPGAITSKLRRAWALDGLKKDKDGKRLTDDRHHAIDALVVAATTESLLQRMTKEIQQREKEGRADDIFHVQQPWPGFRMDVIKSVYGENGSGGVFVSRAERRRARGKAHDATIKQVREIDGEKLVFIRKDVLKLTEADLDLIPVPAPYGRIADPQKLRDEMVETLRAWLKLPLAERKKSPPLSPKGDPIRKVRLLSKDKVAVPINGGTVDRGDMARVDVFRKQNAKGKWEFYVVPIYPHQIATMETPPSKYVRGATDAGDWPLLDASHEFVWELNPMVWVEMVKPSGEIVEGYYRRLDINTAAINLSRHFSNDAEIKSQGVKTLSSFRKFRIDRLGRKSEVLREVRTWRGKACT

SEQ ID NO: 17150 - protein, 1061 aa, unidentified
  REGION 1..1061: note = Cas Enzyme sequence
MGERLRILGIDLGIASCGWGVIEAGDDKDGSIVGAGVRCFDAPLVDKTGEPKSAQRRAARGARRVIRRRRQRMNKVRKLLHANGLLPDSTTEALQEALRRVSPKGTHPPITPWTLRAIAHDRLLTIDELAVVLGHITRHRGFRSNSKSEAGANAADETSKMKKAMETTREGLAKYHSFGDMLANDPKFTDRKRNRDKDYSHTAKRSDLEDEVRAIFTAQRHFGNATATDDLAKTFSETAFTQRPLQDSEKLVGKCPFEPDQSRTARRAPSFELFRFLQRLAHLRISIGRVERPLTQEEIALASNGFGETKKTVTFGSLRETLDLDPNARFAGIPKDKESKLDVAARTGGAAYGTKTLKDALGDAPWQSLAKTPEKLDRIAEVLSFREDMDSIRKGLDEIGLDAVIVQCLLDAAAKGEFKDFTRAAHISALACRNIIPGLREGLVYSDACARVGYDHAARPSVQLTEIGSPVTRKAFGEAIKQIRVVAREYGPIDLVHIELARDVGKSAEERREIQDGIEKRTAEKEKRRGEAAEHLGRPPSDDELLRYELAKEQNFKCIYSGDPIEPKGVAANDTRYQVDHILPWSRFGDDSYINKTLCTIQANQDKRGRTPFEWFGAEKTESEWMEYVARVEALKEVKGRKKRNYTLKDAASVEEKFKARNLTDTQWATRLLADELTRMFPAPEGERRVFTRPGAITSKLRRAWGLEGLKKENGERVPDDRHHAVDALVLAATTESLLQLLTKEVQKREKEGRQDDIFHCKQPWPSFRLDVERAVRGENGTGGLFVSRAERHRARGKAHDATVRQVRGADGKKLVNKTPSEINGEKIVYERKLITDKGFKESDVDKIPIPAPYGNIADPKRLRDEMVESLRTWILRGKPKDDLPRSSKGDIIRKVRIATDKKVAIEINGGAVDRGDMARVDVFRKKNKKGKWEFYVVPIYPHQIADEEDWPKPPTQAVQAHVDEAKWPSMDDSFEFKFSLNPMCYLELITSKGEIIEGYYREMNRDDAGITLSAHLSNDARSPKTGSRTLRDFRKFTVDRLGRKFEVSREARTWRGKACT

SEQ ID NO: 17151 - protein, 1097 aa, unidentified
  REGION 1..1097: note = Cas Enzyme sequence
MGQRLRILGIDLGIASCGWAIIEFDGNVWRIVRAGVWEWDAPEYIDKGKTRKSNLKERGVTRRRRRLLDVRQKRMRDLRQLLAHHGILKRTDRNALHFPKLNPWLLRKEALERKLSAEEWAVVLAHMAGHRAYWSNAKRKKNETDDDRKKLLKALKENEREFETARMARTVQTVGEWLANKETQRNRGGDFRHSIKREWVKQEAALLFNRQRELCNPFALSSLLDRYAPLAFEQGEITPPEVGPCTFELSQPRAAKHSYSFERFRLLQRLTNIRLISNPDMPPRSLSDVEIEKIESQLGVKASITYNTIRRLIDLPQTESFHRINDADQEEHEIVTGTKSGKSGPGTRALRMLITKTFGEQTWQSLLAKPDTLDAIAAAIAHRDDLTLIRTELENLNIDPAITDVLVNESDGGELGFFKGTGHLSVKALRKLIPHMLAGCDYHDAQIAAKYDPSKDRYSRRPGIVGAGPQAVAAWLKKDQLEELIRNQVVSRAVREVFKQVIALWRADGPFDAIHLEMARDVGRSAAERDKMDVDNIKRRDRRNALRNSFIENFKKTPSDREFERWTLWCEQKGKCPYTAFNTEGIPCNAVLDGDDRVEVDHILPRSRFNLESLSNKVLCLTGANRNKASFTPHQWLSRGLGKLSWEDFCNQARVIFKDNPRKLDNLLIVDTAILESSLSSRALNDTRWISKFLLAGFEKLGTTDRPLRVQPVNAALVGTLRWAWGLAGWKHDPKNRSTRQSDDRHHAIDAAIVATIDTDLVHRLTRAYQRAEERGEYFEARGFHPPWDTFREELLNRLYGDGAAKAKPSEFTPDSTAGVLVSRGERRRARGQMHKETIYSLTSVNGTGADTTRRVKIERKAVDNKLKVDDLSLLKDADRNYKLADLLRSWIEKGHPADEQPVWKYKLSDGTERYEPIYSVSLVTNDAPAISPKRLRRKGDGTEVAFAAVDRIEMVRIDVFDNGDAGADARYLFVPIYVHQTVDAKPPQRAFTLRRPYEEWPRVGANDKFKFSVYKFSLLKIEVKKDSSAPMLGYYRTLDSNDGRITLTPQYSRDEKLAARFSPTTISSIRKFTIDRLGRKFEVSREVRTWRGKACT

SEQ ID NO: 17152 - protein, 1039 aa, unidentified
  REGION 1..1039: note = Cas Enzyme sequence
MTRILGLDVGIASCGWAILEINGDDGAIVAAGARCFDSPLVAKTGEPKSAARRTARGQRRVIHRRRLRMNRLRELLAGHGALPAAARDAFAEAARRLVETHADASPWRLRAAAHDRALSNDELAVALGHIARHRGFRSNSKREAGANAPDETSKMKKAMEQTREGLAKYRAFGEMIASDPRFAERKRNRDKDYSHTPKRSDLEDEARAIFVAQRRFGQPAANDALEREFAEVAFSQRPLQDSETMLGDCPFEPAEKRTSRQAPSFELFRFLSRLGALRLTTGRTERRLSADEIARASHDFGQATKGVTFTALRRKLDLDPNARFAGVPADREKYDVASRKGDAAAGTHALRQALGEAPWASLMRTPEKLDRVAEVLSFREDFARIADGLREIGLDPLVSERLLDATRDGAFSHFGGAAHISAKAARAIIPGLCEGLDYSEACARVGYDHTARPTVALKDINSPVARRAFLESIKQVRAILHAFGPIDEVNIELARAVGKSAEERAKLTQGIEDRNKEKDKRTKEASELLGAPVSADELLRYELCKEQNFKCVYCDAEIAPNGFSANDTRYQVDHILPWSRFGDDSYRNKTLCCVACNQHKRGRTPSEWFDDDKTPGQWEAFAVRVEGYKEMKGFKKRNFKLKDAASVEDKFKARNLTDTQWATRLLADELKRMFPSKGDERRVFTRPGAITSKLRRAWGLEERKKVDGVRVADDRHHAVDAVVLAATTEGLLQWMTKQVQQREREGRGDDIFHVAPPWRGFREDSDYAIYGKDGAGGIFVSRAERPRARGKAHDATIRQIREIDGQEVVFERKAVEKLTEADLDRIPVPAPYGAVVDPKKLRDETVAALRAWIAAGKPKGEDKLPRSGKGDVIRKVRVESKNKVGIHLNGGAVDRGEMARVDVFRKANKKGVWQYYLVPIYPHEIATMDAPPMRAVVAYKDERDWPVMDSSFEFLWPIESMSFLEVVKSNGKLVAGYFRGLDRTTGAIALANDCNPDDLSRGLGVKTLTSFKKFRVDRLGLSRTEVTREVRTWRGKACT

SEQ ID NO: 17153 - protein, 1061 aa, unidentified; identical to SEQ ID NO: 17150
  REGION 1..1061: note = Cas Enzyme sequence

SEQ ID NO: 17154 - protein, 1079 aa, unidentified
  REGION 1..1079: note = Cas Enzyme sequence
MSENTVRRILGIDLGIASCGWGVIEVGEADGSIIATGVRCFDAPLIDKTGEPKSATRRTARGQRRIVRRRRQRMNGIRRLLGEFGLLTDQSSDALRHALRRITPGPGGSQVTPWTLRAAAHERLLSNDELAVVLGHIARHRGFRSNAKSEAGANAADETSKMKKAMEITSEGIKEYHSFGDMIASDPKFADRKRNRDKDYSHTAKRSDLEVEVRAIFRAQIRFGSAIAGERLSEAFAETAFFQRPLQDSEDKVGDCPFEPGHKRAARRAPSFELFRFLSRLANLKLAVGRSPERRLTPDEIALAAKGFGESKKTITFKSLREALDLDPNARFSGIAKEKESTLDVTAHTGGAAYGTKTLKDALGDAPWRSLSRTPEQLDRIAEILSFREDMTSIRTGLEELDLDILIVDGLMQAAANGDFKDFTRAAHISAFAARNIIPGLREGLVYSEACARVGYDHAARPAVPLCQIGSPVTRKALSEALKQVRAVAREYGPIDYFHIELARSVGKSAEERKKLTDGIEARNVEKEKRRKEAEEHLGRVPSEDELLRYELAKEQKFKCIYSGDAIDPGGISANDTRYQVDHILPWSRFGDDSYLNKTLCTVRSNQNKRGRTPFEWFDADKTEPEWMEYVARVEDLNEVKGRKKRNYCIKDAAAIEDKFKARNLTDTQWATRLLADELKRMYPPRECERVVTGRADGGNDRLSIVEERRIFTRPGAITSKLRRAWGLEGHKKQDGKRVEDDRHHAVDALVLAATTESLLNRLTVEVQKREHEGRQDDIFHCSQPWPGFRVDVQHTIYGSDTMPGIFVSRAERRRARGKAHDATVRQVRGADGKKLFNTKPYEISGEKIVYERKVITDKGFKESDLEKIPVPDPYGKVTDPRKLRDEMVENLREWIRKGKPKDDPPRSPSGDVIRKVRIATDKKVAIELNGGTVDRGDMARVDVFRRKSKKGAWEFHVVPIYPHQIVALESPPNKAVVAYKTENDWTSIDSNFEFVWSLNPMSYLELVKSNGEPIEGYYRSMDRTTGAINLSPMATNSETIRSIGVKTLSSFRKFAIDRVGRKFEISSEVRTWRGEACT

SEQ ID NO: 17155 - protein, 1020 aa, unidentified
  REGION 1..1020: note = Cas Enzyme sequence
MRVLGLDGGIASIGWAVLEIEGDAAGIVAAGSRTFDAPETAKERTPSNAVRRLHRGQRRVIRRRRQRMTALRALFAEHGLLPAAQRDALKQPGLDPWLLRVEGLDRLLTGVELAVALGHIALHRGFRSNSKRERGANAANDTSKMLTAMDATSARLGQCTVAQLFASDPAFADRKRNRNGDYSRSVQRKDLEREVRALFSAQRRLGNTATSPDFEAAFADKAFSQRPLQDSEKMVERCPFEPDNKRTAKRSYAFEMFRLLSRLANLTLTAGAAEWRLSPEQIGQVAADFGTQKQISYRRIRKLLDLDPRTRFASVSPEDEIRDVVARSGNAAEGTATLRDAVGDTAWRTLLHAPETLDRIAEILTFRDDPGSIRAGLDETGAEPLIVEAIMAAMERGAFARFTGAGHVSAKAARALIPHLARGLKYDEACTEVGYDHAAPREIQLEDVRNPVARKALGEMLKQVRAVVQEFGLPERIHVELARDVGKSAEERDEITSGIEKRNKEKDRLRGEFAELLHHEPGSGDDLLRFELWKEQNCRCLYTDEMIPPESIVATDNTVQVDHILPWSRFGDDSFVNKTLCMAHANQAKQGRTPFEWFSADKPAEWAAFEARVEGCKAIRGRKKRGFYLRRNAAEVEVRFKARNLGDTRYATTALLNKLKRLYPTADLRARPGAPTAKLRRAWGLEDIKKDESGQRREDDRHHALDAIVIAATSESMLQALTHASKEAERQGRPRGFLFNDVPEPWPGFREATRDVVMNVFVSRAERRRARGEAHAATIRQVREIDGQSIVYERKPVEKLTLADLEKIPVPVPYGRAVAPETLRDAMVDDLRRWIEAGKPKDAPPLSPKGDVIRKVRVASKDKPAIDLRGGVADRGDMARVDVFGQADKRGVRRFFLVPVYPHQVADQESFPRPPDRVVIQSKPEEEWTVIDARFDFLFSLHGNSLIEVITPEGEVIRGYFKGLDRSTGAISIAMPQNQRLLRRGIGARRLVAFRKLTINRLGRIDVIKSEVRTWHGAAC

SEQ ID NO: 17156 - protein, 1041 aa, unidentified
  REGION 1..1041: note = Cas Enzyme sequence
MGSVERILGIDLGIASCGWGVIEVGNDTGRIAAAGVRCFDPPLVAGEPKSAARRAARGQRRVIRRRRQRMNAVRDLLHRHDLLPNANRDALALALKRISPPGQRPQITPWTLRAAAHDRLLTNDEFAVVLGHIARHRGFRSNSKREAVTNAADETSKMKKAMEQTREGLAKYRSFGEMLANDPKFAERKRNREKDYSHTAKRSDLEDEVRKIFQAQRRLQNPCASEELERQFIDKAFSQRPLQDSEDKVGNCPFEPDQKRTSKRAPSFELFRFLQRLVNLRIAVGRAERPLTPEEIGVVVKKFGEQKTYTYKTLRKDLDLDPNARFSAVARDKENIDIAARKGQSAYGTCVLREALGEAPWQSLQRTPEKLDRIAEILTFREDLASIRNGLNEIGLDQLVVDRLLEAAEQGAFAEFKGAAHISALAARNLIPGLREGLGYPDACARVGYDHSARPAVSLDQINSPVTRRAFAEAIKQVRAVAREYGPFDAIHIELARDVGKSAEERAEITNGIEERNAEKDRRRTEAAELLRRAISDGELLRYELAKEQNFKCVYCDGPIAPTGFSANDTRWQVDHILPWSRFGDDSYFNKTLCCAKCNQDKRGRTPFEWFESEKTEKDWETFVARFESLKEMKGLKKRNFKLRDAAAVEEKFKERNLTDTKWVTRLLADELKRMFPAAEGKRRVFTRPGAITAKLRRAWGLEGAKKENGERMPDDRHHAVDALVLAATTESLLQRMTKEIQKRELEGRADDIFHVREPWDGFRREVMRTVFGENGVGGVFVSRAERRRARGKAHYATIKQIREIDGEQVVFERRPIEKLTEKDLERIPVPEPYGKVADPKKLRDQTVEALRAWIKAGRPKDKLPRSPKGDIIRKVRVATKDKVALEINGGTVDRGDMARVDVFRKLNKRGRPNYYLVPIYPHQIAMPDKFPSPPDRAIVAHKEENEWTAIDNTFEFLFSLSLHDFVEVTKPDGEAIAGYFKGVDRAGGSITLADHCNLQAQTRGIGTKLLADFRKFTIDRLGRKFEVPRELRTWRGKVCT

SEQ ID NO: 17157 - protein, 1039 aa, unidentified
  REGION 1..1039: note = Cas Enzyme sequence
MTRILGLDVGIASCGWAILEINGDDGAIVAAGARCFDSPLVAKTGEPKSAARRTARGQRRVIHRRRLRMNRLRELLAGHGALPAAARDAFAEAARRLVETHADASPWRLRAAAHDRALSNDELAVALGHIARHRGFRSNSKREAGANAPDETSKMKKAMEQTREGLAKYRAFGEMIADDPKFAERKRNRDKDYSHTPKRSDLEDEARAIFVAQRRFGQPAANDALEREFAEVAFSQRPLQDSETMLGDCPLEPAEKRTSRQAPSFELFRFLSRLVTLRLTAGRTERRLSAEEIARASHDFGQATKGVTFTALRRRLDLDPNTRFAGVPADREKNDVAARKGEAAAGTHALFQALGEAPWASLTRTPETLDRIAEVLTFREDFARIADGLREIGLDPLVTERLLEATREGSFSQFGGAAHISARAARAIIPGLRQGLDYSEACARVGYDHAARPTVALKDINSPVARRAFLESIKQVRAILRAFGPIDEVNVELARSVGKSAEERAKLTQGIEDRNKEKDRRAKEASELLASPVSADELLRYELCKEQNFRCVYCDGEIAPNGFSANDTRYQVDHILPWSRFGDDSYRNKTLCCAACNQHKKGRTPFEWFDGDKTAAEWEAFAARVEGYKEMKGLKKRNFKLKDGAAVEDKFKARNLTDTQWATRLLADELKRMFPSKGDERRVYARPGAITSKLRRAWGLEERKKVDGVRVADDRHHAVDAVVLAATTEGLLQWMTKQVQQREREGRGDDIFHVAPPWRGFREDSDYAIYGKDGAGGIFVSRAERPRARGKAHDATIRQIREIDGQEVVFERKAVEKLTEADLDRIPVPAPYGAVVDPKKLRDETVAALRAWIAAGKPKGEDKLPRSGKGDVIRKVRVESKNKVGIHLNGGAVDRGEMARVDVFRKANKKGVWQYYLVPIYPHEIATMDAPPMRAVMQGRTEVEWPVMDSKYEFLWSIESMTFLEVVKSSGELVEGYFRGLDRTTGAIALANDCNPDDLSRGLGVKTLTSFKKFRVDRLGLSRTEVTREVRTWRGKACT

SEQ ID NO: 17158 - protein, 979 aa, unidentified
  REGION 1..979: note = Cas Enzyme sequence
TNAVRRLHRGQRRVIRRRRQRMAALRMMFQQHGLLADTHRDALRQPGLDPWRLRAEGLERPLSGLEMAVVLGHIARHRGFRSNAKREAGANAADETSKMKKAIAATQERLGQWQTVGLMFARDPNYTDRKHNRGLNFDRSIQRSDHEDEVRALFATQRRLGNALATEELQVAYADKAFSQLPLQDSEHLLAACPFEPDQKRTARRCYAFEKFRLLSRLATLRLTVRGQEQPPLSAEQISLAAADFGHQKSLSYRWLRKTLDLDTGVRFAGVAEKDEKNDFVARSGAAVEGTYALREVLGDAGWRVLMRNPVMRDRIGEVLTFREDPGSIRRGLEEAGVEGLILEALMDGVATGKFHAFTRAGHISAKAARALIPPLARGLVYSDACAEVGYDHAKRVEVKLEDVRNPVARKAVTEMLKQVRALVHEYGLPEFIHVELARDIGKGVEERDKITKGIEDRNKERDKARKRLEEDILGRPASLEELIRYELWKEQNGFCLYTGDYIEPGWIAAGDNRVQVDHILPWSRFGDDSFVNKTLCLARANQAKLGRTPFEWFEAEGLDWALFAARVEGCKEMKGRKKGGFYLRKNAAEVEERFRNRNLGDTRYATRLLLDLLARIYPADGKLHVLARPGQLTAKLRRAWGLDDLKKDADGNRLEDDRHHALDAIVVAATSQSMLQQLTKAAQEAERLGAPRGFDFEHVPLPAAGFREIVRDVVKDVFVSRAERRRARGEAHAATIKQVREIDGAQVVFERKAVEKLTLADLENIPVPEPYGRIADPKKLRDETVAELRRWIEAGKPKDVLPRSPKGDVIRKVRVATGDKVAVAVRDGTADRGDMARVDVFAKASKRGKREFYVVPIYPHQVADRNEYAVPPNRAINAFKPEDEWYLIDGNFEFLFSLTQNSLAEIIKPDGEVIRGYFRGVHRGTGNITLALPENPRDLRAGLGPRRLVQFRKLAVDRLGMVSAVEREVRTWHGEACT

SEQ ID NO: 17159 - protein, 1042 aa, unidentified
  REGION 1..1042: note = Cas Enzyme sequence
MMGVRILGVDLGIASCGWGVIESSESDSKVMAAGVRMFDAPLVDKTGEPKSAQRRAARGQRRVIRRRRQRMNAVRKLLHQSGLLPDASPNALHDALRRVSPKGTHPPVSPWTLRAAVHERALTHDELAVVLGHIARHRGFRSNSKSEGNANAADETSKMKKAMEATRGMLAGRTFGQMIATDERFADRKRNRDKDYSHTAKRSDLEDEVRVIFSAQPRLGNTAASQELAARFADVAFFQRPLQDSETLVGKCPFEPDQMRTARRAPSFELFRYLSRLAHLRISVGRSERPLTPDEIALAAKGFGELKKTITFASLRETLDLDPNARFAGIPKEKESKLDVAARAGGAAYGTKTLRDTLGEGPWQSLVKTPEKLDRIAEVLSFREDLDSIRAGLQEIKLEAAIVEHLHDEAASGVFKDFTRAAHISALACRNIIPGLREGLAYSDACTRVGYDHAARAAISLDSINSPVTRKAFGEAIKQIRAVAREYGPFDFVHIELARDVGKSAEERAKLSKGLEDRTAEKERRRNEAAELLARPVSNDELLRYELAKEQGWKCIYSGDAIDPKGFAANDTRYQVDHILPWSRFGDDSYLNKTLCTTVANQNKRGRSPFEWYGADKTEADWNLYVARVESLREIKGRKKRNYVLKTAADIEDKFKARNLTDTQWVTRLFAGELTRMFPAPEGKRRIFARPGAITSKLRRAWGLEGLKKQNGERLPDDRHHAVDALVLAATTESLLNRMTREVQKREHEGRQDDIFHVQQPWPGFRIDVERAVYGESGNGGVFISRAERKRARGKAHDATVKQIREVNGEKVVYERKAVEKLTEKDLELIPVPEPYGRAADPKKLRDEMIEALRVWLVAGKPKDQLPRSSKGDIIRKVRVATKDKVAVQINGGTVDRGDMARVDVFRKKNKKGKWEFYVVPIYPHQIATMDAPPTKAVIAYKSDDEWTPLDDSFEFIWSLNAMSYVEITKSNGECIEGYFRGLHRGTGAASVSKHWTLEKVGANDGIGVKTLADFKKFTVDRLGRKFPVSREVRTWRGKACI

SEQ ID NO: 17160 - protein, 1046 aa, unidentified
  REGION 1..1046: note = Cas Enzyme sequence
MGQRIGQRILGIDLGIASCGWGVIEVGEPDGKVVAAGVRCFDAPLVDKTGEPKSAQRRAARGQRRVIRRRRQRMNAIRKLLQRNGLLANDASSALHDALRRVSPKGTTPPVTPWTLRAAAHERRLSNDELAVVLGHIARHRGFRSNSKSEGNTNAADETSKMKKAMEATREGLAKYRSFGEMLAVDDKFKDRKRNRDKDYSHTAKRSDLEDEVHTIFSAQRRFGNSAATDDFAKVFSEAAFTQRPLQDSEKLVKNCLFERDQLRTARRAPSFELFRFLQRLAHLRISVGRVERPLTPDEIALAAKGFGENKKTITFKSLRETLDLDPNARFAGIAKDKENTLDVAARTGGAAYGTKTLKDALGDAPWQSLIKTPEKLDRIAEVLSFREDIDSIRTGLDEIGLDAIVVQCLLDAAAKGDFKDFTRAAHISALACRNIIPGLRDGLVYSDACARVGYDHTARPTLQLTEIGSPVTRKAFGEAIKQIRAVAREYGPIDLVHIELARDVGKSADERREIQDGIEKRTAEKERRRSEAAEHLGRAVSDDELLRYELAKEQNFKCIYSGDAIDPKGIAANDMRYQVDHILPWSRFGDDSYINKTLCTAKANQDKRGATPFEWFVASKTEAEWMEYVARVEALKEIKGRKKRNYVLKDAASVEEKFKARNLTDTQWATRLLADELTRMFPAEKDQRRVFTRPGAITSKLRRAWGLEGRKKDNGVRVPDDRHHAIDALVLAATTESLLNRMTKEVQQREQEGRQDDIFHVQQPWPGFRIDVERAVYGKDSTGGVFVSRAERRRARGKAHDATIKQIREVDGERIVFERKAVEKLTEKDLEKIPVPAPYGKTGDPKKLRDEMVETLRQWIAAGRPKDQLPRSPKGDIIRKVRVATKDNVAVELNGGTVDRGDMARVDVFRKRNRKGKWEFYPVPVYPHQIARMELPPNRAVIAYKPDDEWTSLDDSFEFLWSLNPMSYVEITKANGEFIEGYFRGLHRGTGAANVSKHSTLDKDGASDGIGVKTLSSFKKFTIDRLGRKFEVQREVRTWRGKACT

SEQ ID NO: 17161 - protein, 1042 aa, unidentified
  REGION 1..1042: note = Cas Enzyme sequence
MGVRILGVDLGIASCGWGVIETAEPDGHVVAAGVRMFDAPLVDKTGEPKSAQRRAARGQRRVIRRRRQRMNAVRKLLQQNGLLPDASPGALHEAMRRISPKGIYPPITPWSLRAAAHQRALTNDELAIVLGHIARHRGFRSNSKSESNANAADETSKMKKAMEATREGLAKYHSFGDMLANDEKFRDRKRNRDKDYSHTAKRSDLEDEVRVIFSAQQRLGNTAANRELSTRFADVAFFQRPLQDSEKLVGKCPFEPDQMRTARRAPSFELFRYLSRLAHLRISVGRSERPLTPDEIALAAKGFGELKKTITFSSLRETLDLDPNARFAGIPKEKESKLDVAARTGGAAYGTKTLRDTLGEGPWQSLMKIPEKLDRIAEVLSFREDLDSIRAGLQEISLEAAIIEHLHNAAANGVFKDFTRAAHISAVACRNIIPGLREGLAYSDACARVGYDHAARAAISLDSINSPVTRKAFGEAIKQIRSVAREYGPFDFVHIELARDVGKSAEERAKLSKGLEERTAEKERRRNEAAELLARPVTDDELLRYELAKEQGWKCIYSGDAIDPKGFAANDTRYQVDHILPWSRFGDDSYLNKTLCTAAANQNKRSRSPFEWYEADKTEADWNLYVVRVESLKEIKGRKKRNYVLKAAADIEEKFKARNLTDTQWVTRLLADELTRMFPAPEGKRRIFPRPGAITSKLRRAWGLEGLKKQNGERLPDDRHHAVDALVLAATTESLLNRMTREVQKRENEGRQDDIFHVQQPWPGFRIDVERAVYGENGSGGVFISRAERKRARGKAHDATVKQIREVNGEKVVYERKAVERLTEKDLELIPVPEPYGKTANPKKLRDEMIEALRAWLVAGKPKDRLPRSPKGDVIRKVRVATKDSVAVQINGGTVDRGDMARVDVFRKKNKKGKWEFYVVPIYPHQIAIMDTPPTKAVIAYKSDDEWTLLDDTFEFIWSLNAMSYVAMTKSNGEFIEGYFRGLHRGTGAANVSKHWTLEKDGANNGIGVKTLADFKKFAVDRLGRKFEVSREVRTWRGKACT

SEQ ID NO: 17162 - protein, 1061 aa, unidentified
  REGION 1..1061: note = Cas Enzyme sequence
MGERKRILGIDLGIASCGWAVIEAGENEGDTIATGVRCFDAPLVDKTGDPKSAQRRAARGARRVIRRRRQRMNKVRKLLHGNGLLPDSTTEALHEALRRVSPKGTHPPITPWTLRAVAYDRLLTNDELAVVLGHIARHRGFRSNSKREAGANAADETSKMKKAMEATRDLLMGRTFGQMMATDERFVDRKRNRDKDYSHTAKRSDLEDEVRKIVSAQRRFGNAAATDDLAKTFSETAFSQRPLQDSEKLVGKCLFEPDQLRTARRAPSFELFRFLQRLAHLQISVGRVERPLTQEEIALASKGFGETKKTITFGSLRETLDLDPNARFAGIPKDKESKLDVAARTGGAAYGTKTLKDALGDAPWQSLIKTPDKLDRIAEVLSFREDMDSIRKGLDEIGLDAVIVQCLLDAAAKGEFKDFTRAAHISALACRNIVPGLREGLVYSDACARVGYDHATRPSVQLTEIGSPVTRKAFGEAIKQIRAVAREYGPIDLVHIELARDVGKSAEERREIQDGIEKRTAEKEKRRGEAAEHLGRAPSDDELLRYELAKEQNFKCIYSGDAIDPKGVAANDTRYQVDHILPWSRFGDDSYINKTLCTTKANQDKGGRTPFEWFKADKSEEDWLEYQARVDGLKEVKRRKRKFFLIGKISSEIEDKFKRRNLTDTQWATSLLAEELKKDCLKWIFTERSGRQVRTRPGAITSKLRRAWGLEGLKKENGERVPDDRHHAVDALVLAATTESLLQLLTKEVQQREKEGRQDDIFHCNQPWPGFRIDVERAVRGENGTGGVFVSRAERHRARGKAHDATVRQVRGADGKKLVNKTPSEINGEKIVYERKLITDKGFKESDLDKIPIPAPYGNIADPKRLRDEMVESLRAWIGKGKPKDDLPRSPKGDIIRKVRVATDKKVAIELSGGAVDRGDMARVDVFRKKNKKGKWEFYVIPIYPHQIATMEEPPDHAVKGGGEESEWAPLDANSEFLWSLYSMSFLEIVKSDGEAIEGYFRSLDRNTGAVTVSPQVTNDEIRKGIGVKTLSSLKKFTIDRLGRRFEVSREVRTWRGKACT

SEQ ID NO: 17163 - protein, 1029 aa, unidentified
  REGION 1..1029: note = Cas Enzyme sequence
VRIFGIDGGIATIGWAVLDQSSDSMTIVAAGTRTFDAPETDKERTPTNAVRRLHRGQRRVIRRRRLRMNELRRLFHGAGLLPDATRDALAPRVGEPRTDPWHLRAQGLDRALTGAELAIALGHIARNRGFRSNAKREAGANAADETSKMKKGIAAIQERMAGHRSVGEMFAKDFPDRKHNRGLNFDRSILRSDQEHEVRDLFAAQRRLGNGAATEALESQFASIAFFQRPLQDSEHMVGPCLFEAGEKCTARRSYAFEMFRLLSRLAALKLSTRGHDDRTLNAEEVALASADFGRQKKLTWKWLRKTLDLDPSVRFAGVTEKDESNDFVARSGNAAEGSYTLRELLGDAGWRVMMHNPVQRDRVAEVLTFREDPGSIREGLIQAGVEPLIVDTLMHGVDIGAFSQFTRAGHISAKAARRLIPPLSQGKVYSAACEDIGYDHAARPEVSLEDVRNPVARKAVTEMLKQVRAMMHAFGGLPDFIHVELARDIGKGVEERDKISKGIEDRNKQRDRLRKELEETILGRTASLEDLVRYELWKEQNGFCLYTGDYIEPSLIAAGDNRVQVDHILPWSRFGDDSFWNKTLCMAAANQAKCGRTPFEWFEADKPAEWALYAERVERCKEMRGRKKGAFYLRKNAKEVEDTFRSRNLNDTRYATRLLLDLLARLYPVDGKRHVLARPGPLTAKLRRAWGLDDLKKDEKGNRLDDDRHHALDAIVVAATSESWLNKLTKAAQKAERQGLRRGWDFDQVPLPAHGFREIVREVVEGVFVSRAERRRARGEAHAATIKQVREVDGKDVVFERKLVEKLSLQDLDNIPVPAPYGKIADPGKLRDELVAELRRWIEAGKPKGDLPKSPKGDVIRKVRVASKDKVAVSVRGGTADRGDMARVDVFAKASKKGKREYYLVPIYPHQVADREKWPVPPDRAVVAYKDDAEWAPIDSTFQFLFCLYGNSLLEITKSDGEVIFGYFKGVHRGTGALAIAPHHDARSIRGGIGAKTLLSFRKKTVDRLGRHVVIETEVRTWHGEVCT

SEQ ID NO: 17164 - protein, 1041 aa, unidentified
  REGION 1..1041: note = Cas Enzyme sequence
MTRILGLDVGIASCGWAILETTGDSGGIVAAGVRCFDPPLVAKTGEPKSAERRTARGQRRVIHRRRLRMNRVRELLARHGALPDADRNALAGAARRLAEAAGESGASPWRLRAAAHDRALCNDEFAVVLGHIARHRGFRSNSKREAGANAPDETSKMKKAMEQTREGLAKYRAFGEMIADDPKFAQRKRNRDKDYSHTPKRSDLEIETGKIFAAQRRFQQQIASDALERDFAEAAFSQRPLQDSETMLGYCPFEPSEKRTAKHAPSFELFRFLSRLVTLKLTSGRTERSLSADEIARASRDFGQATKGVTFTALRRMLDLDPGARFVGIPVDREKYDVAARKGEAAAGTHALHQALGDAPWASLARTPEKLDRVAEVLSFREDFARIADGLREIGLDPLVCERLLDAARNGAFSHFGGAAHISAKAARAIIPGLREGLDYSEACARVGYDHAVRPTVALKDINSPVARRAFLESIKQVRAILRAFGPIDEVNVELARDVGKSTEERAELTQGIEDRNKEKDKRAKEASEILGATVSADELLRYELSKEQNFKCVYCDAEIAPNGFSANDARYQVDHILPWSRFGDDSYFNKTLCCAACNQHKRGRTPSEWFDDDKTAGEWDAFAARVEGYKEMKGRKKRNFKLRDVNKDVEDKFKARNLTDTQWATRLLAIELERMFPPKAKERRVYTRPGAITSKLRRAWGLEGQKKVDGERVADDRHHAIDAIVLAATTASLLQWMTKQVQQREREGRGDDIFHVAPPWRGFREDSIRAIYGEGGVGGIFVSRAERPRARGKAHDATIRQIREIDGEEVVFERKAIEKLTPADLDRIPVPAPYGAIVDPAKLRDATVAALRAWIDAGKPKGEDKLPRSPKGDIIRKVRVETDVKVAIRLQGGTVDRTAIVRLDVFETREPKSKSHYRFVPIYAHEIVESSAPNQFFELRKPAQKWKPISNFDKFMFSLAPMCLTEIATKGGEPTIWYYRGFDSNDGRITLSPHQSKELDLQKRIAPTTIESLKKLAIDRLGCVSEVPRETRTWRGAVCT

SEQ ID NO: 17165 - protein, 1058 aa, unidentified
  REGION 1..1058: note = Cas Enzyme sequence
LAISSSTPVPAVAEFVHMTRILGLDVGIASCGWAVLEMNGESAGILAAGARCFDPPLVPKTGEPKSAGRRTARGQRRVIHRRRLRMNRVRELLTRHGALPVAERDALAEAARRLAETSPDGRASPWRLRAAAHDRALSNDELAVVLGHIARHRGFRSNSKREAGANAPDETSKMKKAMEQTREGLAKYRAFGEMIASDPKFAERKRNRDKDYSHTPKRSDLEDETRAIFAAQRRFGQRAASDALESDFADLAFSQRPLQDSETLLGDCPFEPGEKRTSKQAPSFELFRFLSRLVTLRLTTGRMDRALSADEIARASRDFGQATKGVTFTALRRKLDLDPNARFAGVPADREKNDVAARKGEAAAGTHALRQALGEAPWASLMRTPEKLDRIAEVLSFREDFARIAEGLREIGLDPLVCERLLDATRDGAFSQFGGAAHISAKAARAIIPGLREGLDYSEACARVGYDHAARPIVALKDINSPVARRAFLESIKQVRAILRAFGPIDEVNIELARAVGKSAEERAKLTQGIEDRNKEKDRRAREASDLLGATVSADELLRYELCKEQNFKCVYCDAGIAPDGFSANDARYQVDHILPWSRFGDDSYRNKTLCCVACNQHKRGRTPSEWFDEDKTPGEWEAFAARVEGFKEMKGLKKRNFKLKDAAAVEDKFKARNLTDTQWATRLLADELKRMFPSKGDERRVFTRPGAITSKLRRAWGLEGQKKVDGARVADDRHHAIDAIVLAATTEGLLQWMTGQVQQREREGRGDDIFHVAQPWRGFREDSIRAIYGEGGVGGVFVSRAERPRARGKAHDATIRQVREIDGEAVVFERKAIEKLTEADLDKIPVPAPYGAVVDPMKLRDATVAALRAWIAAGKPKGEDKLPRSPKGDIIRKVRVESKNKVGIRLNGGAVDRGEMARVDVFRKANKKGVWQYYLVPIYPHEIATMDAPPMRAVVAYKDEGDWAVMDSTFEFLWSIESMVFLQAVKTSGEIVDGYFRGLHRGTGAVALSSHKNSEEVATGIGVKTLASFKKYRIDRLGLSRTEVTREVRTWHGKACT

SEQ ID NO: 17166 - protein, 1055 aa, unidentified
  REGION 1..1055: note = Cas Enzyme sequence
MAADSPYVLGLDIGPASIGWTLLDTDLRSRPRAVRRAGVHLFEAGVDGGKLDPETALTRGREQSKAKPRRDARAMRRQTWRRARRKKKVLGALIRHGLLPEGDLRTSAAIDEYVKAIDAKLRTRWEHDGATHEDRQKLPYRLRAAAAVRPMESDEVGRALYHLAQRRGFLSNRKTPERDDDTSQVKEAIGDLAKKIDAHDPPTLGAYLSSVDPDEERLRARWTGREMYEEEFERIWRAQAGAHGLSDAARKEIYAAIFSQRRLRDQRHLVGRCSLTGRPRCPIALRVAQRFRVLQQVNHLRVATGDLDERGLTSEERRALTDALCREGDLTIPRAKKAAGLPRSVKFSIERGGEKRLVGHRTDARLREVFGDLWDDLTERQRDTVVEDVRSVREPDTLARIGRRRWGLDADAAAAFADVALEEGHSPHNRAALRRLVAHMEDGAAYGAARKEEFPEAFSSETPHEALPPVAEWDRDLRNPSVTRALTEVRKLVNAVIRRHGKPERIHIEMARDLKAGRSKRERINKRMRDREKERQQAAEAITRELGYSDPRRWQIEKWLLADECGWRCPFTGREFGARELMGSQSQFDVEHIWPFSQSLDNSFLNKTICHHEENRTRKRNQTPAQAYAGTPKQYEEILERVKAFKGDRFAVREKLRRFTEDIDAGFTNRHLTETRYIADLACEYLGLLYGGRVENQGEDGSTRRIITPSGGLTAWLRRGWGLDAILSDRDEKERNDHRHHAIDAIVVALADQRAIQRLAEAAERMEREGRERPFDRVDLPWDDFVEDAHAAVERVVVSHRQDRRVRAGKEGGHGVRGKLHEDTLYSREHNGRRRVSKELWKLSPTDVEKGKVVDRRALEVIRKKLEELGERDPSKAFQDRANLPTVRGQGGRDVPLRRVRIEVGGAFRQFGRPPHDRYAPIESNHHMAFYDRKVPGGGVERISEIVSLPQAAERLRQGRPVVDRTSRGQHEFAFTLANGEHIVLRDEQGERICRVTTISHNELWLVFHSDGRAKTERAKTISAEGLRLTKGAIAKGPFRKVHINYLGEVHDAGG

SEQ ID NO: 17167 - protein, 991 aa, unidentified
  REGION 1..991: note = Cas Enzyme sequence
KMDPETAMTRGKEQSRATPRRDARAMRRQIWRRARRKKKVLGALIRAGLLPEGDIRTPEAIDAYVKQLDATLRERWEGAGASHADRQRLPYRLREAAATREVERDELGRALYHLAQRRGFLSNRKAPDRDDEDRSAMKKSIGELAERVAAHDPPTLGAYLASLDPDDERLRGRWTSRQMYLDEFDRIWEAQRERLGLSDEQRDEIHDAIFHQRPLKDQSHLVGRCSLVDGAKRCPIGDRIAQRFRVLQQVNHLRVVFDDMTERALTREERDALLDALLAEGDLTFHKARKAAGLPRAATFSIERGGEKKLVGHRTDAKLRRIFGPERWAAMSEGEKDAAVHDVRSVREADVLRRIGRSRWGLDAEAADALADLTLEEGHSAHSREALRRLVPRMEQDGLSYSEARKDEFPESFQSEEPHDLLPPLEQWDADLRNPSVARALTELRKLVNAIVRRYGKPVRIHLELARDLKAPRAKREKIAQRMRNREKERETAASVIMRELGVASPPGWMIEKYLLAEECGWHCPYTGRGFCIHDLLGRNPQFDVEHIWPFSRSLDNSYANKTICYHEENRNRKQGRTPTEAYSEQELEAILERVRAFKGDPFLIRAKLRRFTDPIEEGFTERHLQETRYIGRLACDYLGLLYGGQVEAQGTAVSQRRILTPTGGLVAWLRRGWGLNAVLSDRNEKERSDHRHHAVDAIVIACADQRAIQRLSESAERMEWVGKERPYEAVDHPWEGFEEAVQEAIDAVVVSHRQSRKVRGPLHKETLYSKEHNGRRRIRKRVELLSTADIEKERIVDRRALEAIRAKLVELGESNPAKAFKDPASRPAVRGRGGRAVTLRKVRVEVGDRPRAFGKGAKRRYAQTARNHHMAFYQRALPGGRIERMTELVSLADLAARSSVLDREAQNGFEFAFSLAPNEFVVIKDAKGDECLCRVLSISADDLELVHHTDGRTSTDRKGERIRLRRRGLSEDSIRKVHVNYLGEVHDAGG

SEQ ID NO: 17168 - protein, 1050 aa, unidentified
  REGION 1..1050: note = Cas Enzyme sequence
MPTVLGLDIGIGSCGWSFVQTPDIDVETGEVHADFAIIGLGSRCFEVPEEPKTRELKNKARRQARGQRKTVRRRAWRIAGVRRALSKAGLPLPGESPKLGLDPASKARAAQLVWRLRAEGLERLLQPEEFARVLIHLAKHRGFKSNAKRDLGNQDKETGLVKAAIRANRDRLAGRTIGQMMVAEPSPDGRKRNRTKDYRFTMARDDIEAEIRALFRAQRRLASPCASEAIEEDYSRYALAQMPLKPSEDVIGACRFESQEKRAYRNCPSFELFRFLSKLNNLRILADVKAEPLSESQRLAARRAFALTGEISYAGLRKAIALPKDWRFAGLECEKEAKAFASFPGAHALRSALGPARFDHLFRDSPEILDQAARDLIRLDGLLEIENAINLLPLSEAERSALTDQDLIARFAGLSGVGHISALAARRLRTPLEAGQVYSEACVTVGYDHAALGQSRLEDIRNATVQRVLRESLKQIKVIIDRHGMPDFIHLEMARDVGKSPDERLEITKGIDKREEVKSTRIKEMIEKFPDHFRNRKPNGEELLRYELWTEQNHHCLYSGQYIGPNDWLDNDSGVQVDHILPYSRSGDDSYKNKVLTLAAPNQEKRNRTPFEWLGDSPDRWRAFVASVNLCTGLHKEKRRKLLLQSFKERQEDYRERHLNDTRHAIRALRHELELKYPALLTQAGGQRRFFARPGAITALARRSWGLNNLKYGRETELLGDRDHALDATVVACVTEGLLQYMTRAIQRDEEIGRRGRLNLPTPLGDSPGARESFRRQVEQACRAVVVSRPENRRARGPLHAETLYGLRETAEGEAAQTANTHLSKLTPAHLDHLVGDAARVTPLRETLAAWLARANGKPAKLADAGDFPRMPRKGETPGEGTGPMIRNVKVWRAKQQSGMKIKRGDAQVHVDLESMVRVDVFSKGGKNYLIPIYLYQLSLPEPPMKAIKALKKEEEWDEIDASYEFRFSLYSGSYVEVAERSGDLVSGYYRGCNRSVATINISSPSEYRSDQQVSVSPKTARSIRKFQVDRFGALHEIIREPRLWPGAAS

SEQ ID NO: 17169 - protein, 1025 aa, unidentified
  REGION 1..1025: note = Cas Enzyme sequence
VVGSGKRVLGLDIGIGSCGWAVIETAPWEIVASGSRCFEVPELAKNKKLTNAVRRKARGQRKVIRRRRQRLEDVRGLLDKAGLPRPGRTDSGTVAGHVWQLRAEALERLLTPGELAAVLIHIAKHRGFKSNRKRDRDNQAESGKMLTVIQARERDLGARYPTFGAMMAQAPEFALRKRNSKDDYRHTPLRSEVEREARKILSAQRDLGNTYGGASFEEDFVGIAFRQRPLQDSVRLLGRCRLEPKQPRAARHCPSFERFRYLSKLATLRVSRGSEAPRPLTEVERDKALELAGKSREISYSQLRKAIGLAGDERFEGLSRRAKNPESASLGDFQATTLLAEVLGEVELADLMARTPQQLDDAMAAIVFHETPETIDAKLAGIGLDEAVRHCLIDNVGMFARLSGAGHISACACRRLLPLLEAGLGYPQSCERLGYKHWDMGGSRINSVKNPVVRKVLRECVRQIEVVIATFGKPDEIHLEMARAIGKSAKERDDIDTANEKRRAERRRNRDAFEKLLDTEPRDDELAAFELWQEQHHRCLYCDRAISCKALTAGDNSVQVDHILPFSRSGDNSFRNKVLTHTGCNQDKRDRTPFEWMADDAERWQAFMVRVDAHTGLHHQKKRNLKNKSFAARESAYRERHLNDSRYAMRVLRIELRARFGELGEGARFFAVPGAMTAMVRRAWGVDSLKKDNILGDRDHALDALVVASVDRSRLQQATAAYQKVEIEGRGRFVPPVRTPVDDAAAFRRALAEAALGVFVSRSETRRGRGALHADTLYGLKDTPDGTVQTERKPVSALKPADLDRLVGDPERCRCLRAALAAWLDAAARAGVKPDKHVLDHPPRMPTRDGSPGPVIRSVRLVRKALKSGLPLQRGEKIAHVDLETMVRADVFTKAGKYYLVPVYAHQVANRRDFSQPPNRAVVAHKAESEWAEVDATYEFLFSLYPGSWIEAIDRSGEVHEGYYRSLDRRTASISFSRHFEFDSKAQLRVGTKTLRSFRKFNVDRLGHRSVVGKERRVWHGAALS

SEQ ID NO: 17170 - protein, 1078 aa, unidentified
  REGION 1..1078: note = Cas Enzyme sequence
MQLREDIILGLDIGIGSVGWAAVQANNDGSFSPVYLPSSNGDSQYALGVRAFDIPENPKTKELLNVARREKRRQRVTIRRRRKRMQKVRNLLVKHGLLRSDDPQQTHYPYRRERPQHDPWQLRQEGLQRMLRNEELAVILIHIAKHRGFKSNSKKDKSLGGGTETGKMLSAVSSLEARIAESGAETVGEYMAGLDRKRNRRGFDDKAVYDNTILRDLLAKEANILFERQRSFGQNNASDALLTSFKEIAFRQEPLKSVEGLIGSCLFEPGEKRAPKHAYTSEKFRLVQRLTVIRLRYPEGRSERIASLKVKELAGTLGTSKGITYKALRNFLKLDSSVLFEGLDYGKKDKAGKEVDAEKSDIVTRTRACAEGSHTFYKVLGKNIYSGFVEKYTENGQRVIDAASRIISVNDDLQKISEELANLPLPEQEVRLLTEAVHEGRFSHFRGTMNLSLKAMQNILPHMIEEQDYAAGCEASGYDHAKTRPVNPDAIRNPVVRRILKEVRKQFRAVIRELGVIPGRVHIELLRDMGKSAEERNEIENSIKRRTAEKKQAREDFASLVHKRPEDISVTELMRYELWKEQGGKCAYWILWRHCGGGRHYTAGHMPEGSIALTSLLDEYNQVQIDHILPRSRTFDNSFHNLCLCSTAANQAKGNLTPWEWLGRDNPEAWHEYEAWIRSLRIKGLKKRNYTLKNLDQDREGRFHERNLTDSRYAARLVLAWFAEEYENLGVDDHDLEGCAINRFRSRPGQLTSILRQSWGVNGLKYDDMKQRVGDRHHALDALVVACCTESTLQKMTQLYKLMEHHQEKYRLTPQIPAPWDNFRNDAARMLRNVFVSRAERGNTKGALHEETLRQVRVEIDDNGNEREIVYERVAIKDLNENDLVRIKDAERNKWLIDILRAWIAAGKPKGTPPSSPKGDPIRKVRLRRGAFTSGIKVARGEGLAQADNAKMVRTDVFTKDGKYYLIPVYTSQIARGEAPNRAVVANKPESEWTLIDDTFSYLFSMTPNSYIVTEDRKGLIREGYFTSTDRTTAAITLRQANDHTKEIRSGTKTLKLFQKYRVDRLGRLYRVRKEVRP

SEQ ID NO: 17171 - protein, 1078 aa, unidentified
  REGION 1..1078: note = Cas Enzyme sequence
MQLREDIILGLDIGIGSVGWAAVQANNDGSFSPVYLPSSNGDSQYALGVRAFDIPENPKTKELLNVARREKRRQRVTIRRRRKRMQKVRNLLVKHGLLRSDDPQQTHYPYRRERPQHDPWQLRQEGLQRMLRNEELAVILIHIAKHRGFKSNSKKDKSLGGGTETGKMLSAVSSLEARIAESGAETVGEYMAGLDRKRNRRGFDDKAVYDNTILRDLLAKEANILFERQRSFGQNNASDALLTSFKEIAFRQEPLKSVEGLIGSCLFEPGEKRAPKHAYTSEKFRLVQRLTVIRLRYPEGRSERIASLKVKELAGTLGTSKGITYKALRNFLKLDSSVLFEGLDYGKKDKAGKEVDAEKSDIVTRTRACAEGSHTFYKVLGKNIYSGFVEKYTENGQRVIDAASRIISVNDDLQKISEELANLPLPEQEVRLLTEAVHEGRFSHFRGTMNLSLKAMQNILPHMIEEQDYAAGCEASGYDHAKTRPVNPDAIRNPVVRRILKEVRKQFRAVIRELGVIPGRVHIELLRDMGKSAEERNEIENSIKRRTAEKKQAREDFASLVHKRPEDISVTELMRYELWKEQGGKCAYWILWRHCGGGRHYTAGHMPEGSIALTSLLDEYNQVQIDHILPRSRTFDNSFHNLCLCSTAANQAKGNLTPWEWLGRDNPEAWHEYEAWIRSLRIKGLKKRNYTLKNLDQDREGRFHERNLTDSRYAARLVLAWFAEEYENLGVDDHDLEGCAINRFRSRPGQLTSILRQSWGVNGLKYDDMKQRVGDRHHALDALVVACCTESTLQKMTQLYKLMEHHQEKYRLTPQIPAPWDNFRNDAARMLRNVFVSRAERGNTKGALHEETLRQVRVEIDDNGNEREIVYERVAIKDLNKNDLVRIKDAERNKWLIDILRAWIAAGKPKGTPPSSPKGDPIRKVRLRRGAFTSGIKVARGEGLAQADNAKMVRTDVFTKDGKYYLIPVYTSQIARGEAPNRAVVANKPESEWTLIDDTFSYLFSMTPNSYIVTEDRKGLIREGYFTSTDRTTAAITLRQANDHTKEIRSGTKTLKLFQKYRVDRLGRLYRVRKEVRP

SEQ ID NO: 17172 - protein, 1103 aa, unidentified
  REGION 1..1103: note = Cas Enzyme sequence
MIRMTETTSHQTFVLGLDLGVSSIGWAMIGTEVPHRIIRAGVHLFEAGVDGGKQDAETAMETGREKSRAMPRRNARQQRRQTWRRALRKRKILKALIRHGLFPEPIDRLASPADIDAYLKQRDAELRATWEVRPEVDHRTRQVLPYRLRAEALHRKLEPYEVGRAIYHLAQRRGFLSNRKTDVEDSADDDKNTGAVKKGISELDALMEAAGAETLGAYFASLDPSSKENHRIRGRWTARSMYEHEFHRIWDEQAKHHPDAMTASAMQEVRRAIFFQRPLKSQRHLIGRCSLITTKRRAPIADRLFQYFRMIQKVNDLAIIPCMKVVEDDIDRKTGEIKLNPKTGRPKPANRIVPDPTQVPRPLTTEERNAAIELLSQGDASFTKLRTAGAAPKLSRFNFENEGESKLPGLRTDGKLRNIFGERWDQLTGDGKDAVVDDCLSIVRADVMEKRGREHWQLSAENARAFARVKLEEGYANLSRAAMRKLLPELENGTRYATARKEHFPESLVSVEPVDELPPVAVAFDDPVSPAVARALSEMRSVVNAIIRRYGRPEHIRIEMARDLKKGPKRRQAISKNMADRRKLRESAAWRLLKEYPNRGSSPEDVSGTDILKVLLADECNWCCPYTGRCFGWEDVFGSNPTIDIEHTWPFTRSLDDSRINKTLCDVHENRNVKRNRMPSEVYSGDRFAEIIQRVATFKGDDAKRKLERFQAEAIPPDFTNRHLSESRYVSRKAAEYVALLYGGLSDEESTRRVHMTSGGLTAWLRREWGMNAILSDRNEKERDDHRHHAIDAIIVALTTASIVKKLQQSAARADEARSHRRFAGVEPPFDLEDARRSIEAIVVSHRQNKKARGKFHNDSIYSKPLPENSGKAGHRIRKELHKLNEKELDSIVDPRIRAVVRKAYDQRRLEGAKDPSQAFSEEIYRPELPHGDRVRRVRLFTTAKPKLLGSSENDRKHRGESKQRRVNLQNNHHTVIMARLDKDGKENTWVDEPVTMLEAMDRVRDGKPLISREVPEGQVFKFSLAANDYIEMDLTDGQGRAIYRILSVSKNDLEVASHTDGRTSKERMAAKERERVRGSSLHKRNARKVHINYLGEVKNAGG

SEQ ID NO: 17173 - protein, 1050 aa, unidentified
  REGION 1..1050: note = Cas Enzyme sequence
MSEFRYGLGLDQGVGSIGWAVLRLDADGQAVGIERMGTHLFEAGTEGDIARGKDESRAGPRRMARQNRKKYRRTWVRKRRLLKLLQGLGLMPVGDVTTPEVRDALLKGLDAELRTVWEGADADHRMRQLLPYRLRAAGLERRLEPFELGRAIYHLAQRRGYLSNRKQLAEEQAAEQKGKGASEAGGEGEKGKKEDVGAVAAGIDELKRQMEAAKCRTLGEYFAKLDPTGGSGDRIRRRWTAREMFKEEFGRLWSVQAGHHAQLTEEARKQVYRAIFFQRPLKGAAHLIGRCELVPGERRAPLGCRVAQRFRMLAAVNNLEILLPDYTRRILTRDERDRLVQHLSEEGDVTFAALKTKKWFGLPKGSRFNLEEGGEKRLVGHRTDAKLRAIFGEAWGQMSEERKDRVVADLLLFEKPGALAKRGQRVYGLDAEAAQKLGVCVLEPGYAAHSERAMRTLLSRMEEGTRYMTAKVEEFPHTAGDTAVVDELPPVESALGAVRNPAVTRALTELRKLVNAVVRRYGKPEWVRLELARDLKRSRKQRERLSEEMRARESEREKVRAKIVAKGIVHPSRSDIERVLLAEECSYQCPYTGRSFGLEDVIGRHPQVDVEHIWPMSRSLDDSYLNKTLCYHEENRNVKGNWTPLEAYGGNPAKWQEILERVRKFKGDAAREKYRRFVEPMEEGFAERHLAETRLISAKSADYLGMLYGGAVAEHRRRVFVSTGGLTAHLRREWHLDGILGFKDTKNRADHRHHAIDAVVIGLTDTRTVQMLQRAAEEASAKGRRMFAPMEMPWPTFLEDVRAGVEAINVSYRQSRRARGALHADSNYSRAIRNGTEVERRIRKPLAKLSEAEVERIIDRRCREAVAKRLTELKLPPAKAFADEANRPELVDKAGRRTRIRAVRIAVRAVPAAIGHGASVRYVGPTQGSNHHTVLTRGADGRWHDQPVSLLDLGRDRQLAKAPKRPAGGGEYTLAAGEYVLYTQDGEQRLCRVLSLTDGEVELVEHCDGRLAADRRKEGARIRVTGGGIGEGRMQKVTVSYLGEIRRAGG

SEQ ID NO: 17174 - protein, 1176 aa, unidentified
  REGION 1..1176: note = Cas Enzyme sequence
MKDLPPLVGKDAPLRKLSQTFPKKIDESLALGLDLGVGSCGQALVYDSVESKSHCKIKGLPEFPGRIAFLGVRAFDVPQINGKTGVALKNPERRSKRLLRRTTRRRAWRMWEVRKLFKKHGLLPADYPVDRKLWKAHVERNQNAEVDKWRDWHSRTTAGRPGLGTAGPLELRVKALDEKLTPLEWASALLHLTKHRGFRSNRKSLSGEGEDEGGKVLKALSTNQKRMVQGAYRTVGEMLLKDPDFAERKRNREGSYTATLLRSEQENEIRRLFARQRDLRNDHAGKELEEAYIDLFNRQKPLQNSINLLGVCPFEKTEKRASRYSPSFELSRALQKLNTLSLILPTGVKVRLADLVDAPNGGYDKFIRVFATFGNDSNPGRITWKDLRKIFPIPAGASFVDLPTASRKRNKDGTDEVTTVASLEAEDFVTRSGSNAAAKGSFLLHKVVGSVMWEEFSKDRPEQLDLAVYALTFFEEIENTEKSHFYWGILNQMRSDQLDERLIQMVDADLRSDKSLLARFNGTSSMSAQACRKLIPHLRLGMVYSEACSEVYGDHRQTDFRFDAITNPIVKSVVQECVKQVVHVIDEVGSLPGRICVEIGRDLGKSIMERNEITKGIKTRTDAKNSNRESLRSELGRDPDDDQLLRYELWREQAAICPYCGNHLGKPIDVVGNEFEVDHILPRSRSFDNSYENKVIVHKRCNQNKRNATPFEFASIGNGSAESEGWRKFTAVVANLKGVRKQKRRNLLNTTFAEDEVKFASRHLNDSRSIARLVTFYLHSFYEWAGEKPITEKGSSKRVFVQPGPLTAIVRKAWGLENLKKDVQGNRLGDKHHAVDALVCALLSEGQRRFVTVREQEKQTARLDAGFLGEVGRCYRLMEDENDHRQTPRDLPLPWSDFRNSVVEALDLFTVSRRENCKGRGGLHNDTIYRVENENGKEVTFSRRPILDTNAGKPKSLFTKLSDLDKIKDIHSLENRWLKAELTRWIESGSPVEPENLPRDPQGTLIRKVTVALGSKSGRKYPQGFVSGGNQVRVDIFSKTNRRDGLIYYIVPVYSHHLIQDAAPSKAITRGKDEAHWDEVDASFHFEFSLWPNSRFRVVKPRNATKPEGEDIVGLYSGVDRNTMAISFADPEDSRVSDRVSVKTGTEKFQKLYVDRLGRETVVKSEKRTWRGKTVE

SEQ ID NO: 17175 - protein, 1159 aa, unidentified
  REGION 1..1159: note = Cas Enzyme sequence
MNSTLYLVGSDAPLTKLSKTFPLTINENLSLGLDIGVGSCGQALIKWDRTDSSPVGKLAEFPNLDSTAATNFSGPIAFLGVRAFDVPERYEKTGIKLKNPERRQARLMRRTIQRRAKRMHKIRMLLKQHGIVPSDYSLENEAWQKKHVSATPLQWRVNALDRLLDPWEFAAVLLHLAKHRGFKSNRKSDLVSDSKGKEGGTLESTRANHERLKNYRSVGEMWLNDPLFQDRKRNREGSYTATMLREDLQKEIKLIFSKQRELGMADATPNLETAFIKIFSQQNPLQDPIMLLGDCPFEPNEKRGAQRAYSFELSRALQKLNTIHLRSPTGLKVLLSVHVQAANGGYAHFITQFGSKKSISWSDLRKIFELDEAIQFLDLPSAKRKNTKIQDSATTLIRPEQIRQELEKEDFATRSGKNSTAFGSHILFKALGSDLWNELTTTDPASLDNVAFCLTFYEALESHPPQTGIYEAMIARGVDQRVIDLLQMHVNEGTFTIKDFTGSVALSTKASRVMVPRLARGLFYTDAAKEAGYEPLEQDFSLAKIVNPVVQSVVREVIKQVAHLIDEAGSLPGTICIEMARDIGKSIDERNEISKALEKRTTQKNANRESFASYLSPGHRITDDDLERYELWLDQGGWCSYSDQKLPSPEEILSDQVEVDHILPRSRSHDNSYDNKVLVYKNANQNKRQKTPFEWMGSDENSEAWRQFVARVNNFRIRKRKRQYLLNTDFAEKEAEFIARNLQDTRYICRLVRAYLEDFYRLAGEQPGKPNSTRRVFVQPGGLTSLVRKAWGLEDLKKDILGNRLGDKHHAVDALVCAGLSEGQRQWLTRHEQGRVTKEKIAYNAVDQLGKSYILMEQEGRSNRTPRGLSTPWGTAAVFRSDVVRALDTMTVSRRERRHGRGSWHNDTFYREVLKPNGQKTYYKRTSLVNLVNNKPQANAFNLDDVKDIHLHTNAWLKEALLIWFQRGKPVDEDQLPRGHKPKENGDLADLNSPVIRKVWVDQGNKSARKTDHGMVVGGHQVRVDVFAKTTKKGATKYFLVPVYAHDIRYGEPPMLAIIAHKPEATWDIIDNTYEFRFSLWPNSLIFSQRKGIIDIGYYSGVDRSTGSLSFSSLNDKVVGDRTSVKQGCLAFKKYTIDRLGRVSEIKSEKRTWRGGVCI

SEQ ID NO: 17176 - protein, 1116 aa, unidentified
  REGION 1..1116: note = Cas Enzyme sequence
MEAANLSKLIVGKGRPITRLPKTFPLQVDEGLTLGIDIGIGSCGLALIHQSSAEKPHIRGFESMPDRISFLGVRTFDVPETKEKTGPKLKNPERRKSRLLRRSVARRAQRMRAIRTLLKAQGILPADYSVDSAAWKELHEQATPWEWRVMGLETLLDSWQFAAVLIHFAKHRGFRSNRKSDLASKGESGGTLESSKANHDALEHYRSLGEMFLKDPRFAERKRNREGSYSSMILRDDLIQEINQIFEKQRAFGSPHASEMFQADYIKTLQTQRPLQNPIALLEDCPFETSHPRGTQHSPSFELSRALQRLNTLTLRHPNGREESFVSFVKGQSTAYASFIQQFGTVKKVSWKHLRQIFQIPADVTFTNLSVSAKPTSRKKPGAAETPPKSIAALESEDFVNRGARGCAESTFLFKTLLADHWESVIKDGFELLDEAAFALTFYEVLEDDDSNETILGQIQEKCQKQPALVQAIINDLKESDKPTLHNFKGSVAVSMRVSRRIIPYLAEGHTYDKAMEAAGYQHTDTSVSLKSITNPIVQSVVRETIKQVMHLIHETGRIPGKINVELARDLGKSMDERNEISRGLDKRTTERNANRERAAEILNVTAVKVSEEELLKYELRQEQGGLCAYSGAVITDQELFTAALQIDHILPRSRSHDNSYDNKVIVFTASNQDKGNLSPYEWLGEGSQRWLDHITRISTMRGIRGRKRRNLLDTNFAQRGDEFLARNLNDTRYIGRLVTTFLQDIYTMVGEKTPTEKGSNRRIYVRPGALTAMIRKAWGLEDLKKDVDGNRIGDKHHAVDALICACIGEGQSQFVTALSKAWGDMERLHQHGLVPRQLPIPWQGFRHSVVSALNLVNVSRREDCGGKGSVHDDTVYGRDENGTAWKRTSLIATDGKKKSTFLKNLSQLEEIRGAREIDIRNPWLRPTLTQWIEAGSPVDQPPLDPQGKIVSKVFRETSGNSLRKIPRGWVSNGNMIRCDVFSKNGKYALIPVYSHQLSSAEPPLKFISANKPESEWKTIDETYQFEFSLWKNSRFQVDEKPKKGAEKGMKVVGCYAGIDRATGALTYNQVDDHGADSCRVSPSTSLKFQKLQIDRLGRIFLVPKEKRTWRGKVFI

SEQ ID NO: 17177 - protein, 1121 aa, unidentified
  REGION 1..1121: note = Cas Enzyme sequence
MKPLYLVGQDAPLSKLPKSFPQTIDESLSLGIDIGIGSCGTALVHEKLDGKPVIRGFESMPENIVFMGVRTFDVPETKEQTGPKLKNPERRQKRLLRRVTQRRAKRMRQVRYLFQKQGLLPKDYHPLADDWKLRHEAALPWQWRVEALERALTPWEWASVLMYFAKHRGFRSNRKSDLESKGKTGGTLESAKANHEALEHYRTLGEMFVSDPRFAERKRNRDGVYTSMIQRADLIKEIELIFDSQTKHGNAHSTPVLKNAYLEILEFQNPLQDPVSLLDNCPFEPAEKRGCRLSPSFELSRALQKLNAITLTFPGNKRVRLSDFANAKEGGYATFLAFFGSKKAISWKDLRNLFSIPDDATFDDLSVRRKTSKKSTSRGSVAKATESDEISIADQEKQDFVTSSNSKSCAEGTALLRKALGPQLWNQCTNHFQELLDHAAFCLSFYELVEDPTTDCTILGQISLHCAACPDLIAAIREDLTSEKPTLHRFSGSCSLSTLASRKILPHLMNGLVYSDAVIAIYGDHRQSDYQISKITNPIVASVVRETVKQIVHLIDETGVLPGRINLELARDLGKSIDERNEIAAGIKKRTDAKNSTRAFVAELLGCDADRVSAEELLRYELYYEQGGICPYSGESLPEPARIFTAELQIDHVLPRSRSHDNGYDNKVLVYTHANQNKGSLTPFEWLGGPDSQSWSEFCTRIAGMKSLRRRKRVSLLDATFATREAEFAERNLNDTRYIGRLVLAYLEDIYRIAGEEPGAKGSTRRVFVRPGALTSMVRKAWNLEDLKKDRDGRRLGDKHHAVDALICACLGEWSAQWITRIGKAWRDMEKRHDSHLALRGLTPPWKTFREDVVKALDSFSVSRRERCHGRGALHADTIYRWEENEKGNGVAWQRVSLVNIENGKKKPRFSSNEQLENIKGIQHPKNQWLRTALETWIANGSPVDAIPVDPQGCQIRKVFVRSAKASLRKIPQGYVTNGDLVRCDVFSKAGKYYLVPVYAYHLAYAEPPMRAVLKNYEESAWDLIDGSYAFEFSLWKNSRFRVEKKAKRGADSPEFIEGNYLSIDRNTARISYADPEDSQTQDRASVKQGCTSFIKYHVDRLGRMHQVKREVRTWRGGVCT

SEQ ID NO: 17178 - protein, 1121 aa, unidentified
  REGION 1..1121: note = Cas Enzyme sequence
MRHQLEYPPLVGVGHPLPKLPKTFPETICDDLTLGIDIGVGSCGLALVHRTGIGKPTFKGLPDFPGRISFLGVRTFDLPEVREQTGIKLKNPERRNKRMLRRAVARRAQRMRAVRSLLVSEGILPQDYSIRSAAWQQYHEKAKPLDWRVQGLDRELDPLEWAAALIHFAKHRGFRSSRKADIAAKGKEGGTLDATKRNHEALEKFRAVGEMLAKDERFAERKRNREGSYSSIVLRADLLNEISLLFERQRELGNSHATADFKERYIRSIQKQRPLQDPIKGLGKCPFTGEHRGARNAPSFELSRALQKLNSLTLRTSDGKEIPFPAFAIQCLGGYARFCESFGCAQRVTWKHLREVFQIPADLSFVGLSDSRPRKKKGTAGDLNGIPKTPAQLEAEDFVNRGSTGCAHATAIFRKILGAEWENVTRDGWEPLDEAAFALSFYEVVEDEDSDQTILSQIHNRCTAQPVLVEAITRDLLGDGKPALANFSGSVSVSSTVSRQIIPHLCAGMIYSEAMKSAGYNHTDSDISLSSITNPVVQSVIRETMKQIVHLIDETGKIPGTINIELARDLGKSIDERNEIDSGIRKRTTERNTNREEAARILDISSHEVTDEGLLRYELYKEQGGLCPYSGNTLPANKELFGADLQIEHILPRSRSHDNSYDNKVLVYTASNQNKGNRTPFEYFSSLAPERWEQFQTTIESMRGIRHRKRRNLLNTSFAEKEAEFLERNLNDTRYIGRVVTAFLQTLYTIAGEKRPADKGSLRRIYVRPGSLTSLVRRAWGLENLKKDLHGKRIGDKHHAVDALVCACVGEGQSQFVTALSKAWCAMEQMHEHSLVPKRLPLPWPDFRNTVVQSLDSINVSRREDRSGRGALHNDTVYGRDASDTIWKRTSLIATEGNKQTARFNRSEQVETIRGARITDIEKNPKNLWFRNALLEWIALGSPISSPPKNPSGKPILKVFVEERSSSLRRIPRGWVNNGDMIRCDVFSKKGKYALIPIYSHNLAQNTPPMRFIKANKPESEWTEVDETYSFEFSLWRNSRFRVTSKPKGSLGTGEVKEGNYVSLHRGTGKITYNLPDDHGADSQHVSPVTSLKFEKLYVDRLGRVFPIPREKRTWRGKVCT

SEQ ID NO: 17179 - protein, 1015 aa, unidentified
  REGION 1..1015: note = Cas Enzyme sequence
MRQVRYLFQKQGLLPKDYHPLADDWKLRHEAALPWQWRVEALERTLTPWEWASVLMYFAKHRGFRSNRKSDLESKGKTGGTLESAKANHEALEHYRTLGEMFVSDPRFAERKRNRDGVYTSMIQRADLIKEIEQLFDSQTKHGNAHSTPVLKNAYLEILEFQNPLQDPVSLLDNCPFEPAEKRGCRLSPSFELSRALQKLNAITLTFPGNKRVRLSDFANAKEGGYAPFLAFFGSKKAISWKDLRNLFSIPDDATFDDLSVRRKTSKKSTSRGSVAKATESDEISVADQEKQDFVTSSNSKSCAEGTALLRKALGPQLWNQCTNHFQELLDHAAFCLSFYELVEDPTTDCTILGQISLHCAACPDLIAAIREDLTSEKPTLHRFSGSCSLSTLASRKILPHLMNGLVYSDAVIAIYGDHRQSDYQISKITNPIVASVVRETVKQIVHLIDETGALPGRINLELARDLGKSIDERNEIAAGIKKRTEAKNSTRAFVAELLGCDTDRVSAEELLRYELYYEQGGICPYSGESLPEPARIFTAELQIDHVLPRSRSHDNGYDNKVLVYTHANQNKGSLTPFEWLGGPDSQSWSEFCTRIAGMKSLRRRKRVSLLDATFATREAEFAERNLNDTRYIGRLVLAYLEDIYRIAGEEPGAKGSTRRVFVRPGALTSMVRKAWNLEDLKKDRDGRRLGDKHHAVDALICACLGEWSAQWITRIGKAWRDMEKRHDSHLALRGLTPPWKTFREDVVKALDSFSVSRRERCHGRGALHADTIYRWEEDEKGNGVAWQRVSLVNIENGKKKPRFSSNEQLENIKGIQHPKNQWLRTALETWIANGSPVDAIPVDPQGCQIRKVFVRDNKASLRKIPQGYVTNGRMVRCDVFSKVGRYYLVPVYAYHLAYAEPPMRAIVAHKDESAWDLIDDSYAFEFSLWKNSRFRVEKKAKRGANSLEFVVGNYMFMDRNDARISYADPEDSQTQARASVKQGCTAFIKYHVDRLGRMHQIKREVRTWRGGVCT

SEQ ID NO: 17180 - protein, 1121 aa, unidentified
  REGION 1..1121: note = Cas Enzyme sequence
MKPLYLVGQDAPLSKLPKSFPKKIDESLSLGIDIGIGSCGTALVHEKLDGKPVIRGFESVPENIVFMGVRTFDVPETKEQTGPKLKNPERRQKRLLRRVTQRRAKRMRQVRYLFQKQSLLPKDYHPLADDWKLRHEAALPWQWRVEALERALTPWEWASVLMYFAKHRGFRSNRKSDLESKGKTGGTLESAKANHEALEHYRTLGEMFVSDSRFAERKRNRDGVYTSMIQRADLIKEIEQLFDSQTNYGNAHSTPVLKNAYLEILEFQNPLQDPVSLLDNCPFEPAEKRGCRLSPSFELSRALQKLNAITLTFPGNKRVRLSDFANAKEGGYAPFLAFFGSKKAITWKDLRNLFAIPDDATFDDLSVRRKTSKKSTSRGSAAKATESDEISVAEQEKQDFVTSSNSKSCAEGTALLRKALGPQLWNQCTNQFQELLDHAAFCLSFYELVEDPTTDCTILGQISHRCAACPDLVAAIREDLTSEKPTLHRFSGSCSLSTLASRKILPDLMNGLVYSDAVIAIYGDHRQSDYQISKITNPIVASVVRETVKQIVHLIDETGALPGRINLELARDLGKSIDERNEIAAGIKKRTEAKNSTRVFVAELLGCDADRVSAEELLRYELYYEQGGICPYSGESLPEPARIFSAELQIDHVLPRSRSHDNGYDNKVLVYTHVNQNKGSLTPFEWLGGPDSRSWSEFCTRIAGMKSLRRRKRVSLLDATFATREAEFAERNLNDTRYIGRLVLAYLEDIYRIAGEEPGVKGSTRRVFVRPGALTSMVRKAWGLEDLKKDRNGRRLGDKHHAVDALICACLGEGSAQWITRIGKAWRDMEKRHDSHLALRGLTPPWKTFREDVVKALDSFSVSRRERCHGRGALHADTIYRWEEDEKGNGVAWQKVSLVNMENGKKKARFTSNEQLENIKGIQHSKNQWLRTALETWIANGSPVDAIPIDPQGCQIRKVFVRDNKASLRKIPQGYVTNGRMVRCDVFSKVGRYYLVPVYAYHLAYAEPPMRAIVAHKDESAWDLIDDSYAFEFSLWKNSRFRVEKKAKRGANSLEFVVGNYMFMDRNDARISYADPEDSQTQDRASVKQGCTAFIKYHVDRLGRMHQIKREVRTWRGGVCT

SEQ ID NO: 17181 - protein, 1122 aa, unidentified
  REGION 1..1122: note = Cas Enzyme sequence
MKPLYLVGQDAPLSRLPKSFPQTIDESLSLGIDIGIGSCGTALVHDKLDGKPVIRGFESVPENIVFMGVRTFDVPEMKEKTGGPKLKNPERRQKRLLRRVTQRRAKRMRQVRYLFQKQGLLPKDYHPLADDWKLRHEAALPWQWRVEALERTLTPWEWASVLMYFAKHRGFRSNRKSDLESKGKTGGTLESAKANHEALEHYRTLGEMFVSDPRFAERKRNRDGVYTSMIQRADLIKEIEQLFDSQTKHGNAHSTPVLKNAYLEILEFQNPLQDPVSLLDNCPFEPAEKRGCRLSPSFELSRALQKLNAITLTFPGNKRVRLSDFANAKEGGYAPFLAFFGSKKAISWKDLRNLFSIPDDATFDDLSVRRKTSKKSTSRGSVAKATESDEISVADQEKQDFVTSSNSKSCAEGTALLRKALGPQLWNQCTNHFQELLDHAAFCLSFYELVEDPTTDCTILGQISLHCAACPDLIAAIREDLTSEKPTLHRFSGSCSLSTLASRKILPHLMNGLVYSDAVIAIYGDHRQSDYQISKITNPIVASVVRETVKQIVHLIDETGALPGRINLELARDLGKSIDERNEIAAGIKKRTEAKNSTRAFVAELLGCDTDRVSAEELLRYELYYEQGGICPYSGESLPEPARIFTAELQIDHVLPRSRSHDNGYDNKVLVYTHANQNKGSLTPFEWLGGPDSPSWSDFCTRIAGMKSLRRRKRTSLLDATFATREAEFAERNLNDTRYIGRLVLAYLEDIYRIAGEEPGAKGSTRRVFVRPGALTSMVRKAWNLEDLKKNRDGRRLGDKHHAVDALICACLGEGSAQWITRIGKAWRDMEKRHDSHLALRGLTPPWKTFREDVVKALDSFSVSRRERCHGRGALHADTIYRWEEDEKGNGVAWQRVSLVNIENGKKKPRFSSNEQLENIKGIQHPKNQWLRTALETWIANGSPVDAIPFDPQGCQIRKVFVRSAKASLRKIPQGYVTNGDLVRCDVFSKAGKYYLVPVYAYHLAYAEPPMRAIVADKEESAWDLIDDSYAFEFSLWKNSRFRVEKKAKKGAESAEFIEGNYLSIDRNTARISYADPEDSQTQDRASVKQGCTSFIKYHVDRLGRMHQVKREVRTWRGGVCT

SEQ ID NO: 17182 - protein, 1104 aa, unidentified
  REGION 1..1104: note = Cas Enzyme sequence
MPWGQKITPLLARAFHASLRLATLREERFGRSGLYRDKAETVAWIHAHHFNEDLAFVKHWRYCCPIMAGFSFLLALDLGVASIGWAIIRLDDRGSPLGIYRIGTHLFDSGNPADFERGKDEPPAKPRRDARQLRKMIWRRARRKRKLLQALQRANLLPPGDVSTPAAIDVYIKAIDEQLAATWNQNITHREHQLLPYRIRTAGLDRDLSRVEFGRALYHLAQRRGFLSNRKSKEKADEKSKVKAGISELAQDMVARGARTIGEYFASIDPETIRLRRRWTSRSMYKNEFDQLWKRQAPALQLSDERRKAIDDAIFFQRPLKPSDHLIGRCRHLPRFRRAPMACRLFQRFRILQKVNDLRLLDDLQNSVPITPEQRRLILDELERHETVTMTSLRKLIKAPKGLKFNFETEGEGGLPGNKTDVRLAKVVPGYANWAEDRKTALVDEVLGTLDDEPLRQRIGQAYKLDSATVTAIFEDAGLEDAYAGLSREAMRQLLTRMEAGENYMTVARDLFPEEFKAAKPLDRLPPLLKHNPDLRNPTVVRGLTEVRKLVNLIVKRYGKPERIHIELLRELKKSRDARAEISRENDARRKQREKAAAEIMKQTGVARASARDVEKWMLAEECHWTCPYTAKSISPHSLFTEPQFEIEHIWPYAQSLDDSFVNKTLCHLDANRAKARRMPCEAFSDEQLKDIVARVARFEGDIRDQKLRRFKATEIPEGFSNRQLTDSSYLARAASEFLGLLYGGVNDAGGVRRIHTRVGGLTAQLRRLWGLNQILSGTNDKTREDHRHHAIDAVVVGCADTRTVQDMMRVASEQIAWGRSRISELPLPWKSFFHDLGDAADKVIVSHRQSRKVGGALHGESNYSREKQINGKEEPARTIRKPVASLKETDFARIVDQRIRAAVEKAFKDSGAKSPDKAFAEEKFPVWTSKSGQTKLVKRVTIITDAKPFTVGRRERARHVDSTQGSNHHARIIAKLAPDGTEKSWRDEIVTRMQMYQRKADGKLGVDTSVGPNEKFKFSLAANEYVELDVPGPDGKPTNRRAIYRVANISKGHIMCVLHTDGRPREQRKKTGDDWSPGGAGLFKHHARKVFINYLGEVKDAGG

SEQ ID NO: 17183 - protein, 1045 aa, unidentified
  REGION 1..1045: note = Cas Enzyme sequence
VDIKENLVLGLDLGIASCGWAVIDVSACAIIAMGSRTWDAPETDKERTPTNQIRRTHRGMRRVLKRRRQRMNAVRRLFAQHGLIDSRAATSLRIGQLDPWELRSAGLDRRLTGPELAIALGHIAKHRGFKSNSKRERGANAEGDAGKMLSAIKETASKLQNHGVVGEIPEVRYRTVGELFFKDADFGARKRNRDGEFTRSVLRDDQAYEVAALFKAQRAAGNAQASAELEASFTEIAFFQRPLQDSDALVGDCPFEPGEKRAARHAPSFERFRMLSRLAAIRVTEGREERPLTADQIARVDGTFGDQKGIKWARLRKLIGLKEETAFVGVSGEDEKKLDFVGRASNAAEGTAALRGVITDALGEVTWLSLLKAPERLDAAAAIVTFREDLDSIGKGLVETGLDSAVVAALMAAVEDGRPFARFKGAAHISAKAARAMVPHLLDGKVYSEAAAAAGYDHARRPDIDIETITNPIARKAVREALKQVKAIVMEYGLPGAIHVELARDVGKSKEERDEIRSGIEKRNRMKDRLKEEFARVVGRASSGREDLLRFELWQEQKGRCLYSDREIHPDMIVAGDNTVQVDHILPWSRSGDDSFTNKTLCFAKANQDKRGRTPFEWLGDNPARWEAFRAAVESNTTMKGFKKRNYLLRDSDRLTEKFRPRNLNDTKYATRLTLDLLARAHYPESDRFTGVPRSADEARRTRRLFARPGALTDRLRRAWGLQGLKKDDKGNRIADDRHHALDALIVAAMSESTLQQLTRAAQIEEERGSSRFIATFPQPWPGFREQAEAAREKVLVSRSERRRARGEGHAQTIRRVEDTIDGPVVYERKSIDALKPADLERVKDPERNAALIASLKAWIDAGKPKDHRPLSPKGDPISKVRLATTKKVDVLIRDGVAERGEMVRVDVFRKPNKRGIFEYFLVPIYPHQVFDPQAWPAPPNRAIQGGKDEAEWPDVSDHEFLWSIYPMSFLEIEKSDGTFIDGYFRGADRSTGAIHLSVHNSREQVIRGIGVKTLRVFAKKSIDRLGRRTDIASETRTWRGAACT

SEQ ID NO: 17184 - protein, 1053 aa, unidentified
  REGION 1..1053: note = Cas Enzyme sequence
MDIHENRTLGIDLGIASCGWAVIEQDEEGGGRIVAMGSRTWDAPETDKERTPTNQLRRSHRGMRRVLKRRRQRMSEIRRLFRGHGLIEVQGPTGLRIAQLDPWSLRAEGLERKLTGPELAIALGHIAKHRGFKSNRKGERGANARDDSSKMLKAINETRDRLAQYRTVGEMFARDDVYTDRKRNRDGQFTHSVLRDDQAREVTVLFDIQRRIGNPLASAELEAAFTEAAFFQRPLQDSEHLLGQCPFEPAEKRCAKRAPSFERFRLLSRLRALTLSEGREERPLTPDQIAKAEGDFGLQKSFTFKRLRDRLGLPEETSFGGVARADEGRDFVGRASNAAEGTASLRGVIVDAAGEGAWRSLQNTPEKLDAMASVITFRDDIDSIRQGLTQIGLEPTVLTALMAAIEDGRPLKAFSGAAHISAKAARAMLPHLREGLTYDKAAAAAGYVHTDRAGPGSPEGTMHERMVHDIKWVDGNVSNPVARKAVIEALKQVHAIVGVHGLPGAIHVELAREVGKSKEERDEIKSGIDKRNAAKDRLRDQFRETCGHEPSGADDLLRFELWTEQAGRCLYSDRAIAPQQIVASDNSVQVDHILPWSRSGDDSFVNKTLCFTTANQNKRGRTPFEWFGADPARWEAYRGVIESNRAMKGRKKRNYLLKDSSVLTEKFRPRNLNDTKYATRLVLDLLARLYPESDRFTGVPRKPEEERRKRRLFSRPGPLTDRLRRAWGLQGLKKGEDGKRIADDRHHALDALIVAVTSEGRLNHLTRLVQERENAGLPRDFGFVDPPWPGFRDEAQSMLREVFVSRAERRRARGEGHAQTVRRIEDAPDAQVVYERKSVDALTEADLDRIKDPDRNAALIASLRQWIKDKKPKDRRPQSPKGDAIAKVRLRTTKKVDVLVRDGAAERGEMVRVDVFRKKNKRDAWEYYLVPVYPHQVFDPEDWPSPPNAAVQAYKPEADWPHMNDGHEFIWSISPFSFIEVEKPDGTFIDGYFRGADRTTGAISLSPHYTRDESVRGIGVKTLRSMKKINIDRLGNRTEILREKRTWRGAVCT

SEQ ID NO: 17185 - protein, 1011 aa, unidentified
  REGION 1..1011: note = Cas Enzyme sequence
MEIRETWRLGLDLGIGSCGWAIVEETGAVSGRIVALGVRMFDVPETGKERTPTSQLRRQHRGMRRVLRRRRQRMNELRQLFREHGLIPDESRDALKSPGLDPWVLRAAALERQLAGPELAIALGHIARHRGFKSNSKRDRGANAPKDSSDMLKAIEATRERLKSYRSVGEMFAKDPEYALRKRNRDGDYTRSILRDDQEREARLIFDSQRRKGNAAATEELERRFIELAFFQRPLADSEDKVGDCPFELGEKRAARRSYSFELFRYLSRLAALRIRSGRIDRPLTAEELTAASDDFGALRGMTFKRLRKLLDLNDGDRFNGVPFEEEGKRDVTARAGDTAPGTYALRNVLGPSFQTLLSAPEKLDRIAFVLSFREDTASIKLGLESIGLEPLILSALMKGVEDGEFAAFSRAGHLSAKACRNIIPHLKRGLVYSDACKAAGYDHARREETNLDAINKPVARKALTECLKQVRAIVREYGLPGRIHVELARDVGRSKAERDEISRGIERRNKEKDKHRAEFKEVVGVDPAGSEDLMRFELWKEQNGRCLYTDQPIHPNAIVATDNSVQVDHILPWSRSGDDSFVNKTLCLASANQKKRGMTPFEWIGRDEKRWDAYVARVESLKTMKGRKKRNYLLKDTAVLEEKFRPRNLGDTRYATRLLADALKRLYPDDGTRRVFARPGPLTDRLRRGWGIQSLKKDAEGNRVDDDRHHALDALIVAATSESALQRLTAAFRESEQSGGHRDFARLDPPWPGFVAEAREKLAQVFVSRAERRRARGEAHAATIRQIAERDGQQIVYERKSVDALTDKDLERIKDPERNAKLIASLREWIAEGKPKDRRPLSPKGDPIAKVRLRTNKKPDVPIRDGAADRGEMVRVDVFRDTGALHFVPVYPHHLASKAAPDIAIISGREQRISPTAIFVLSIYQRSYLRIFEIDGSITEGYFRNFDRDSSRVTVTPHFTSEMVFRERVSASRIVTIEKIALERTGPVMRDGRCITITKETRTWRGAACT

SEQ ID NO: 17186 - protein, 956 aa, unidentified
  REGION 1..956: note = Cas Enzyme sequence
MRRRRQRMAQLRVLFQENGLLTDAKRDALRFPGLDPWQLRVAALDRSLAPEELAVTLGHIARHRGFRSNKKNQGNEAGDDGRVLKAAAANQEILSRYRSVAEMFDKDDRFARRKRNRDGEYTQSVNRIDLEHEARLIFSRQRALGSAHADAHFQEKFAELAFNQNPLTDSEDKVGFCSFETKDRRAAKRAYSFEVFRFLSRLNALRIGDSRQERALTEAELAAAMEGFGSQRGMTFARLRKLISLPDSDAFRDVPRDEEGGRDVVNRSAGNGCMQGSATLRAALGEHNWKTLLQRPEKLDEIAFIITFRATPESIEKGLFEAGLDSDMLHAIMAAVEKGSFAAFTGAGHISAKACRAIIPGLQRGLVYSDACAAAGYDHAARPVTEIASINNPVARRALGEALKQVKAIIAAHGKPDRIHIEMARDVGKSKEERDKITSGIEKRNKERDKLRASFAETVGAEPSGAEDMLRFELWTEQKGRCIYTDQAISPGAIRAKDNSVQVDHILPWSRFGDDSFINKTLCFAKANQEKKGRTPFEWLKDDPKRWAELVAAVEGNKGMKGRKKRNYLLRDAQAVEERFRSRNLNDTRYACRILMEHLARLYPDDKNRYVFARPGALTDRLRRGWGLQDLKKEVLEPIGEKRKHDDRHHALDAIIVAATSESALQLLTRAFKESEDRGSHRDFADFPPPWPGFIEDVRRHFREILVSRAERGRARGAAHKAGISQLKQTDDGPVIYERKAVDELTLKDLDRVKDPDRNAALIVAVRAWIGVGKPKNAPPLSPKGDPIRKIRLITTDKPAVAVRGGNAERGEMVRVDVFRKANKRGVFEYFLVPIYPHQVADQKEWPAPPNRAARAATAEESWPDMTAEHEFIFSIGPRTFLEVEKRDGTFIDGYFMSMDRSTASITISVHHSTKNIKKSIGVLSLKRFEKFRIDRLGNRHAVPRETRTWHGVVCT

SEQ ID NO: 17187 - protein, 1050 aa, unidentified
  REGION 1..1050: note = Cas Enzyme sequence
VENHFTVASLPTPIFKVTKSVTFCQSFSSGMDWGETVKSLGIDLGIASCGWALIETDVEQGRIIACGARTFDAPETDKERTPTNQLRRQFRGMRRVMRRRRQRMAQLRILFQENGLLTDAKRDALRFPGLDPWQLRVAALDRRLTPEELAVTLGHIARHRGFRSNKKNQGNEAGDDGRVLKAAAANQEILSKYRSVAEMFDKDDRFARRKRNRDGEYTQSVNRIDLEHEARLIFSRQRALGSAHADAHLQEKFAELAFNQNPLADSEDKVGFCSFETKDRRAAKRAYSFEVFRFLSRLNALRIGDARQERALTEAELAAAMEGFGSQRGMTFARLRKLIGLPDSDAFRDVPRDEEGSRDVVNRSAGNGCMQGSATLRAALGEHNWKTLLQRPEKLDEIAFIITFRAIPESIEKGLFDAGLDSDMLHAIMAAVEKGSFAAFTGAGHVSAKACRAIIPGLQRGLVYSEACAAAGYDHAARPATEIASINNPVARRALGEALKQVKAIIAVHGKPDRIHIEMARDVGKSKEERDKITSGIEKRNKERDKLRASFAETVGAEPSGAEDMLRFELWTEQKGRCIYTDQAIPPSAIRAKDNSVQVDHILPWSRFGDDSFINKTLCFAKANQEKKGRTPFEWLKDDPKRWAELVAAVEGNKGMKGRKKRNYLLRDAQAVEERFRTRNLNDTRYACRILMEHLARFYPDDKRYVLSRPGALTDRLRRGWGLQDLKRVLEPDGEKRKHDDRHHALDAIIVAATSESALQLLTRAFKESEDRGSHRDFADFPPPWPGFIEDVRRHFREILVSRAERGRARGEAHAATISQLKQTDDGPVIYERKAVDKLTLKDLERVKDPDRNAALIAALRAWIEASKPKNTPPLSPKGDPIRKIRLITTDKPAVPVRGGNAERGDMVRVDVFRKTNKRGVFEYFLMPIYPHQVADRNAWPAPPSKAVRSDVRDEADWREITDEFEFLFSLQQRSYVEVETAKGETISGYYLGADRDRASIKVSPTHSTLEFERPRVLTLRRFEKYRVDRLGKLSLVTRETRTWHGVVCT

SEQ ID NO: 17188 - protein, 915 aa, unidentified
  REGION 1..915: note = Cas Enzyme sequence
RGFKSNSKRDRGANAPKDTKGMLGALEATKAKLANFETVGEMLARDPEFALRKRNRDGDYSRSVERDALAREVALLFDRQRRFKNAAATGDLEKAYVAIAFHQRGLADSEDRVGFCRFFPDERRAAKRAYSFELFRHMSRLANLRLRTGRAERTLTADEIRLASADFGANHGLKFAKLRKRLKLDDAERFEGVPLDEEGKREVVSRNGDSASGTYALRQALGAAWNGLLGAPDKLDRIAFVLSFRESDDTIRAGLAEIGLEPTLLEALMAALARGDFSDFTGAADLSAKACRLLLPHLAQGLDFTKACAAASLNDPDSRAGSLAELVATGDIGKALSEFRIQARKAIDEIGNPVARKALSESAKQFVALAREYGLPGKIHVELARDVGKSKEERDEIKTGIDKRNAEKDRLRLRFEEQLGRKPRNAGDFQRFELWTEQQGFCLYTGDPIPVGLLASDDNSIQVDHILPWSRSGDDSFVNKTLCFAKANQEKKGRTPWEWHAAAKTPDQWDAFAARVETLRPMKGRKKRNYLLKDASVLETKFRDRNLGDTRFATRAFADILRALYPKKDAARSVFARPGALTDRLRRGWGVQGLKKDENGERIPDDRHHAIDALIVAATSEAMLQALTKAFQAAEALGSPRDFGRIDPPWPDFLAQANAAYDRVFVARAERRRARGEGHAQTIKGVAATPDGPVVYERKAVEKLVAKDLERIPDPERNAALVEALRAWIDDGKKKGTKPLSPKGDPINKVRLSTTDKVAVEVRGGTADRGDMVRVDIFAKPNKRGKDEFYAVPIYPHQVMDPTDWPEPPNRAVQAGMEEDKWPDMGTAYRFCFSLHALSLMQVVKPDGEVIEGYMRSLSRSTSAFSISPHTTKTVVRAGVGARTLLSLRKFQVDRLGRRFEIKSEQRTWHGEACK

SEQ ID NO: 17189 - protein, 1039 aa, unidentified
  REGION 1..1039: note = Cas Enzyme sequence
MIQDELRLGLDLGIGSCGWAVIRQWKDEREGEIVAMGSRTFDVPETAKERTPTNQLRRTARGMRRVLKRRRHRMAEVRRLFAEAGLIESVGSNALKLAGLDPWDLRAEGLERALTGPELAVALGHIAKHRGFKSNSKRDRGANAADESSKMLAAIGVTRERMARYRSVGEMFARDAAYAGRKRNRDGNFDRSVLRDDQAAEVRALFAAQRRFGSAVATSDLERAFAEMAFFQRPLRDSDDLVGPCPFEPGEKRAARRAPSFERFRLLSRLAALRVGTGRDERSLTADQMGRAEADFGHHKKFSYTNLRKVLGLDAGLRFVGVAPADEKNDFVARSGNAAEGTASLRDAIVDGAGELAWLSLLNAPETLDARAAILTFRDDLDSIRQGLAGLGLDEPVLAALARGVENGRFAVFKGAGHLSAVACRKIVPFLRERLVYSEACARAGYDHAARPKTDLAAVNNPVARKALIEALKQVKAIVAEFGLPGAIHVELARDVGKSKDERDEIKSGIEKRNKVKDRLRDEFLDTVGAAPAGPEDLMRFELWKEQGGRCVYTDRAIDPHSIVASDNAVQVDHILPWSRSGDDSFVNKTLCLASANQEKKGRTPFEWFGTDDRRWEHFVATVEGVKGMKGRKKRNYLLRDATVLVEKFKPRNLNDTRYACRLLLDALKDLYPKDDLKPDQHGELHRPVRVLARPGPLTDRLRRAWGVQALKKGPDGKRVADDRHHALDALIVAATTNSALIRLTKAFQDAEALGSHRDFSGFPPPWPGFVEAARAAFEQVFVSRAERRRARGEAHGATIRAVGEEDGKQVVYERKAVDKLTLKDLDLLKNPERNKEVIAELRRWIEAGKPASAPPVKRFGGKTEEAHCEPIRKVSLRTNKKPDVLVRDGAADRGEMTRVDVFKKKNKRGIDEYFLVPIYPHQIFDAEGWPGPPDKAVVQSRPESEWSVITGEHEFCWSFYPLCFVLVELPDRGIEGYFRGLDRSTGAIHLSRQTSNDDLVRSIGVKTAKSVRKFAIDRLGRRFEIRQETRTWRGAACT

SEQ ID NO: 17190 - protein, 1020 aa, unidentified
  REGION 1..1020: note = Cas Enzyme sequence
MTASFEPVLREGLTLGIDLGIASCGWAMIENVDSGDGRIVAMGVRCFDAPETAKERTPTNQIRRQNRLIRRVLKRRRQRMNGVRALFKVHGLLIDDSKKALAVGLNPWTLRAEALDRSLNGQELAVALGHIAKHRGFKSNSKRDRGKNSDKESSKMLGAIEKTREHLNEWRTVGEMFAKDATYAVRKRNRDGNFDRSVLRDDLEREVALIFDRQRRMGNAIANPDLQRQFIETAFFQRPLQDSDDRVGFCPFEPDERRAAKHSPSFERFRLASRLCTLSVRSEGSERTLTAEEISLAMADFGAPGVKLTYKRLRTLLKLDDGNSFDLPREEEDKREIASRSRDQAAGTEAFRNVLGNAWKTLVDQPDKIDRAAAIIAFREAPESIEAGLNEIGFEPLLLELLMKGVVEGDFADFKGAGHISSKAARKILPHLMRGLVYSDACKAVGYDHTRRPETDLSTINNPVARKALSEALKQVRAIVREYGLPGAMHIELARDVGKSKEERDKITSGIERRNKAKDRLREEYRDAVGREATNAEDLLRFELWKEQAGRCFYSDSEIHPDWIISSDNRVQVDHILPWSRSGDDSFVNKTLCLAKENQDKRGMTPFEWFKQAKSEKAWEEFVARVEANRAFKGRKKRNYLLRDARALEEKFRPRNLADTQYATRLLADLLKRIYPEDGSRRVFTRPGALTDRLRRAWGIHGLKKDKDGKRIPDDRHHALDALIVAATTEGALSRLTCAAQIEEERGSSRFIANFPMPWSNFKEELDALFPRIFVSRAERGRVRGEAHAATIRAIGQGEDGRVVYERKPVDSLNEKDLDRIKDAERNHRVVSALRDWIAAGKPKDKPPLSPKGDSIRKVSLATNKKVDVLVRDGAADRGEMVRVDVFRKKNKRGDYEYFLVPIYPHQVASKEDHPQAPNSYVRGGGEEEPLTVDHEFVFSLSQLSFLEIEKQDGTFIAGYFRALNRNTGAINISPHDTLQMMITSIGARGLKFFRKYQVDRLGRRHEIQRETRTWRGVAC

SEQ ID NO: 17191 - protein, 1014 aa, unidentified
  REGION 1..1014: note = Cas Enzyme sequence
VLGLDVGIASCGWALIDLQDDDGDATPVGKIVRLGAWMFDAPETDKERTPTNQLRRTARAQRRVIRRRRQRMNAIRRLFVERQLLVSSGQNALKYPGLNPWQLRVEALDRLLQPEELAVALGHIAKHRGFKSNRKSDGANAADDSSKMLKAIEATREKSAAYRTIAEVLTNDPSFEGRYRNRSGDYSRSILRQDLEAETRAIFQAQRRMGNVSADQAFEQTFSNIAFFQRPLQDSETLLGPCPFATDQRRSSKRAPSFEMFRFLSRLINLRVSVGRKERPLTADELVAAIADFGKTAKITFKTLREAIALAPHERFVGISKEDEKRDVTSRVGESAFGTSKLRSILGTAGWSSMIKMPEKLDRIADIITFRDAPERIEAGLLELGLDDLIVKALMQAVHAGSFAKFTGTGHISATAARNIIPHLKQGLVYSDACERAGYQHSAGQKIDVADIGSPVARKALSEAIKQVKALIHEYGVPDAIHVELARDVGRSAEEREEIRSGIEKRNKEKDRLREQYVADIGQDPRTAEDLLRYELWKQQNCRCIYTDALIDPSHVAATSNLAQVDHILPWSRFGDDSFHNKVLVTTKANQEKKGRTPFEWFSDQQDDHAWDAFVARVEASKAFRGMKKRNLLLKNAEEVQDRFRARNLNDTRYTARALAALLVQKYPPEPGKRRVFARPGSITSKLRQAWGVQSLKKDGNGNRRSDDRHHALDALVCAATTEGALQRLTRAFQESERRGSGRELIEMPQPWKGFRDQAVAAFEEIFVARAERRRARGKAHDATIKQIVTDTNGTLIYERKSVDKLTLKDLDNIKDLERNAATAASLRDWINAGKPKDAMPRSPKGDIIRKVRLRNRAKDGLEIRGGIVDRGEMVRVDVFSRNNAKGVRQFFLVPVYPHQIAMDVKPPVKFVEPGKSEEQWQSVNDTFDFLFSVYPMSLIEIIKSDGEVLRGYFRGMDRSTGAVSLSLHQSKEALLRNIGARTLLQFNKLTADRLGIVSSIRGEVRTWRGAAST

SEQ ID NO: 17192 - protein, 1025 aa, unidentified
  REGION 1..1025: note = Cas Enzyme sequence
MADSVERILGIDLGIASCGWAVIEVAGDSGKIIAAGVRCWEAPEAPKTREPKNQERRRIRGQRRVIRRRRQRMNSLRQLFADSGLLPTALPEALKVQGLDPWRARAEGLDRLLTPPELAIALGHIARHRGFRSNSKRDRGANAQSETSKMLSAIEANRETLSKYRTVGEMFFRDPAFQRRKRNRGDYSRSILRLDLEDEVRRLFKRQRELGNNLATEELESAYSSVAFFQRPLADSWDRVGSCPFEPGEKRASKHSYSFELFRFLSRLNTLRVGSGRNYRALTEDEIRAAAADFANTKGMTFARLRKVTAISENCFQGIALEDEKKRDVVARSGSCAVGTFTLKECLGHGVWSSLRCRPEVLDRIADTVSFFESPENIQSELEKLGLEPCVIETIQKGIAEGVFSKFSGAGHISARAARQIIPHLMRGLTYDKACAEAGYTHTDRVETEITNPVARRALLEGEKQVRAVVREFGIPDRIHIELGRDIGKSAEERAEIERGIEKRNKEKDKVRDIEFPEVMGRPPHNGEELLRFELWKEQGGRCLYTDDSISPTQIAAGDNSVQVDHILPWSRFGDDSFMNRTLCTARANQQKRGRTPFEWFKADKTEAEWEAFRARVETCKHLRGLKKRNYLLQNAEEVEERFRTRNLNDTRYAARALMARLEKSYPSEAGRRRIFARPGALTHKLRRAWGIDDLKKDPDTRKRIDDDRHHALDAIALAATTEGAVNRLTHAFREAERKGLAREFGEFEPPWLTFAEDARKAHGEVFVSRAEIRRARGKAHDATIKQIRNENGGVLVYERKPIDELTLADLDRIPVPKPHGKVADPGKLRDDMVRSLRDWIEKGKPKDDPPRSPRRDIIRKVRVATKDKVRVEIRGGTADRGDMVRVDVFTKPNKKGVGQFFLVPIYPHEVATLEKPPSRAVRRGAEEGEWPIMDHTYEFLWSIYPMSLLELTKSDGTIIKRYFKGLDRSTGAINLSEVTSSQRLARHSIGPRTLKQFRKLTVDRLGRVTEVSREVRTWRGEVCT

SEQ ID NO: 17193 - protein, 1030 aa, unidentified
  REGION 1..1030: note = Cas Enzyme sequence
MSEMLRVSEDLVLGIDLGIASCGWALIRDPDRAGEIVAMGVRTFDVPETAKERKPLNAIRRESRLLRRVLRRRRQRMNKIRELFEAHGLLPHARNDALALGLDPWRLRTEGLDRPLLGAEFAAALGHIAKHRGFKSNSKRDAGDNAPAKTKSETIKAKGGALANRDYLRAHAKYRTIGEMFAKDERFSARKRNKDKDYKQTMLRDLQQQEVTILFARQRQMGSSLAGAELEEQFIATAFFQRPLQDAESRVGFCPFEPGERRAAKHSPAFERFRAAQRLAHMPLRESGFERRLTPDEIARVLADFGKPGTSLTYRHVRNVLALPGSIGLDAPKGDEKLNIATRSGDATPGTKALRNVLGDAWATLADKPEATDAAAACIAFRETPESIREGLAALDLHALVLERLMKGVEEGDFAEFSGAGHISAKAARRITEHLLRGLTYDEACAAAGYTHSDRPDVVLDDLANPVARRCVGEALKQFRAIAREWGLPGAVHIEFARDIGKSPEERRKIEDGIEARNVAKDKLRECFLEQTGRARATAEDLLRFELWREQGGKCVYTGDDIHIDQVASGDPRAEVDHILPWSRSGDDSFVNKTLCTDRANREKRGRTPFEWLDADPARWAEFVARVETNKAFKGRKKRNYTLRDASVLETKFRARNLNDTRYAIRVFAGLLEQIYQPDQDKRRRRQGERRIFARPGGLTDRLRRAWGLQVLKKDDGGKRVADDRHHAIDAFIVAATTESALNRLTQAAQREEQLGSHRFIADFPPPWEGFRDEAMRHYERIFVSRAERGRMRGKGHDATIRALGERDGETVVFERKSVEDLTEKDLDRLKDRERNHKLVDALRAWIVAGKPKDQMPRSPKGDPIAKVKLLGTTKLAVLIRGGTADRGEMVRVDVFRKEHKSGTWQFFLVPIYPHQVADRERWPEPPDRYVSSGGKEAPLTPEHEFIFSISQRSFLKIEKEDGTFMDGYFKGLDRNTGAISLSPHTSLQIVVKSIGVRTLKRFAKFRIDRLGNRFEVEREARTWRGKVCT

SEQ ID NO: 17194 - protein, 1047 aa, unidentified
  REGION 1..1047: note = Cas Enzyme sequence
VRTFGIDLGIGSCGWAVIDHPANAGETGSIVGIGSWVFDVPETDKERTPTNQIRRSNRLLRRVIRRRRNRMAELRRLFADNKLIADADRSVLSQKEYDPWELRARGLDKALEPQALAVALAHIAKRRGFKSAKKRKDGNNNADDGKVLSEIKKTEERLARYRTFGEMIARDPLYSARRRNREGLYDRTAQRSDLEHEVGALFAAQRRLGAAKASEQFEAAYRAIAFRQKPMQDSERLVGACPFEPREKRAAKFSPSFERFRLLQRLVHLRIVNGDAERALSLDEVERLTYDLGKTAKLTVKAVRVALGLGDYESFKGIKPDQENQDIAARSGEALHGTKKLRDALGEIHWAELSARPEVLDEIAHVISFHETNETINGKLAALALPVAALEALAIALEGRAFARFTGAGHVSAKAARAMLPHLAQGLRYDQACAAAGYNHTATGLTGREQVTDKAKFNELVRSVGEAVANPIARKAMTEGLKQLWAMRNRYGLPDAIHIELARDVGNSIEERRRIEKRINDTTAQRDRERREAAELLGVDHVDGDTLVRYRLWKEQKGRCVYTDRAIPVSALLTTDNSVQIDHILPWSRFGDDSYHNKTLCFTAANQNKRRDTPHEWLARTGGWDDFVARVEGNNELRGFKKRNYLLKNSPEAEEHFRSRNLNDTRYAARLLAEAVKLFYPEGERQDRCGVRRVFTRPGALTAALRQAWGVESLKKIDGKRVADDRHHALDALVVAAVGEAEVQRLTKSYQEWEQQGLGRSLRYVETPWPGFRQDVLLAYEKMFVARPERRRARGEGHAATVRQVKQRDGKTVVYERKQVEALTVADLERIKDPSRNAPLIAAVRDWIARGKPMNDLPRSPTGHEIRKVRLETKYNPAVPVRSGTADRGDIVRVDVFAKANKKGKDEFYVVPIYPHQVFDKLGVPYPPSRATVAYKDETEWTLIDNSYRFKFSLYPRCYVEVTKARGEILAGYFQGMDRSTGAISLFNHKDARALRDENGNSMRGIGAKTLLTIKKYSIDRFGDRGEVKGEVRTWRGEACTLPTPAS

SEQ ID NO: 17195 - protein, 1072 aa, unidentified; identical to SEQ ID NO: 15406
  REGION 1..1072: note = Cas Enzyme sequence

SEQ ID NO: 17196 - protein, 1076 aa, unidentified
  REGION 1..1076: note = Cas Enzyme sequence
MQIAENIVLGFDLGIASIGWAIIDEVEKVILDAGVWTFNAPETDKEKTPKNQIRQAMRSMRRTIKHRRQRMNDVRDFLFAQKLLPANSKSIAHEIAARFKTSPWELRAEALKRKLTDEELGLVLYHIARHRGFQSNRKGGENAEAGEDQKALKAMQGLGQSIASYSTFGQALTEDDELSIRKRNISGDYGRTPKRDWLRQELAIITERQNSFGASLPSHIIEEFIAKAFTQRPLQDVADRVANCPFEKDQKRSSKHAPSFEYFRFLQKLNHISLWMPGAPDRTLTPEEIQKVAKEFGSQVSYTYKSLRKTLDIDVNARFRGVAKEDESQDIATRKSGSAIGTRALRTALSGLYDTTDIAQLDDAMFAIAFHETTESVGRALSKIGLPQNVYDALMIAVGNNQFKDVKGAAHISAKACRNIIPGLLDGLVYSAACERENYDHTAPDASPLVNLKKELVGKTPSEIRKAFSALLSDKNQHLIGSPVAKKALIEAVKQFVAIVNNHNALGGKLPGKVHVEMARDVGKSADERRKIEQGIEKRNKTLDNVAKDFEQTFGRQPRRGSNDILTFELAQEQGWKCVYTGDAVNPQNLFDGISYQIDHILPWSRFGDDSYANKTLCSARANQAKKHRTPVEWAQSGENGAPNLDEYLARVEACKEMRGIKKRNYTLKNAKDVEDKFRTRNLNDTRWACRLFLQSLDLFYEDTQMKNPDGKEIRRLYARPGSIIAKARQAWGVESLKKDENGKRREDDRHHAIDAITIAAMSESMLQALTKAHQQAEDRGSARAFEKFEKPWPMFRDDVVTGIDKVLVARAEDRKVSGQKHMETVRALDEETGVVFERLPPEKLLDQTTKKVDESKWYEALSARFERPERSSFVIEELLRWEREGRPQDRPPLATNRKDGEAADKIGKIRVIATGSKPAVRVRGGTADRGDMARVDVFSKVNAKGKKQFFLVPIYPHQVAGDENPPNRAVAANTPEENWPELDSSFGFEFSIVQKSWIEAIKTDGTVIEGYFRGMDRGTGAVNISPHITNSTLVGRPGAKTLLSFAKYTIDRLGTKHKIEKEVRTWRGKPWDWPQ

SEQ ID NO: 17197 - protein, 1076 aa, unidentified; identical to SEQ ID NO: 17196
  REGION 1..1076: note = Cas Enzyme sequence

SEQ ID NO: 17198 - protein, 1031 aa, unidentified
  REGION 1..1031: note = Cas Enzyme sequence
MPSIDEGLAFGLDLGIGSCGWATVRPAPGSVVGAGAWVFDVPENEKDRTPKNQKRRQARGMRRVIRRRGQRMAAIRRLFAENGLTGAAHQGALWIKDADGRLLDPWELRAAALDRRLTGAELAVALGHIAKHRGFRSNSKRDRDKNAPKDEKTFLAAIDALSVKTASYRTFGEALARGEEFRGRKRNRDGDYGRTPLRRDLEHEVRKIFERQRALGNNLALAGLETAFAGIAFHQRPLGNSEEKVGYCPFEPEEQRAAQRSHAFELFRFLSRLANLRIGKDQRPLTPDELQLAAKDFGATKGLTYKALRKALKLPDEDRFAGVSEEDDKKRDVVMRTRGAAEGTYALRQCVGDAGWASLLRMPDLLDKIAFILSFRDDIDSIRAGLEDLKLEALILKAILTGAEQGSFAEFKRAGHISAKAARNITPYLLQGKGYADACAAAGYDHAAPDATPLAKLPRPATRRQIQAAIEESIGSPVARKALIESLKQFEALIHAHGLPGRVHVELARDVGKSAEERGKIDAGIEKRTATKEKLRAEFAERIGRPPAPGTDDLLRYELWKEQEGQCPYTDKAIHPDWIVSTDNRAQVDHILPWSRFGDDSFINLTLCLAGANQEKGDRTPFEWFQAAHKDWSEFSSGIERLKMMKGRKKRNFLLKDAKAVEVKFRNRNLNDTRYAARLLMQAIECFYPRESTRRVFARPGALTSKLRQAWGIQDLKKVDGKRVSDQRHHALDALVTAATNESMLQRLTAAHKQAEKLGAARPFMHVREPWPGFIEQARAAHAQVFVARGERRRARGEGHAATIREVVKGEGGPQVYEKVKVEDLTAKDLEKIKGAERNAALIAAIREWIEAGKPKDKPPLSPKGDPIGRVKLLTNKKVDVSVRGGAADRGEMARVDVFRKDGKFYLVPIYPHQVADKAQYPSPPNRAVQAYKAEDEWPVMDSSFEFRFSLYPFAFVELVKSDGEVIEGYFRGLHRTTGAVTVSPHHQPDQSIAGIGARTLQSIRKFAIDRLGRKHDIARETRTWHGEACT

SEQ ID NO: 17199 - protein, 1036 aa, unidentified
  REGION 1..1036: note = Cas Enzyme sequence
MRILGLDVGIASCGWALIEIDEGRSGIIAVGSRCFDPPLVPKTKEPKSAGRRAARGQRRVIRRRRLRMNRLRELLAENGILDGSGRDALAEAARRLAGAEVTPWDLRRAAHERALSRDEFAVVLGHVARHRGFRSNSKSETGANAPDETSKMKKAMEQTREGLARYRGFGEMIASDPKFAQHKRNRDKDYSHTPKRSDLEDETRAIFAAQRRFGQHSASGDLEREFAHIAFSQRPLQDSDAMVGKCLFEPDQKRTAKQAPSFELFRFLSRLATLKLTAGRVEFPLSPEQIALAARDFGGDTKGISFLALRRKLDLDPNTRFAGVSADREKNDVAARTGSAAAGTYALRKALGEAPWASLAKTPEKLDRIAEVLAFREDIARIREGLQEIALEPFIRHILLEATERGDFGHFGGAAHISAKAARALLPGLAQGLGYSDACARVGYDHSARPVIALKDINSPVARRAFLESIKQVRAIQRAFGPIDQVNVELARDVGKGAEERAKLTQGIEDRNKQKDRRALEASETLGRPVSPDELLRYELCKEQNFKCVYCDAGIAPNGFAADDTRYQVDHILPWSRFGDDSYRNKTLCCVACNQHKRGRTSFEWFDEDKTAQDWEAFSARVEGFKEMRGLKKRNFKLKDAKEVEDKFRARNLTDTQWATRLLADELKRMFPSKADERRIFTRPGAITSKLRRAWGLEGQKKIGGVRVADDRHHAIDALVLAATTEGLLQRITKQVQQREREGRGDDIFHVAPPWPGFREASIRAVYGENGVGGVFVSRAERPRARGKAHDATIRQIREIDGEEIVFERKAIEKLTPADLDKIPTPAPYGAIVDPAKLRDATVAALKAWIDAGKPKGEDQLPRSPKGDIIRKVRLATKTKVGIRLNGGAVDRGEMARVDVFRKANKKGVWQFYLVPIYPHEIATMEAPPMRAVVAYKDEIDWTPIDSGHEFLWSIDSMTFLEAVKGSGDVVEGYFRSLDRSTGAISVSSHSNSDALVTGVGVKTLASFKKFRVDRLGFARAEVHREVRTWRGKACI

SEQ ID NO: 17200 - protein, 1060 aa, unidentified
  REGION 1..1060: note = Cas Enzyme sequence
VHDNVNNKISGSVWFLLTGGEMSARGYRRILGIDLGIASCGWGVIEVGENDGNIIAAGVRCFDAPLIDKTGEPKSADRRKARGQRRIIRRRRQRMNLIRRLLVEFRVLPDHTPEALHHALRRIPPTAAGSQVTPWTLRAAAHMRLLTNDEFAVVLGHIARHRGFRSNSKKEAGANAADETSKMKKAMEATREGLAQYHSFGDMIANDPKFADRKRNRDKDYSHTAKRSDLEDEVRAIFRAQRRLGSSAATEQFERSFAGAAFFQRPLQDSEDVVGECPFEPGEKRTARCSPSFEIFRFLSRLVNLRLTVGRVERMLTPDEIAIAAKHFGEQKSITFKTLRKRLDLDPNVRFAGIAPDKEGVDVAARMGGAAFGTCVLRNVLGDAPWQSLLRSPEKLDRVAEILSFREDVDSIRRGLDEVGLDAPIVDRLTQAVADGDFRDFSKAAHISSLAARNIIPGLRQGMVFSEACARVGYDHTARPSVSLEQIGSPVTRKAFSEAIKQVRAVTREYGPIDIIHIELARSVGKSAEERKAISEGIEQRNVEKERRRKEAQELLDRAPSDDELLRYELAKEQNFKCIYSGNPIDPGGIKANDTRYQVDHILPWSRFGDNSYINKTLCTTKANQDKRGRTPFEWFETEKTEQEWMEYVARVESLKEVKGRKKRNYCIKDAGNFEEKFKARNLTDTQWATRLLADELKRMFPAHEGERRVFTRPGSITSALRRAWGLEGLKKEAGKRVEDDRHHAVDALVLAATSESLLNRLTKEIQKRESEGRQDDIFHCSQPWPGFRLGVEETVYGSAGIFVSRAERRRARGKAHDATIRQIREIDGETALFERRPIEKLTEDDLDKIPVPEPYGKIADPRKLRDDLVENLRVWIASGKPKDKPPRSPKGDVVRKVRIRSTNKVAVELNGGAVDRGDMARVDVFRKKNKKGAFEFHVVPIYPHQIVTLESPPNRAVIGNKAESNWTLIDDNFEFVWSLNPMCYLKLTKSNGEMIEGYFRSMDRTTGAINLSPMETNSKTIRSIGVKTLSSFRKFVIDRLGRKFEIPGEVRTWRGEACI

SEQ ID NO: 17201 - protein, 1049 aa, unidentified
  REGION 1..1049: note = Cas Enzyme sequence
MAHSVGERLRNLGTRYPIDESLVFGIDVGIASVGSGVIRHSTNGGSIEFAGSWCFEASEEPQKKKLKNATRREKRLSRRVIRRRRHRMADVRTLLHTHQVINTVDPSSFHHRKGAPDPWLARARGLDRKLEDGEFAVALLHIAKHRGFKSNRKSDIGRNAPDDDKKMLGAIEANREVAAQYRTVGEMVARDARFADRKRNRTGDYSHTLARDDLRREVEQLFEGQRRLGNHRANADLEERFLAVAFHQRPLQDSEHMVGPCPFEPGERRSPRHAPSFEKFRLLAKLNTVKVRNPDGSLRRLKAEELCKALSDFGVGSKTISWNAVAKKIGLPSGIAFDGIDEKKAKNDVSASGGCAAGTKTLYEAVGSAGWNTLKHEPALLDAIAAVIAFREDIASIEGGLRALEGLDPLVLRALMDGVQRGDFEAFNRTGHVSALAARNIVPHLLDGLVYSEACELAGYDHSQSRRIEIDDIRNPVVRRSLREAVKQVETLIHHFGARPGRIVVELAREVGKSAEERVRITRGLADRNAEKNRRRSELKELLNLTAEPSEEDLRRYELWKEQNYRCIYTDREIHANDILASRNAVQVDHVLPRSRSQDNSFTNQVLCFAKANQDKRQRTPWEWKVRDERDQAWWDTFETRVRALSIKGFKKRNLLMRNFDERQQGFVERNLNDTKYTARALLAVLRELYADGNEPDPASDGYLRATRRLFARPGPVTALLRKAWGLGDIKDRADDRHHALDALVCAAGGNEWLLNALTRQYQTIEEENRAKWTPNVPDPWDGFRSDVIAAYEGVFVARSEKRRGRGQGHKDTIYRIALEDGRKTTYERKAVANLTNADLARLKDADSGNRPLSEALATWLDKGKPMGEPPRSAKGDSIRKVLLRRKGASGFNVNGGHVDNGDMVRVDVFAKPNKRGADEYYLVPIYRHQVMNLSKWPSPPNLAVRAYKPEDEWEIIGSDHRFCFSLYGDAFIEVVKRDGQIFQGYYRSMNRATGALTVSPHDRRDQSFEGGGIGARTLSAFQKFQIDRLGRKYPIERETRTWHGAACT

SEQ ID NO: 17202 - protein, 921 aa, unidentified
  REGION 1..921: note = Cas Enzyme sequence
DFATCLLHIAKHRGYRSNSKSEKAQSAPAEDKKVLAGLAAVEERSARWRTVGQMFACDERFAEKKRNRDGDYSHTIRRSLHEDEVRELFKAQARFGATFATSELEERYSQIAFDQRPLQDSEVLLGHCLFEPNEKRASAVAYSFERFRFLSKLVHSRIDDGSAAGRAFTPEELTAAVQCFGTTSKTISWKKLKTLIGLPRDARFIGIGEDMEGRDAARASKGAAFGSNTLYRALGETAWQSLIKTPEKLDAIAHVLTFREDVGRIRAGLEELSLDPLIHNALMQAAEDGAFAGFSKAGHISTAAARSILPHLKTGLVYAEACAAAGYDHSVQIQEDLAALNNPVAKRAILQTLKQINALIRAFEVRPDRIHVELGREVGKGPEERGRIKKGIDDRTATREKAKRDFCDLVDRTDCSPGELQRYELWQEQEHFCMFCDPANDGSGRRHIDPYDLIDGRNTVEIEHILPQSRSQDDSWSNKALACIKCNREKKNQTPWEWFGGRDAERWQRFETYAQSLKRDGRLKGLKVRNLLMKTFEDRQEAFLNRNLNDTRYAARVVQAELKCLYSKAEQDGIRRVFARPGQITGSLRRFWGLDPFKYLPGDKSAKERIEDERHHAVDAIVVAACSESTLQNLTKAIQKEEEQGLPIRGKDFKPLWPSFRDDVAAAHDAARVARSENRRARGAGHAATIRKLREEDGRRIAYERTAIDKLTPSALERIKDPERNRDVMEALSAWLAAGKPKDAPPRRNNGHPIHKVTLRSESNPRTERAGFEAHKGLVDNADMVRLDIFEKEGKTYLVPVYAHQIADRAGWPQPPDRAITAHKPESEWLPIDGSYTFRFSLFPFSWIEAVDRKGVVYEGYYRGTDRSTGAITYSHEVSRLKTERFGTRLLASFKKFQVDRLGRRHEVKGEPRQWHGADST

SEQ ID NO: 17203 - protein, 1039 aa, unidentified
  REGION 1..1039: note = Cas Enzyme sequence
MNGLVFGIDLGIASCGWAVLRPGRGIVALGSWMFDVPETDKERTPTNQIRRGNRLLRRVIRRRRNRMAELRRLFRERGLIGSTEPDALKRAGLDPWELRARGLDKTLEAAELAVALGHIAKRRGFKSAAKRKEANVAGDDQKMLKALEATKERLGRYRTVGEMFARDPDFAQRRRNRDGVFDRTASRDDLAHEVRTLLAAQRRLGNELASEALEQAYVDIAFHQRPLQDSEKLVGTCPFEPSEKRAAKLSPSFERFRLLTRLVNLRITTDDGERSLSPEELALATADPGATAKLSVKKVRALIGLPAEHRFTTIKPEHESNDIAARTGEAMAGTRALRQALGEKLWAEMLVRPEQLDRMAHVLSFFETSDTIVAELRKLSLEADVIAALQAALDAGAFSRFKGAAHISAKAARALIPHLLDCRRYDQACEAVGYNHAASSLSHVEQITDKAGFNALVAELGQSIANPVARKSLTEGLKQLWAMRNEWGLPDAIHIELARDVGNSIEKRREIERNLEKNTADRERERQEVRELLNIVDVNGDTLLRYRLWKEQQGKCPYTGKDIHITQVIATDNSVQVDHILPWSRFGDDSFNNKTLCLASANQRKRGATPFEWFSADYTPDAWEEFVARVEACKEMKGFKKRNYLLKNAKEAEEKFRSRNLNDTRYAARLLAEAARLFYPRGDRQEKDGTRRVFTRPGALTAALRTAWGIESLKKVDGKRVEDARHHALDAVVVAAVSEGEVRRLTKSFQEWEQQGLGRPLRRVDQPWEGFRDEVKTALANVFVARPERRRARGEGHAATIRQVAERDGAPVVFERKSILNLSEKDLDRIKDSERNGALIEALRAWIAGGKPTDKLPTSPAGDTISKVRLSTKGKPSVAVRGGTADRGEMVRVDVFTKPNKKGKDEFYLVPIYPHQVMNKTEWPQPPMRSVVAYKDETDWTAIDDGFRFRFSMFPRSYVEVVKPSGEVFEGYFGGADRSTGAISLFFHADPKTSFRGLGAKTLLTMTKYNVDRFGRRAEVKQEVRTWHGVACTSPSPPG

SEQ ID NO: 17204 - protein, 1055 aa, unidentified
  REGION 1..1055: note = Cas Enzyme sequence
MSGLVFGIDLGIASCGWAVLRLPAGEDQPGEIVGMGSWMFDVPETSKERTPTNQVRRSNRLLRRVIRRRAQRMSGVRRLFRDSGLITEARADALAFANLNPWELRVQALERRLTEEELAVALGHIAKRRGFKSSAKGKSANTAGDDQKMLKALEATQERLARYRTVGELFVRDPGFAGRKRNRDGIFDRTQNRDDLAREVAEIFRAQRRFGNPAASNDLEAAFTEIAFTQRPLQDAENLVGMCLFEPAEKRASRFAPSFERFRLLTRLVNLRVLSATGERPLTPAELAAVLANPGKTAKLSVKEVRKRIGLPADQRFSAFRPDEEDRDVAVRTGEAMAGTRKLRETLGETLWETLLPTPLLLDEVARVLTFFETQEVIHRELERLSLPDGAVEALVRGLESGAFSKFKGAAGISAKAARSLIPHLEAGLRYDQACEQAGYDHAASKWAGREQVTDRAAFNRLVADLAADVANPVARKSMTEGLKQAWAMRNRWGLPDAIHIEMARDVGNSAEKRREIERDIEKNTASRERERQEARELLGITDITGDTLLRYRLWKEQSGRCPYTDQAIPAAAINANDNSHQVDHILPWSRFGDDSFANKVLCTASANQQKKGRTPFEWFQASKNEEDWQTFVKRIEGNAAFRGAKKRNYVLKNAREAEERFRSRNLNDTRYAARLLAEAIKAFYPPGERQDRGGIRRVFTRPGALTAALRQAWGVESLKKVDGKRVDDARHHALDALVVAAVGEAEVQRLTRSFQEWEQRGLARPLRQVPPPWGDPAGFRREVEDAYRDIFVARPERRRARGEGHAATIRQVRHRDGAAVVYERKAIADLKESRLEDIKDAERNEGVITAIRAWIARGRPADDPPVGPSGQVIRKVRLRTKAKPAVEVRGGAADRGEMVRVDVFSRPNRKGKDEFYLVPVYPHQVMNPRQWPTPPDRAVVHSKDEEDWVRIDDAYAFQFSLYPRSLVQVVKGSGEILNGYFQGLNRSTGAINLANHRDTRSLIDDLGNSTQGIGAKTLVSLEKFSIDRFGGRARVRSEVRTWHGVACTSPAPPV

SEQ ID NO: 17205 - protein, 1055 aa, unidentified; identical to SEQ ID NO: 17204
  REGION 1..1055: note = Cas Enzyme sequence

SEQ ID NO: 17206 - protein, 1053 aa, unidentified
  REGION 1..1053: note = Cas Enzyme sequence
MSGIVFGIDLGIASCGWAVLRHPTPGDPSGEIVAMGSWMFDVPETDKERTPTNQIRRSNRLLRRVIRRRAQRMGEIRRLFAQHGLLVGNEPDALKRAGLDPWELRARGLDKPLSSAEFAVALGHIAKRRGFKSARKGKEANTAGDDQKMLKALEATRERLGRYRTVGEMFGRDADFRDRKRNRDGLFDRTQSRDDLIHEVAKLFEAQRRLGNDTASAALEAEFTAIAFRQLEMQDSEKLVGMCQFEPKEKRAARFAPSFEKFRLLGKLVNLRITTPDGERPLTPEEIRLATGDLGKTAKLSVKEVRKRIGLPADQRFTAFKPEEEAQDIAARTGEAMHGTRKLRDALGEVMWAELQDKPEQLDQIAHVISFHETADKIGEGLQRLGLPAGAVDALLEDLAAFSRFKGAGHISAKAARALIPHLEAGLRYDQACEAVGYDHAASRWSKREQVADKAGFNALVKSMGDEIANPVARKSLTEGMKQLWAMRNRWGLPDAVHIEMARDVGNSLEKRNEIKRCIDKNTAERERQRSEVRELLGIEDVNGDTLLRYRLWKEQAGRCPYTDKAIPATAIIATDNSHQVDHILPWSRFGDDSYSNKVLCTARANQEKKGQTPFEWIMSSQGEDAWNTFLARIEGNTAFRGAKKRNYVLKNAKEAEERFRTRNLNDTRYACRLLAEAVKLFYPEGDRQEKGGNRRVFTRPGGLTSALRHAWGVESLKKVDGKRVEDARHHALDALVVAAIGEWEVQRLARSYQEWEQKGLARPLRQVDPPWGDAASFRREVREAYDSVFVARPERRRARGEGHAATVRQVKERDGALVVYERKSITDLSEKRLQDIKDPERNQGVIEAIREWIANGRPADSLPRSPAGDEIRKVRLRTKGKPAVHVRGGTADRGEIVRVDVFARPNKRGKDEFYLVPIYPHHVMNKRDWPTPPVRSVVAYKDEDEWTLIDDSYKFKFSLHPRSYIEVTKPTGELLAGYFQGLNRSTGAINLSNPRDSRLLADDNGNSMQSIGAKTLLTMKKYSVDRFGVRSEVKSEVRTWHGVVCTSPIPPD

SEQ ID NO: 17207 - protein, 1053 aa, unidentified
  REGION 1..1053: note = Cas Enzyme sequence
MNGLVFGIDLGIASCGWAVLRHPTSAAPTGEIVGLGSWMFDAPETDKERTPTNQIRRSNRLLRRVIRRRAQRMSAIRRLFQGSGLVAGCEPEALKRAGLDPWELRARGLDKPLKPVELAVALGHIAKRRGFKSAAKRKEANTAGDDQKMLKALEGTKERLGRYRTMGEMFARDADFQTRKRNRDGLFDRTQGRDDLIHEVAEIFRAQRRLGNELATVELERAFCDIAFRQLPMQDSERLVGMCPFELKEKRSSKFAPSFERFRLLSKLVNLRIDTGQGDRPLTAAELAAAIADAGRTAKLSVKEMRKRIGLPADQRFTAFKADEEDRDIVARTGEALHGTKRLRDALGEQLWRETSSETLDAIAHALSFFETQETILKELNKLSLSAGARDALAAALESGMLSRFKGAGHISSKAARALIQHLETGARYDQACERVGYDHAASRWSRREQVADKAAFNRLVADMGAEIANPVARKSLTEGLKQLWAMRNRWGLPDAIHIELARDVGNSIDKRREIERAIDKNTAERERERTEVRDLLAIQDVSGDTLLRYRLWKEQAGRCPYTDKAIPPLAIIATDNSHQVDHILPWSRFGDDSFANKVLCVAEANQRKKGQTPFEWIMASQGEEGWRMFVARIENNAAYRGPKKRNYVLKNAKEAEERFRSRNLNDTRYAARLLAEAVKLFFPEGERQERGGVRRVFTRPGGLTAALRHAWGVESLKKVDGKRVDDARHHALDALVVAAIGEWEVNRLTKSYQEWEQQGLARPLRRVDPPWGDFHSFRREVEDAYGRVFVARPERRRARGEGHAATVRQVKNRDGAAVVFERKSVADLSEKRLTDIKDAERNAAVIEAIRRWIADGRPADRLPRSPAGDEIRKVRLRAKGKPAVSVRGGVADRGEMVRVDVFLKANKRGKEEFYLVPVYPHQVMGRGNWQQPPAHAVVAHKDEGDWTPIDSSFTFRFSIYPRSHIEVTKPSGEVLSGYFQGMDRSTGAISLFNHRDSRRLVDDNGNSMRGVGAKTLLTMKKYSVDRFGRRAEVKSEVRTWHGVACTYPTRPG

SEQ ID NO: 17208 - protein, 1147 aa, unidentified
  REGION 1..1147: note = Cas Enzyme sequence
VAANIRQVKVEIGMDIIEDYSAGLDVGTSSVGWGLIDTVNRSVVPHEVTHHLWRDGVSRKVTETRYAAGVIKFDPVEQKLQGKWISRSNERGVFRRSRNRLQRKQWRLAALRELFHELGLTETAEPGPVFQSGAKAFKSPWILREEALHRVLTGEELFRALYHIAGHRVYEANSKAGEAADLAAIGDNAEVPPEGKKPKKGKSGESYGEKVVSLTAAIEVSGLTVAQYFNANFTNEDGRKHGLNGSLDRLFKRRLLRDEVRSIFAAQRRNGNKRATPELEAEVDRIAFYVRIGQDSEKFVGDCPFARDACGKPLKRAPRYSPSYEKFRFVQKLAHLRLKDGGFLSAEQRAVVAQSFGDRPTYTWAALGQVLGLDPAATFKDAPKQLDRDFVMARGECARGTAILSDVLGEVDLPPGALDRIAAILSYRPDLRSIEAGLRGSGLPAAVIERTIEGVRMGAFKFFKGAGHISVEAAGSLSERLLAGDTYDRACAFHGWDHAAPDNSAFAGLIRPASPKSILAIINDAESPPVHAPGARKALGVAFKQFVAIAREFGGLPGSVHVELARDIGKSLEERTKADNGRKDNEARNRRQAEHFEEIVGRPPIKGSEDMLRFRLWREQRHKCPYRASRDGQSGHISCETFRADRNGDGTLLNIDHILPWSWSHDDSFENLVLCFADENARKGSNVPWQWFGSDADRWAKFKAWIDNIPTLKSTVDRKKSKDFDDDPGMGGYKRRNLLVEGDEAIEKLKQRLSSRHLNDTRYATRILMQAIECLYPIEQYSDRQGNQRVKQRVFARPGQLVGMLRRAWGINHLKFDSQGVRLNDDRNHAVDALVGAAVTNRELQQMTKAYQKQEAKGGRIGRALSHVPPPWRTFAADIEAARDRVFVVRSERKRARGKLHDAGIYGGGPAAGKEQFHYRLNMQKEFGLKKGKFDAEVARGQLAKIKDPDRNRHLIQAIEAWIDGGAPREDGKWPVDQRGQPIRRITLHDPTRKPGIAVHDGDAKRQTMVSVDVFSLKGAKYNRRWAFVPIYLYHVLDQRSSPHAPSPDLQGGGVEIKFQLRVGRGDYLEFVSGSGECAEGYFIDFDIDSDRFSVGRHHDMAEHRVSASKMLTINKYQVDQFGRKSLVQSEVRTWHGVVCTSPIQPG

SEQ ID NO: 17209 - protein, 1053 aa, unidentified
  REGION 1..1053: note = Cas Enzyme sequence
MSGLVFGIDLGIASCGWAVLRQPTPGDPSGEIVAMGSWMFDVPETDKERTPTNQIRRGNRLLRRVIRRRAQRMAEIRRLFAQRGLLAGNEPDALKRTGLDPWELRARGLDKLLSPAEFAVALGHIAKRRGFKSARKGKEANTAGDDQKMLKALEGTEELLARHRTVGVMFARDPQFVTRKRNRDGDYSRTVKREHLTDEVRILFSEQRRLGNALATEELEAAFAEIAFRQLEMQDSEKLVGMCQFEPQEKRAARFAPSFEKFRLLGKLVNLRITTPDGERPLTPEEIRLATGDLGKTAKLSVKEVRKRIGLPADQRFTAIKPEEEAQDIAARTGEAMHGTKKLRDALGKALWAEMQDKPEQLDRIAHIISFHETADKIGAELRKLGLPTSTADALLDDLSAFSRFKGAGHISAKAARALIPHLEAGMRYDQACEAVGYDHAASRWSKREQVADKAAFNALVKSMGDEIANPVARKSLTEGLKQLWAMRNRWGLPDAVHIELARDVGNSLEKRNEIKRGIDKNTAERERQRDEVRELLGIEDVNGDTLLRYRLWKEQAGRCPYTDKAIPATAIIATDNSHQVDHILPWSRFGDDSYSNKVLCTARANQEKKGQTPFEWIMSSQGEDAWNTFLARIEGNTAFRGAKKRNYVLKNAKEAEERFRTRNLNDTRYAARLLAEAVKLFYPEGDRQEKGGNRRVFTRPGGLTSALRHAWGVESLKKVDGKRVEDARHHALDAFVVAAIGEWEVQRLTRSYQEWEQKGLARRLRQVDPPWGDAASFRREVKEAYDNIFVARPERRRARGEGHAATIRQVKERDGALVVYERKSITDLSEKRLQDIKDPERNEGVIEAIRDWIARGRPADSLPRSPAGDEIRKVRLRTKGKPAVQVRGGTADRGEIVRVDVFARPNKRGKDEFYLVPIYPHHVMNKRDWPMPPMRSVVAYKDEDDWTLIDDSYRFKFSLHPRAYVEVTKPTGELLAGYFQGLNRSTGAINLSNPKDSRLLADDNGNSMQSIGAKTLLTMKKYSVDRFGARSEVKSEVRTWHGVVCTSPIPPN

SEQ ID NO: 17210 - protein, 1053 aa, unidentified
  REGION 1..1053: note = Cas Enzyme sequence
MNGLVFGIDLGIASCGWAVLRHPTPGDPSGKIVAIGSWMFDVPETDKERTPTNQIRRGNRLLRRVIRRRAQRMAEIRRLFAQHGLLGGHEPDALKRAGLDPWELRARGLDKPLSPAEFAVALGHIAKRRGFKSARKSKEANTTGDDQKMLKALEATKERLGRYRTVGEMFGRDAEFRDRKRNRDGLFDRTQSRDDLIHEVAKLFEAQRRLGNGAASAELEADFTSIAFRQLEMQDSEKLVGMCQFEPKEKRAAKFAPSFEKFRLLGKLVNLRITAPEGERPLTPEEIRLATGDLGKTAKLSVKEVRKRIGLPADQRFTVFKPEEETQDIAARTGEAMHGTKKLRDALGEVLSAGLQTRPAQLDQIAHVISFHETADKIGEELAKLGLPGGAVDSLIDNLKGFSRFKGAGHISAKAARALIPHLEAGLRYDQACEAAGYDHAASRWSKREQVADKAGFNALVQSMGDEIANPVARKSLTEGLKHLWAMRNRWGLPDAVHIEMARDVGNSLEKRNEIKRGIDKNTAERERQRDEVRELLGIEDVNGDTLLRYRLWKEQAGRCPYTDKAIPATSIIATDNSHQVDHILPWSRFGDDSYSNKVLCTARANQEKKGQTPFEWIMSSQGEDAWNTFLARIEGNTAFRGAKKRNYVLKNAKEAEERFRSRNLNDTRYAARLLAEAVKLFYPEGDRQEKGGIRRVFTRPGGLTSALRHAWGVESLKKVAGKRVEDARHHALDALVVAAIGEWEVQRLTRSYQEWEQKGLARPLRQVDPPWGDAASFRREVKEAYGKVFVARPERRRARGEGHAATVRQVKERDGALVVYERKSITDLSEKRLQDIKDPERNQGVIEAIREWIANGKPTDSLPRSPAGDEIRKVRLRTKGKPAVQVRGGTADRGEIVRVDVFARPNKRGKDEFYLVPIYPHHVMNKRDWPTPPERSVVAYKDEDEWTLIDDRYKFKFSLHPRSYIEVTKPTGELLAGYFQGLNRSTGAINLSNPRDPRLLADDNGNSMQSIGAKTLLTMKKYNVDRFGVCSEVKSEVRTWHGVVCTSPIPPD

SEQ ID NO: 17211 - protein, 1065 aa, unidentified
  REGION 1..1065: note = Cas Enzyme sequence
MNSPAFNGPIANGLVFGIDLGIASCGWAVLRHPTEVDPTGAIEAMGSWMFDVPETDKERTPTNQIRRGNRLLRRVVRRRAQRMATIRRLFKEHGLLSSDDRDSLKRADTDPWELRARGLDKLLKPAELAVALGHIAKRRGFKSAAKRKEANAAGDDQKMLRALEATKERLGRYRTIGELFARDPDFQSRKRNRDGIFDRTQSRDDLLHEVRKIFEAQRRLGNELASDALEAAFVSTAFFQRPLQDSERLVGLCVFEPTEKRAAKYAPSFEKFRLLTRLVNLRVTTEDGERSLTPDELAAAASDLGSTAKLSVKTIRKRIGLPDDQRFTAIKPDDEGHDIAARTGEAMHGTKKLRDALGEEIWASLLEQPETLDKIAHVLSFFETAKTIGDELKKISLPTEAVDRLLEALPSFARFKGAGHISAKAARALIPHLEAGLRYDQACEAAGYDHAASRWSKREQVVDKKSFNQLVKDMGAEIANPIARKSLTEALKQLWAMRNRWGLPDAVHIEMARDVGNSLEERNRIKKRLDDTTAQRERERMEAAEQLGIDPGDVGGDTLLRYRLWKEQAGRCPYTDIAIPPNAIAATDNSFQVDHILPWSRFGDDSFNNKVLCSAAANQEKRGNTPFEWIMSTKGEEGWATFVERIETNKQYRGFKKRNYTLKNAKEAEERFRSRNLNDTRYAARLLAEAVKLFFPEGQRQDRGGTRRVFTRPGSLTAALRHAWGIESLKKVDGERVEDARHHALDALVVAAVGEWEVQRLTKSFQEWEQRGLARPLRRVEPPWGDSHSFRREVQEAYDAIFVARPERRRARGEGHAATIRQVKERDGALVVFERKAVADLKEKDLQRIKDPERNKAVIEAIRQWIANGRPVGALPRSPAGDEIRKVRLSTKGKPSVSVRGGTADRGDIVRVDVFSKPNRRGKDEFYVVPVYPHQVMDKRQWPNPPSRAVIAYKDEDYWVEIDGSFRFRTSIYPRSLLEVTKPDGEILLGYFQGMNRSTGAINLTNHRNSRLMFDDNGSKTESIGAKRLLTIKKYSVDRFGNRSEVKSEVRTWRGAVCTSPIPPG

SEQ ID NO: 17212 - protein, 1067 aa, unidentified
  REGION 1..1067: note = Cas Enzyme sequence
MIVANLAFGIDLGIGSCGWAVIETPPSNNVSGSIPAIGSWIFDVPETDKERTPTNQIRRGSRLLRRVIRRRRNRMAELRRLFREVGLLSTDAPDALKLKGLDPWELRARGLDRLLTANEFAVALGHIAKRRGFKSAAKNKAANTNSDDKKMLAALEKTQERLGRYRTVGEMFARDPEFSGRKRNRDGMYDRTASRDDLAYEVKVLFAAQRRLGHDKAGEALETSYVSIAFRQKAMQDSERLVGMCSFEPTEKRAAKLSPSFEKFRLLQRLVNLRVTDPEGERGLRPDELKRATADLGKTKSLTVAKVRELIGLPDDQRFTTIKPDQEKDEITSKKGECLPGTGALRKALGEQLWGGMELEQLDQIAHVLSFFEDSKAIEKQLRTLGLSDAVFGALITALDTGKFASFKGAGGFSAKAIRLLLPHLEAGMRFDQACDHVGYDHTATKWTGREQITTKAQFNKLVEDTIAEIANPIARKAMTEGLKQLWAMRNKYGLPGAIHIELARDVGNSLEKRREIEKGINDATVQRKRERQEAREQLGVEDISGDTLLRYRLWKEQGGFCLYTGKAIPPGQFMSNDYQVDHILPWSRFGDDSYNNKTLCLISANQRKKGATPFEWFARDKKTDEWDAFVERVESNKSLRGYKKRNYLLKNAKEVEDKFRSRNLNDTRYACRLLAEAVKLFYSYGERQEKGGNRRVFTRPGQLTAALRTAWGLESLKKVDGKRLPDDRHHALDALVVAAVTEGEVQKLTNSFQEWEQQGLGRPLRRVDEPWEGFREQAKAAFESVFVARPERRRARGEGHAATIRQIVECDDTKLTSERVAVLSLGISKGKFDEAKALKQLDTVKDPERNSNIVNSIRAWIADGRPTEESKLPRSPQGDVITKIRLMSSTKPAVLVRGGTADRGEMVRVDVFSLKVMKGKNAGQDQWYLVPIYPHQVMDKKGWPSPPMMAVSAYKDEQEWSPITPDHEFRFSIYPKSIIEIAKPDGQVLEGFFQGMDRLTGAISLGNNKNPRLFADDQGNSMRGIGAKTLLTINKYNVDRFGNRFKVEKEVRTWHGVVCTSPSPPG

SEQ ID NO: 17213 - protein, 1046 aa, unidentified
  REGION 1..1046: note = Cas Enzyme sequence
MDQFVFGIDLGIASCGWAVLRFPTPDDSTGEIVAMGSWIFDVPETNKERTPTNQIRRGNRLLRRVIRRRAQRMAEIRCLLAKHGLLASQEPDALGRAGLDPWELRARGLDKPLTPTEFAVALGHIAKRRGFKSARKGKEANTAGDDQKMLKALEATRERLGRYRTVGEMFGRDEDFRYRKRNRDGLFDRTQSRDDLIHEVGKLFEAQRRLGNDAASETLETGFASIAFRQKAMQDSEKLVGICPFEPQEKRAARFAPSFEKFRLLGKLVSLRITTPDGERPLTPEEIRLATGDLGKTAKLSVKEVRKRIALPADQRFTAIKPEEEAQDIAARTGEAMHGTKKLCDALGEALWAELQAQPEQLDRIAHIISFHETADTIAAELGKLDLPAGATDALLGDLTAFSRFKGAGHISAKAARALIPHLEAGLRYDQACEAVGYDHAASRWSKREQVADKAAFNRLVEDMGREIANPVARKSLTEGLKQLWAMRHRWGLPDAVHIEMARDVGNSLETRNEIKREIDKNTAERERQRAEVRELLGIEDVNGDSLLRYRLWKEQGGRCPYTDKAIPATAIIATDNSFQVDHILPWSRFGDDSFSNKVLCTAEANQRKKGQTPFEWIMASQGEEGWGTFVARIEGNSAFRGVKKRNYVLKNAKEAEERFRTRNLNDTRYACRLLAEAVKLFYPEGDRQERGGNRRVFTRPGGLTSALRHAWGVESLKKIDGKRVEDARHHALDALVVAAISEREVQRLTQSYQEWEQRGLARPLRQVDPPWGDAASFRRQVKDAYDKIFVARPERRRARGEGHAATIRQVKERAGVPVVYERGAITDLKDNDLERIKDPERNKRVIEAIRQWMEKGKPAHDLPKSPAGDDIRKVRLIARNKPAVEIRGGTADRGEMVRVDVFTKPNKHGKVEFYLVPIYPHQVMSKHDWPMPPAKAVAQGKDETDWFEMTAEYTFKMSIYPRSCLEVVKPDGEVVQGYFAGLDRTTGNISISDQKNSRQLWRGIGPRKLLTLKKYSVDRFGARSEVKSEVRTWHGVVCTSPTRPG

SEQ ID NO: 17214 - protein, 1188 aa, unidentified
  REGION 1..1188: note = Cas Enzyme sequence
MDNIREEFSFGIDLGIGSCGWAVIERTEESGRIVDMGSWCFDVPETNKERKPTNQIRQENRLLRRVIRRRRQRMNEIRKLFAQYGLIPTNDRDGLKILGLDPWKLRARALDNLLKGEELAVALGAIAKRRGFKSVAKRAKSSNASDEGKMLSALSKTRELLARYRTVGEMFACDEKFQERRRNREGRYDRTSAREDLEYETKRIFDAQMRLGNPLVSDDLRERYEKIAFFQRPLQDSENLLGYCRFEKEEKRASKFSPTFEKFRLLTRLVNLRVRESGVERALTVDELRRAVENLGEEAKISVKEIHKKMGLGEDVVFTTIPTDRENNDIAVRTGESMTGTKILREALGKDLWSYTSDEQRDAITHCLTFFETNSKIMEKLDLLNLSDEIMAALNQSLESGMFASFKGAADLSDKAMRKLIPHLEQGWRYDEACLREGYNYTASLFDNRAQVISKKQFNQLAEDVTAAMNNPIAKKALLESLKQIRTLILHYGLPGSICIELARDIGHSLDKRREIEDGIKEATKEREREREEVRELLGLSEVDATTLLRYRLWKEQGGRCLYSDRAIDPRLLKSGDEVQIDHILPWSRFGDDSFNNKTLCFAEANQQKRNQTPYEWMGGDEKLWQRFTCQVEALGIKDKKKSKSLADSQNKEGETSGIKGMKKRNYLLKDAKEREDGFRSRNLNDTRYAARILAEAVRFFYPENERAGKGEVRRVFTRPGKLTSILRKAWGVESLKKDEQGQRLPDDRHHALDAVVVAAVGEGEINRLTRDYQQWEKDGMARPLRGVMPPWPNFRNEVAAILEKIDGQTRAVARSERRRARGEGHAATIRQLKERDGKQVVFERKAVTALKNGDLDNIKDPECNQHIIKAIKDWMMRGSPKGDLPCTPTGIEITKVTLKTNKEKAVTALKNGDLDNIKDPERNQHIIKAIKDWMTRGSPKGDLPRTPTGIEITKVTLETNKEKAVTALKNGDLENIKDPERNQHIIKAIKDWMTHGSQKDDLPRTPTGIEITKVTLKTNKKPDVFVRGGVAERGNIVRVDVFNKVDKKGKNEWYLVPIYRHQVMDRKKWPMPPNRAIVGGRDEAVWPVMDENYHFCLSIYPRSYVEVIKGGGEIKSGYFAGVDRATGSINLLKHNDESDRKWGRGIGVKTLLRITKYNVDRLGHLYEVKSEPRLWHGEICTYPTRPG

SEQ ID NO: 17215 - protein, 1105 aa, unidentified
  REGION 1..1105: note = Cas Enzyme sequence
MRKDWITEVSKVTDEDLILGIDLGISSCGWALIRDPEKGGGIVALGVRMFDAPETDKERTPTNQLRRTHRGLRRVLRRRRQRMRDIRQLFKAHRLIADDDRGALRIDQLDPWQLRAAALERELTPAELAVALAHIARHRGFKSNSKRAQGANAADETSEMKKQIEGNRKRLGQYRTIGEMFAKDAEYKDRKRNRDGNFDRSVLRDDQLREVRLVFDAQRHAGNSLASTELEVAFIDIAFRQLPLQDSEDRVGFCNFEAGERRAAKRSPSFELFRFLSRLTTIRLKSGRNERALTPDEVVKAAQDFGTQNGMTFKRLRGILGLDAETFDGIPKDEEGKRDIVNRTPSNGCMQGTNAIRKCLGDPLFADLSASSDQLDSVAFVITFREDLASIRHGLEDLSLGTDAVTALIRGVEDGDFSTFKGAGHLSTKACRAIIPHLAHGMTYDKACSSAGYDHSAQAETSIDQIANPIARKAFTEALKQVKAITDEYGMPSRMHIELARDVGKSQEERKKIREGIEKRNKEKDRLREHFKATVGQEPTSAEDLMRFELWREQNGRCIYTDREIHPDAIVASDRTVEVDHILPWSRSGDDSFINKTLCYASANQQKKGQTPFEWLGSDAAKWDGIVARVETNKAMKGRKKRNYLLKDATILETKFRDRNLNDTRYATRVLLNTLARKYPRDSRVHVFSRPGPLTDRLRRGWGVQGMKKTTDGERLPDDRHHALDALICAATTQSELQKLTRAFQESERAGSHRDFSKLDPPWPGFVEETKARMAEVFVSRSERQRARGEGHAATIRSIGDYERKSITDLKLADLERIKDPDRNGTIIESLRRWIEAKKPKDQLPRSPNGDVISKVSLIMRMRTRGEVQATIDASISESEGSPEVYERKSIMDLKPADLERIKDPERNRHIVESLRSWIEARKPKDQLPRSPKGDVIRKVSLITSKKIDVLVRDGAADRGDMVRVDLFTKPNKRGKLEYYLVPIYRHQVADKVDWPTPPNHAVVGNTPETDWPNMDRDYSFYASIFPMSFIEIEQKDGTIIDGYFRGLDRNTGAIGISPHYSNGGLTKGIGARTLNAFRKFSIDRLGRRFEVNKEHRTWHGKVCI

SEQ ID NO: 17216 - protein, 1030 aa, unidentified
  REGION 1..1030: note = Cas Enzyme sequence
MRILGLDCGIASVGWAVLDLAEDGSDGRIAGCGTRMFDTPETDKERRPKSELRRMYRGQRRVIRRRKQRMNAVRRLLHQHGLLPRAGSDALAFDGTDPWAMRAMAHERLLSARELAVALGHIARHRGFKSNAKSRGENVAEDSKMKKAMAETQEKMAGRTFGQLMASDPAFAGRKRNREGDYSRTPLRADLEAEVRAIFRAQQRRQNPAATPALEADFIATAFFQRGLQDSEKLLADCAFEPQEKRTSKRAFSFELFRYLSRLNTFTIEAGRNTRRLTQPELERAIAAFGSTKKISFKALRKILKLGDEERFAGVREQDEGNDCVARHGEAAAGTATLKAVLDGAAWDSLVKTPEKLDRIAEVITFREDLGNIRKGLEETGLDPLIIEALMQAVQDGIFTKFAGAGHISSKACRNMIPHLAQGKVYSDAAAACNYDHTQSRERNAFNVGITGKQALKEILSRQIIDRSLVGSPIARKALIEAVKQVKAVAEAYGIPDAVHVELARDVGKGIEERREIERGIEKRNKEKERLRARFAEDVGEPCRTAEDLLRYELWLEQNGRCVYSDVLISPRDIVATSNAVEVDHILPWSRFGDDSFHNKTLCTAKANREKRGQTPYEWFGSNEAQWAAYVARVQSLPALRGIKRRNYTLKDAASAEERFRSRNLNDTRWVCRLLAECLKQLYPKDEGQRRVFTRPGALTDRMRRGWGLQWVKKNEKGERIADDRHHALDAIVCAATTEAMMQKLTKVFQKEEEMGGHRDFRALDQPWPGFREQTLAAVERVFVSRAERRRARGEAHAATIRSVSERDGERLVFERRRIGDLKDSDLDRIKDPERNAATIAALRAWIAAGKPEDAPPLSPKGDPIAKVTLRTNKKPDVSLRGGVVDRGEMARVDVFRKQNKKGAWQYYLVPIYPHQIATMEEPPKCAVQAHQDEARWPALDDTFEFMWSLVPMEYLEIETGKGQLIGGYYRGMDRASGNLEVSQHQDSDQRVRGIGARTLRTLDKYHVDRLGRKLLVRMERRTWRGKVCT

SEQ ID NO: 17217 - protein, 1055 aa, unidentified
  REGION 1..1055: note = Cas Enzyme sequence
LNDHTRRPYILGLDIGVASVGWSRIECDPDDNFRPVRLLAAGAHIFEPGTEGSQADIAKGKDVARNQQRRTARLTRRQTWRRARRKQQLLRLLIAHDLMPAPGTSIKRPEEIDTYLKAFDADLRTRWLTEGRHLDELRLAYLVRAAAAEREIGRHDFGRALYHLAQRRGFLSNRRADARKKDGDDDRSVVKAAINGLQERIDAHTPPLLGAYLASLDPQQEKVRRQWTSRKMYTDEFDALWFKQAEHHALADDARDAIRKSIFSQRPLKSQKNLIGRCSLIPTEPRAPIAHRLYQRFRVLQTVNNLQVVPPDGSPKALKSDERATLLALLLERGDLTFDKARKALKLPRGTVFNLESGEEKRIVGHRTDAKLRDVFLKHFDAFSPADQDRMVEDLRSFRLPEALERRGRKRWNLSAFDPLAFSNITLEEGYAPLSLAAIERLLPDLERGVPYGTARRAAFPESFATQEPVAELPPVLEAVSDLRNPAVTRSLTEIRKLVNEAVRRFGKPHTIRVELARELKNPRGVRERITRQMRDREKERSIVAARIIKEAGIAIPRRDDIERVLLAEECGWHCPYTNKSFGMAELLGPTPQYDVEHIWPRSRSLDDSFLNKTLCYHDENRSRKRGRTPFEAYGGNAELWSDMMRRVERFKGDPYARLEKLRRFKADQIDTDFSNRHLSDTRYIGRAAADYLGLLYGGRDDATGTKRVQVCTGGLTAWLRTGWGVSDLLGEDGEKNRADHRHHAVDAVVVALSDTRSVQLLSSAAAVADHRWARRAFDHVDEPWPGFRDEVAKAIDGIVVSHRQSRKVSGPLHDQTIYSPPIDGKPRVRKELHKLSVSEIRDGKIVDKRALKAIRDKLEAAGKSVPTPRDIQQLFGLEENLPEVRGHDGQMVKLRKVRVLADPGQTCIGKPGFERHINTASNHHTVIFAELDAAGKDKKWLDEPVPLLEAYRRQAANERIVRRELGADKRFVLSLAPGEYLEMDTPGDATKRAVYRVCSISEGDMELRLHHDARTADEVKKAKARVRVSADRLRKLRAKKILVTYLGELRNAGG

SEQ ID NO: 17218 - protein, 1044 aa, unidentified
  REGION 1..1044: note = Cas Enzyme sequence
MRTRFQLGLDIGVASIGWSLIRADEAGQPLGIEAMGVHLFEAGVAGDVERGKDESKAAPRRAARMMRRQLWRKQWRRHRVLHELMSCGLLPPGGVADHLATDAYLKGIDGALRATWEREAGHREAQLLPYRLRAEAARRRLEPVEVGRALYHLAQRRGFLSNRKSGKRDEEEASTVKQGIADLSLAISAAGNPTLGAYFSTLDPTEQRIRKRWTSRQMYLDEFEVIWAAQAKHNACMTPEAKKAVFDAIFFQRPLKSQAHLIGHCDLIPGKRRAPIACRLAQRFRMLQKVNDLVIEFPDRTQRTLTRTERETVIHELEQGDATLASLRSKKVLSLPKGAAFNLERGGEKKLPGLRTEAKIRGAIAVQWEALADQHKDDLIDDLLAIDGEVALLKHLRDKWGLDAAAAKALAAEALEDDRSAHCRAALAKLVVRMEEGTSYATARKEEFPHRFLVKPALDTLRPVRAAVPDLANPTVERALTEVRKLVNAIIRTHGKPERIHVELARDVKKGRKKRQEAWEENRKREAERAKAADRIATQAGLSNPKGYDIEKVLLADECGWKCPYTGRDIDMRSLLGEHPQFDVEHIWPYSVSLDNSFSNKTLCYHEENRNGKRNRTPHQAYYGTPAWDAILQRVEHFKGDDRTIREKLKRFTAEELPDGFSARHLVETRYLSRLAGEYLSELYGGRGIEGQKQGVVVTTGGLTAHLRREWGLSAVLGRPQEILDKKDRTDHRHHAIDALVVALTDQGTVQKLQRAAEQAADAGRRMFAQVDPPWGASRDDFVAQVRHAVDAINVSHRQSRAASGQLHGDTFYSRDLPKGKAESKPRVRRPLSSLTDKQVNEIVDSAVRGAVVAKLAELGENDPRKAFKGDANLPAMPRGDGKIVPIRKARVFISKTPRKVGGKGRERRVLSTPGSNHHTVISAVKDEKGNEKWEDTPILLQEVYRRVVRREPVVDQRDTERATFAFSLAANEFVMVRSKDGSERLCRVLSVSQRDIEVSFHSDARTTGERGKDRIRLGGSALSERSFRKVHITYLGEIRNAGG

SEQ ID NO: 17219 - protein, 1095 aa, unidentified
  REGION 1..1095: note = Cas Enzyme sequence
VTNAEAGQQYVLGLDLGVSSIGWAMVDENTTPENTRIIRAGTHLFEAGVDGGKQDPETAMETGREKSRATPRREARQQRRQTWRRAFRKRSLLKTLIRHGLLPQPAHRLASPTDIDAYLKHLDAALRQAWEDKQDADHRMRQVLPYRLRADALRRKLERHEVGRALYHLAQRRGFLSNRKTDDDESSEDDKNTGAVKKGISELEQLMQAANAETLGEYFASLDPTSPNQHRIRGRWTSRSMYEHEFNRIWEEQSKHHPDAMTDDAKRQVHRAIFFQRPLKSQRHLIGRCSLISTKRRAPVADRLFQRFRMIQKVNDLEIIPCMQIQEEDIDPKTGEVKMNPKAGKPKMRKRLALDPDQKQRPLTPEEREAAIERLSQGDATFTQLRKAGVAPKLSRFNFEHEGESRLPGLRTDAKLRDIFGDRWDQFSDTDKNAAVEDCLSIVRADVMEKRGRSHWQLSLEDARAFARVKLEEGYANLSRAAVRRLLPELEKGTSYATARKTTFPESFVSIDPVDELPPLDKAFDDPVSPAVARALSEMRHVVNAIIRRYGKPSHIRIELARDLKKGRKRREAISKNIAARRKLREAAAYRLLKQYPNRGTKPEDVSGTDILKVMLADECNWICPYTGRSFGWDDVFGSTPTIDIEHIWPFSRSLDDSFLNKTLCCVKENRNVKRNQMPGEVYSGERLAAILQRVATFKGDAAKVKLERFNADSIPPDFTNRHLSESRYVSRKAAEYIALLYGGYSDDEHKRRVHVPSGGLTAWLRREWGMNAILSDRNEKEREDHRHHAIDAIIVALTTSRTIKKLQESAAWADESGSRRRFAGVESPFEIDDARRAIEAIVVSHRQNKKARGKFHKDTIYSEPLPGKNGKTNHRIRKELHKLNDKELNAIVDPRVRELVCTAYKTRKQEGAKNPSQAFSEENHRPVDPAGNRVRRVRIHTNAQPETIGREANQRRVDLQANHHTVIMAKLDKDGNEKSWVDEPVSLFDAMNRVRDKKPLVSRDVPDGYKFKFSLAKNDYIEMDRADGEGRSIYRILNISGGDMEVRKNRDGRTRQAIKEAGDKRERVSGSSLYKREARKVHVNYLGEVSNAGG

SEQ ID NO: 17220 - protein, 1091 aa, unidentified
  REGION 1..1091: note = Cas Enzyme sequence
MTDSNHKRPYILGLDLGVSSIGWALIEATSNQQRKRIIRAGVHLFEAGVDGGKQDAETALQKGNEKSRAQPRRDARQQRRQTWRRAYRKRKLLNRLIRCGLLPQPDQQLDTPAAIDAYMKSLDCTLRKKWEEKENADHCSRQLLPYRMRAQALNRPLDPAEIGRALYHLAQRRGFLSNRKTDQDEADDSEKNTGTVKSGISELEQLMEDAGAETLGQFFASLDPSDPNSRRIRGRWTGRSMYEHEFKRIWEAQSKHHPEIMTNEARQEIRDAIFDQRPLKSQRHLIGHCSLLPNKRRAPIADRLYQRFRMLQKVNDLEIIPHKQIEEEDFDKETGEVKINPKTGNPKMKKRLVPDPDAKQRPLTESERDAAIARLSKGDATFHQLRQAGAAPKHSRFNFETDGEKGLIGLRTDEKLQSIFGNRWEELSETQKDAVVEDCLSFERADAMEKRGREHWGLPPEDARAFARTNLEEGYGSYSRAAIRKLLPLLEQGVRLQSARQELFPDSFATYEPSGFLRPLNKTFYEPLSPAVARALSEMRKVVNAIIRRYGKPEHVRVELLRHLKKGRTRRANIEKQITARRTVREKAAERLLQQYPGRSVSEIDKLKVLLADECRWQCPYTGRCFGWEDLFGHHPTIDIEHIWPFKRSLDNTFFNKTLSCVRENRNVKRDHMPAEVYSGERLENILQRVAKFKGDAAREKLERFKAESIPAGFTERHLTESKYIARKAAEYVAQLYGGLSDDEHNRRVHVTTGGLTGWLRREWGMNAILSDRDEKERSDHRHHAIDAIIVALTTPATVQKLQKAAARADDNGSRKLFADIEAPFDFADARRAIEAIVVSHRQNRKARGKFHKDTIYSRPYRSHKTKCQHRFRKELHKLYESDIDLIIDPRIRETVRTAYENRKKQGAKDPTQAFSDPQHRPQLPNGDRIRRVRIITNAQPEAVGSDARKRRVDLQANHHTVIMAKLNKDGSEKTWVDKPVALLDAMDRAKDDSNDLVSREVPKGHRFKFTLAANEYIELDRPDGHGRTIYRILNISAGFIEIREHCDGRTRRELKDSGVKREIARGSLLYKRNAQKVHVNYLGEVHNAGG

SEQ ID NO: 17221 - protein, 1377 aa, unidentified
  REGION 1..1377: note = Cas Enzyme sequence
MSKYYVGLDVGTDSVGWAATDEDYNLLRLKGKDAFGANLFSMASTAKARRLLRTSKRRTARRKYRIQLLNEILAEPISRKDPDFFPRLANSNLHWEDKKGVKGHAVVFPTKKEEAQFYKDFPTIWHLRKALVAGDQKAYKDIRLVYMGIHHIVKYRGNFLKEGDFSVKKFDYETLFDNLNRNIASLREGDNSGPTIAKENYGKAFDIIQERKGTNDKVRALKELLNNPYDSAVWEAFSKLVSGGTFDSSKLVEDATKKINLKKGIADEDYEAALDELKNYGFILEDAKAITDYLSLKQLLGDHTYLCDSMVEIYQKHKSDLRLIKDTLHSVDEKKGQRDKEGSTYFQFFKEKGKDNYLALTHNDSAVRKTPEEVLKFLKGIFEANKDFIDEKTYQTLTDGCCDYSLLPLISVHSTSVIPHQLHHMELKEILRHAANAYPSVFTKEVVEKIDKLFLFRVPYYYGPLNPNSPRSNIVYKAGTDPKEKISPWNYDSLVDEDETRKRFIAKLTKSCMYLIGEPVMPKSSLKYEEFILRDQLNTLHVNGHRFSEEEKEKVFDFLHSRAKTDLPQLKEYLEKLTGIKAAEIVFSGLSEKHEFNSASFAFFERFKAKFHKEISERDAEKIILLSTIYTKEKDDLRKYIRKEYPSFSKNEVNFLLGLNCTKWATVSEKFVDGITGMDENDVAGLTILGYLRTTDRNFQQILNDPKYRFREVIDDENKRHGKDRTDKERIEEILDATPAPFRRSVIRTMAVLDDVVRAKGSAPDKIFIEVTREDNDADTRKAKTKDSRYSELKKMLRSIQKDGKEYSEFVSKNRIDELDSELEEEDIKNAQINGKHVYLYFRQLGYDLYTGEKIDLYDVLHSDRYDTDHIIPQSLIKDDSLDNLVLVDRTYNQRIKQDFYPIPTSIRNEERKKLWHFLHERKLISDKKYNNLIRSTELTEDEINAFVSAQINALNYSNIALRDALATRYPDTKLVFSKAQYPSYIRDQYHISKIRELNNAHHAVDAYLNILCGNILSMTFQNLHVIYAKKKEAAERKASGQEKKENDDKTFNMTHVLRYHLNNDEGLLQRVTFTCMKHSALITYASSDSAGAFYNMNISPVKDTAGELYPIHKGMDPKKYGGYDSTTTSYFYLVSYVKKGKTKKRLLNVKTVEAAECKTDEELKKRLIADNRLNNAEISDIRFLTKIKPNQKVLYHGGIYSLRPSNLFRCNLVNAYQFYLEDSYRYDNDVSYLKFALNHLSLLESDKDSIELFTDRKKEHKIVISKERNYSIFKKLVDLAERKSNGKHPGFESCTFLSNFGKLGSKEEFMKFKPVQQIQIIDEGLKLFTDSIHSKINEYYPSVGKDFAYKPSLNLDGPITLINESPSGLYVRKVTY

SEQ ID NO: 17222 - protein, 1113 aa, unidentified
  REGION 1..1113: note = Cas Enzyme sequence
MKNTQQADIQMAFDVGHSSIGWAALRSTDRELPELMACGAVTFEADGCLASRRRGFRRQRRHIRSTRQRLSRIKVLIGHIRAIPGEVLEKKHAAGGGHAAPWFLAARVFRGGALCSWEQVWDVLRWYAHNRGYDGNRTWSRRDEEASEDTEKLQNANRLLLEFKQKHGRDGTMAEVFCDVSGLNPLGPKMSCNLPGDKRPKALNAAFPREVVVAEVDSFLRKHIGHLDRLDEAFRRSLMEDWTAIPCPGIKLPSRFGQTLADGTRSKGGLLFGQLIPRFDNRIIARCPITYERVFQGVLADTGSEEQAKRAADKESKVPAKDCREFLRFRWAMQVANIRITRTGGDGLRPLNADERKALDQSVPQEGYFTPTGLKASVRKITGGAPDNLEQLLLHPDAAEALLIDPARKALSRPGWGQAALGLPESLLNVLLNKLRRGAPVEMEWILAKHHAAALLFDEAAAAIADKKKKKTRAEVLDEWKTEKAILHPVSGRAPFSREVMREVDQFVFSTDRHPSEGAPDANDNGPLYRSESIREAQLRREIDEQTNNRLVRHRLLILERLHKDILKEFAESNPNRVSRITIEVNRDLREMSGKTNKEIKQELGIRLGNFRDVAEKLESDLKPHGIRATAGLIRKARIADDLGWKCPYTGQSFDALALHARTVDKDHIIPRSQRPSDSLDSLVITFSEVNRMKGGKTALAFIQEFGGQPVTGNPGLFVQTARQFEALVNSLDARRGHLDDQRRKKKRKELLLLENYVEKEFTPRDLTQTSQIVRMGAQVLERAYLDNATRPVITSLPGSVTGTIRKAWSLTGCLAAANPLVLNPDDLDSNGNPQPHAKTEIRSITHLHHALDACVLVFASLYLPREGDIWGLLVKRRLTKPEAERLREGLGGMVQIAADGTFQIAELPNVLKEQIRRRLAEKRVFQHTPSRRQGLRVEQNAWRVVEIKDGVATLRQKMRQADGTKTPKVATEKIGKVLGLFPDGGTGKLKTLKAGLVIGDNYGLALDPEPQIIPFHKVHQRLSELTRKNGGRPPRVLRNGMLIEIPIKLPGRGGDYRGVWRIKSVKLTEAYGLCLDLSTADGIALGRGNARLDVLLKSGMRLLSSPYTGIAG

SEQ ID NO: 17223 - protein, 1007 aa, unidentified
  REGION 1..1007: note = Cas Enzyme sequence
MMLPPRLQERLATFLPEIRVGIDFGESAGGIAVVKGNQILHAETYVDFHASDLEQRRQLRRGRRTRHAKKMRLARLRSWVLRQKLPDDTRLPDPYVVMRDPKFHVQPGVFKTKTPGRDSATAPSWIDLAKQGKVNASGFVRALTLIFQKRGFKWDAIELAKMTDEKMKDFLQTARVPSDNLASDIREEIQRRRQDPDSSVRGKKKVSPDELLALLEQARERHPQPRVAEHRTVKEADLRSAVEGFGNSINLTKATIQRWQRELSGLLNKVLRPARFENRLRTGCAWCGKPTPRKIKVRELAYEAAVRNLRVREGRSIRPLKPEELAIFAQWWHLRGQAGESQQGGSEQKRSRKDRSQAVPKLKAIQSHLKKIGAQEQMARQIFDLLWNEKPQGRASLCHQHLIEAAQGRTMKDVVGEWHKVKVRKAPNPCREQHDVRVLHRLEQILFKPGKNGPDAWRYGPAKLITLEVPKPQTEQARKGEQKLRKPESFMERLRKETAGVCMYCDSSTHRPAEDKDHIFPQSRGGPDVWDNLVPVCRDCNMAKGDRTPFEWIGAAGERWQRFTERVEGLAVRGVRVEREDGKEETVRISERKRALLISQDAEYPDNPTPLAHVGARPRQFVVALRKLFEDRGVAAPSVNFESGLPFVQRIDGRTTFQLRKSWLKKANGSDNFPKKNDWDLLNHAQDAALIAACPPHTWRDTVFRVRASRPRWDGKWTEQDGLAVSELAPDWAEYLERQTWPLIKVLGRYPVSWKRKFADLTFSQNPDSLDDKRLVQYLPIANMLHSGKGPDDKRHPAETEIVNPTLDKKFRAVATALGIKRRQTLPEKNLREEFPGIRHVKVRKQPGGRLVRVEPEDGPPRKVEVKGASEAIVFWVKKDEPVTKLRMSIRWPTILRALNVARYEPTIPSDARILAVWRRYQLVRFGPETGLNPGFYRVKEFDAAEVRLLPESAIPDALAQRLNLKRRNDTEESAEENKEIKLRKPALAKYFETLNEKDRHDPRTAS

SEQ ID NO: 17224 - protein, 979 aa, unidentified
  REGION 1..979: note = Cas Enzyme sequence
MRRRALNEALHEAGFLPAFDKAFRKSSETKSAWQLAMESDPYELRRRGLEEGLSAYELGRAIYHLAQHRHFKGRELEESDTPDPDVDDEKETANEREATLKALKNEQTTLGAWLAHRPPSDRKRGIHAHRNVVAQEFEKLWEAQTKFHPALKSEELKARISDTIFAQRPVFWRKNTLGECRFIPGEPLCPKGSWLSQQRRMLEKLNNLSIAGGNARPLDAEERDAILSKLQQQASMSWQGVRSALKALYKQRGEPGAEKSLKFNLELGGESKLLGNALEAKLADIFGEDWLSHPHKKEIRNAVHERLWAADYGETPDKKRVIILSEKNRKTRREAAANSFVADFGVTEEQAAQLQALKLPTGWEPYSIAALNLFLAELEKGERFGALVNGPDWEGWRRASFPNRNQPTGEILDKLPSPAAKEERDRISQIRNPTVVRTQNELRKVVNNLLGLYGKPDRIRIELGRDVGKSKREREEIQSGIRRNEKQRKKATEDLVRNGITNPSRDDVEKWILWKEGQERCPYTGDQIGFNALFREGRYEVEHVWPRSRSFDNSPRNKTLCRKDVNIEKGNRIPFEAFGHDEDRWSAIQTRLQGMVSAKGGTGMSPGKVKRFLAKTMPDDFAARQLNDTRYAAKQILAQLKRLWPDMGPEAPIKVEAVTGQVTAQLRKLWSLNNILSEDGEKTRADHRHHAIDALTVACTHPGMTNKLSRYWQLRDDPRAEKPKLTPPWDTIRADVENAVNDIVVSHRVRKKVSGPLHKETTYGDTGTDIKTKSGTYRQFVTRKKVESLSKGELDEIRDPRISGIVVAHVAERGGDPKKAFPPYPRVSPDGPEIRKVRLTSKQQLSLMAQTGNGYADLGSNHHIAIYRLPDGKADFEIVSLFEASRRLAQRKPVVRRVRTDGAKFVMSLATGEAIKFPEGAKKGIWIVQGVWASGQVVLERDTDADHSTTTRPMPNPILTDAAVKISIDPIGRVRPAND

SEQ ID NO: 17225 - protein, 1128 aa, unidentified
  REGION 1..1128: note = Cas Enzyme sequence
MIDSSANIQGVRYRIGIDVGLKSVGFCAVEVDQRDQPIRLLNSMVFIHDAGVDPNENKAAKSRKLTAGVARRTRRLYRTRHQRLVNLDRVLSKEFGWPLPDFSSFKDPREPWHVRAGLLDGYIADDEKRKEALSIALRHMARHRGWRNPYAKVETLLQPSEPSDFLKGLNERIGTALRRSFPEDATPGQLIDAYLAHPDYVGRAGTPKLRGPEGILAGKLHQSDNAQEIRRICDVQQIGPADRDRLIRVVFEAKSPKGSAKERGLVGYDELPGQGKHVRAEKAHPAFQLFRMVSVLANLRIREGREERPLSPHELQGLVDFIDQVSLKQEVTWQDLADNLGIERSDLRGTAKASFDGSPVLRNPPTDVTTEKIMACKVKWLKEWWKDADDEQRGYMVDAFSNSGGSEDGTDVNDEVAELLEQATEEDQLEFEKISLPQGRAAYSLDSLRRLTRRMLSEGVDLHTARRLEFKVGDDWKPAVEPIGAPTGNPAVDRVLKQVSRWLHAATERWGEPTVINIEHARDGLGSERVARELMRENERRRKANASAVAEMAAKLKLSGKVHRSDQIRYFALQRQNCQCLYCGVPITYTTAEMDHIVPRADGSSTNDRSNLAAVCRTCNHMKGKIPFAVWASSDKANQGVSVTGALERVNMWQRDNGMSPKQFKQLQREVSARLKSRKPDEDFDGRSMESVAWMAVELRARIEGFYRSRDEESVPSVGVYRGQLTAEARKASGFENRVNLIGGRGKTRFDRRHHAMDALVIALMNPSVSRTLALRLNMRDAQRLTGVEETWKNFYGKPGEASQRFESWRESMLRGVELFNIALSDNAIPFVENIRLRVGSSVIHDATVHSFCPPKTPDGKQIITKGYGEQHTLGSALPAELIDRAETPALWTALTRCPDFDPKKGLPEDPQRTISVNGTRVGPTELVNFFGSSAACLKVRGGYVELGSSIHHARIYRIDGKKTAYAMVRVFQVDLMRMKHQDVFTTPLKPSAISMRTAEPKIRQALANGTATQIGWLVEGDELRIDTSKYRGGFIGEVLERYPEATSWRVAGFPMPANLRLRPYLLSAEGLDKDADKAMKDLLDGSGWRPSVNVVFSSGMVEIVRRNCLAEPRFGCRASLPTSCVVE

SEQ ID NO: 17226 - protein, 1077 aa, unidentified
  REGION 1..1077: note = Cas Enzyme sequence
MEASQKYVLGLDLGSASLGWALIGLNAAGDPEHLIRTGVRIFEPGVDGSSLDIEQGKDQSKAVERRTARLQRRQLRRRVARQRELFTELQRVGLLPIGSTGQGAGSEQRHQLLNNFDQALTSKYLATDGEAFAQSPLYFLRKRALDHALEPHELGRVLFHLSQRRGFKSNRKETKKAKDDEDLGQVKADIHSLELAMQEAGARTLGEYFAGLDPHTEKVRRRWTARRMFEHEFELIWSAQLPHHTSVLTQELHDRIWILLFFQRPISAQKHLIGTCELERGDEKHPPKRRAPWASMAAQRFRMLQKINDLVVLNAPMRTSRKLTPEERKSLYDLLDREGTQTFAAIRKHLDLKGTTFNLEAGGDKTLPGNRTLKSMRNAFGSAWDSFSEGKQNQIIENWRNSESDDLLIAEAVEHLGLDATSAKTLVDEKPQADYCALSLVAINKLMPLMLDGKSFKEAETEVYGNRFSGLPVHDILPPVREALPTLRNPAVERALTELRKVVNAIVRAYGKPYEIRIELARELKKPRQERVKATVANRKREAENKLLAKRMADECGIQNPSRKDLEKARLWAEQQGECPYTGKRLSFSRLFDDPEFDVDHILPISRHPDDSYQNKVLCCLNENRMQKRNQTPYEAYSSDAERWRVILARVAKWSNPGKLSKFEIATADKLTEFSSRQLNDTRYTSVKAGEMLSLLFGGRDVTSGGVTRQAVYASTGAVTATLRRNWGFELILQGLVSPEAGETRGKPRTDHRHHAIDAITIALTRQSVIQAMARESQLAPWQPGTRAWRNIPKPWTSPEFEHELQQQMAEMVVSHRPEHKVSGELHKGTNYGKPYLLNGKSTVHARCAVSALSSSDIEADDVIVDRAVRDAVRTKLAEVGGNPKAFDKPENLPRLLAANGKAIPIRRVRIRQTKDPKNVATGSRERFVDSAGIHHAALFVVRDAARKETWISEVVQTTDVYDRARRRDKRPGRPKNPVYGVAVSRVSKEYPEAEFLFSLMKDDTVEMDFQGERAIFRVKKFYANGQIWFTSANNAQDDAEQKKQKTTWSKYPNTLRPLNPRKVVVDLLGKVHPAND

SEQ ID NO: 17227 - protein, 1124 aa, unidentified
  REGION 1..1124: note = Cas Enzyme sequence
MDFRKYTLGLDLGSASLGWALVELDDSDNPVRLMDAGVRIFDPGVVGGEAEIQKGRDKSKASERRSARQTRKQTYRRSLRQKKLFRLLQEHGLLPSEENSAQQKFSAQRHEILNTLDQKLTAAWRGKATLPGSSMDMADQSLVYLLRQNAVDRQLEPFELGRILYHFSQRRGYRSNRLDADNADDLGNADAVDATEPEETKKKAKAAKEPTEKTLGEVAKGISTLRSEMEAKGTRYLGSYFAMVNPHEKRIRHRWTERAMFEEEFTAIWNKQREFYSELLTDQLEKEVRYWLFFQRPLASSNHLIGFCELEKGERRAPWATLEAQRFRLLQKVNDLRVIERGMQNERRLKKEERERVLDHLETKGDLTFKALKELLAPVVIDGSNMVRGVKDKIESNRVNVHMLRVFGDRWNVLSREERQKAVEQWRTIESAETLKRVGIEQWQLDENAAARWGDTKLARPPKDYCNLSRLAISKVLPMMETGCPFKTVEREIYGNRFSGAEPMRLVPRVADYLPSITNPAVMRALTELRKVTNAIIREYGKPYQIRIELARELRRNRKDREKQFLDNKARQERREKGARWILAQQSKPTPSAQDVRDVPGHMVDKWLLAEECRWLCPYTGKSINYTSLFSYPEFEVEHIIPLSRCTDNSLTNKTLCHRDENQRKGNKTPWVAYHEDEDRWAQILKRVSQFTNGPRIGDHQKLRRFKLSSTEDIEGFTRRQLTDTRYTSKLASRLLMALYGGRDTTVSADDDTAEFFDKTGRRIFASTGGVTHLLRDAWVLHPDVVLNMPSMNDGEKRKGKDRSDHRHHAVDALVIALTTEQQVKAVSLHAASKQEKKWPLDYRDLVRGLKTPWNNRDQFLGDVFHRMLVSHKPEHKLGGKLHIDTIYPEPLRDPNDGKHYVSLRRSIVGITDKQIKAIQGDNIRMAVEQKLREHGGNSKKFDPDNLATLPVVKSRDGRLIPIKKVRVRESKSPESLMSFPGSRQVESESIHHFEFFARRDRKNREEWTHIPVSIIEAHVRYGRKNPVIAHAHPEDQNAEFVFSLMKGDTVEMDYNGSRDVFKVKKFYSSGQIWFTQINNAQKDEEQKKDKTAWSVNPNPLRLLNPQKVTIDPLGRKYGVNRAT

SEQ ID NO: 17228 - protein, 1161 aa, unidentified
  REGION 1..1161: note = Cas Enzyme sequence
MESTGKYILGLDLGSASIGWAVIQRDTNGDPCALLAAGSHIFDPGVEVPPAAGKLTQDEAIFRGMDASKAVGRRIARQQRRQIDRRAFRTKKLFKLLQTNSLLPAYADMKIDDLADERCKTFARLDKDLSDALCSTKRSTGDNGVMLEADQALPYVLRHQALERKLELHELGRALYHLCQRRGYRPSQVEETEDEGSTQTEKQTQRKGKKSDGKLGDDAKVDTSPKTVEAGISLLQQKMNAAHAPTLGAYFANFKNNDPHTERIRKRWTSRTMYIDEFKLIWDKQREFYPDLLTDDLRKSIYDCLFFQRPLASSDHLIGRCELEPGERRASWSTLEAQRFRLLQKVNDLAFIPGGADREQKLSREQQIALAAALEMKGDLTFAEIRKELRVPPNTEFNLQRGKKTRIEGNRVNRVMLQVFGDRWNTFAEQEKTAAVDMWAKASDLADRISDAMSHWNLDHASAQIWADQKPPKDYCKLSRKALRRLLEKMEQGMPYKTAELELYGNPLAGKEPEPFVPPVLKTLPSINNPPVVRALTELRKVVNAVIRAYGEKPYEIRIELARELRKNRKQRHDATEASEKNHARRIEAAKKILKECKNYNSPTNDPERLVRERRDDVTKMLLLMECKCLCPYTGDSIPYHALFGGEVEVEHIIPQSLMVDNDFGNLTLCYRSVNAEKLNNTPWKAFGEANEDRWAQIIERVKKFDNNAKLARFQLRSIEEIQRFSNRRLNDTRYTSKLAGRLLMTLYGGRDIQAPTSQEELDEFRDRAGRRAITVSSGMVTSLLRDAWLLNLNGLIGDDAFKCPAKSIDTDEESKTKKRTDGPKRKDRCDHRHHAVDAVVIALTSEKVIREINTLASRLYSQLNRPLNYRDLKSLQQPWPNFIDDNFRNVFRKMIISRRPEHKLSGALHDATFYGKCRGYDKKGDPIRHQRIAINKDLKEAKIEKIVDEGIKKAVIQFGRDIGGFSKWSAEKHGWPTLQNKKTKIPIAIKKVRVKITKNAKTLGKGRSERYVEEGEIAYASFFSVPDKKTRWESDIVTLFDATQRVRALRKADRGYEKVSRIHPDFPDAFFRFSLMKGDLVELLHDGKAGVFVVRSFESDGRIQVAPINAAGKHADLKQTGRLLRLGFTEFLKMGAFDDKVPRPVFVDLLGYPHYVKVHA

SEQ ID NO: 17229 - protein, 1080 aa, unidentified
  REGION 1..1080: note = Cas Enzyme sequence
MSASSVSCQKYVLGLDLGSASLGWAVVALNDANEPTHLIRTGVRIFEPGVEGTTADIAEGKDQSKAVDRRTARLHRRQLRRRAARQRDLFKLLQQQGFLPVQDEGSTSASEERHNILNDLDSRICAKWSANSDTDSFAQLPLYKLRKTALDEKLEPFEIGRILYHLSQRRGFKSNRRDTPKNADEEKEQGRVKTGISELQSAMEQSGARTLGEYLASLDPHKVGENVRRRWTSRSMYECEFNQIWEAQIAYYPESLTPALQKQIGLLLFFQRPIAAQGHLIGKCELEPNERRASWATLEAQRFRILQKVNDLQIIYPGNPISQPLTSPEREFVFNLLDSEGDQTFANIRKHLQLDKKSVFNLERGDEKRLRGNRTNVVMRQAFAERWGAFSEEERKQIVEEWRTSESDEWLAKRGVDHWGLGPEIAATWSTKHPENGYCALSRKAIARLMPLMSEGVSFKTAETQLYGDRFSGATALDQLPVVKQYLTTLRNPAVERALTEMRKVVNAIVREYGKPYEIRIELARELKKPRQERVSATKANRKRQKEREDIMQRILQECGIPKERQSRKDIEKALLHVECGGMCPYTGRSIRFSDLFHDSQFDVEHIIPRSRYPDDSFQNKTLCYLPDNRERKRNKTPFEAYGSNEQEWAEILERVRKFGNAGKLKRFMLETLKDIEDFSARQMNDTRYASVLAGRLLGTLYGGRDVQGDVGMRQAVFVSSGAVTATLRRSWGLEAILHDLVPDTSGQGKGKPRTDHRHHAIDAIVIALTRQGMIQQMARAASTEPWQDGERTWRKIESPWRDFVDSIRPHIAELVVSHRPEHKMSGELHKGTNYSVPHLHKGKLTVHTRCALSALCAADIAAEDVIVDVAVRDAIRKKLDELGGSPKLFEKVENTPYLAARDGRQIPIRKVRIRETKNALQIGHGATARLVASGGIHHVAMFVTRDKKRCEVWKSNVVQITDIYQKLPRHDRRKGRPKSPSQGPVVFRGFPDDPDAQFVFSLMKDDTVALDVNGQARIFRVKKFSDNGQIWFVPANDAHDNATQMKSGITWSKKPNTLKELHPRKVVVDLLGKVHTAND

SEQ ID NO: 17230 - protein, 1090 aa, unidentified
  REGION 1..1090: note = Cas Enzyme sequence
MSPAMESSQKYVLGLDLGSASLGWAMIALDPVNDPIGIIRTGVRIFEPGVDGTSLDIEQGKDQSKAVDRRTARLHRRQLRRRVARQRELFQELQKAGLLPVSEIGTSASSEQRHQLLNDLDQELARKFALSVDDSTFAQMPLYLLRKRALDHPLGPYELGRVLFHLIQRRGFKSNRKETKKSPKETEDQGQVKDAIHSLELEMRAAGARTLGEFFAGLNPHDSKQKVRRRWTARWMFENEFKEMWDKQAPYHPSILTPELHDRVAHLLFYYRPISAQKHLIGTCELERGDATHPPQRRASWASMAAQRFRILDKINNLRIINPVTDSARKLTEEEHAKLYSFLDREGTQKFAKIRSHLGLGKEISFNLERGGDKDLPGNRTQQSMLKVFGPRWYEFADGKQNQIIENWCNHDDDALTQEAANLGLDAECAALLVKENPQADYCRFSLKAIRKLMPGLMKGLSTTEAQIEVYGNPLAGLTVHDKLPQIREVLPTLRNPAVERAMTELRKVVNAIVREHGKPHEIRIELARELKKPRSERQKETDRAKKRERERTEIVKRILLECGNANPSRSDIEKGLLHRECGGICPYTGKSISFRGLYTDSEFDIEHIIPRSRFPANSFQNKTLCHQSMNQLKGNRTPYEMYRGNPEEYEKVLDRIRAWPIKNRGKLDRFRVGEPGVKEDNTLEGFSSRQLNDTRYTSKAAAKLLATLYGGLIRETSAGNEQAVFATSGAITATLRSTWGLEEILRELVPPQPGDDRGKPRTDHRHHAIDAIAIAATRQSVIQAMARDSALAIDPRTRPKVLQPWKDFVPSIRPHIEQLLVSHRPEHKLSGELHDETNYGRPYQENKKTMVHVRKRVSGLSPKDIPNIVDPEIRHAVMQKAEELGGDLTVCDLKETWPVLPTRNGATIPIKKVRLKKVLDVTPVGNDTRRRYVAESSNHHIAIYSQVDAHGKEKRWEGVIVSLLEAYQRVSAAKRTEAYKQRRRVTPIIQRSLPGAEDHQFRFSLMGGDTVELHRACDHAASICAPDTYRIRTIAASGQLSLVKITDARMKKDIIATKDWWQPGVDALRKLGCRKVVIDLQGRKRYAND

SEQ ID NO: 17231 - protein, 958 aa, unidentified
  REGION 1..958: note = Cas Enzyme sequence
GRALYHLGQRRGFKSSRREGRSGLSSADAKEQAKESSEIKSSINDLEAALASSGLTLGQHLSLINPHESAIRNRKRSDMKPIWTGRKMYQEEFERIWASQRIHYPTVLTDVLKPRIERLMFRQRAITAGKPGNCELERNPPLPRAPRSSLLSQHFRVVQAVNNLKIVDYPSPDRRLTPSERQELIATLSTIITEIKGKKRKSDLFGLRFPDVKQRLKLPKRAKLNLDDEDTESYLRGNRTNAIMARAFGADRWNALEELEKRRIVRKWMTEQSPEKLLQIAITQWNLAEQAAEQLASIEAEDGYAALSHVAMLKLLPSMEQDGLPYSEAIAKVYKNSFSGNHVHEYLPAVESVLPRIPNPVVKRALSEMRKVVNAIIRKHGRPAQIRIELARSLKRNAEQRGRDQENIKARTRERASAKSWIEERGQRATGDAIEKVLLYRRCKDCPYCTKPLGPCEVLFSESSAIQVEHVLPRRCMDNSFSNKVLAHRACNLQKADRTPFQAFGSAPEWDAILTLVVSLKDKGLLDRFLISKEEQLQEFTKRHLSDTRYISKLAAQFVEQLYGGRDAAVPWEDRNRRCVYASSGGLTAEMRKRWGLNSVLKEPGTVQNLSDGKSRTDHRHHAIDAIVIALTTESMIQQAAFESQRHDRTLGYSQPRFFSPPWPKVGDREEQIAAFQREVRQIAKGIKVSHRVENGLNGQLHDETFYSPKKSDSNFVYSSTFVHELTKSHIKNLDTIIRDKNIRDAIQKQLEKVGGDPKKLETDLPCLVKGDKRIPIRKVRIAVPGSKAIAVRQGEDEPSIFTAKNHHVVIFQQIDPLKGPYWYTPGPVTRLEAMQKRAEAKRKKLNQPYQIVEKTDGPSSEYIMHLMKGDAVEMLDHVNDMRDIYILTSMSDGDYAFLRHSTAIPSAKAVGLSLGQMRRQLHDRGDRVRVRMNLDKLREWDCKKVVLDPLGKVIYLT

SEQ ID NO: 17232 - protein, 1124 aa, unidentified
  REGION 1..1124: note = Cas Enzyme sequence
MNLRKYTLGLDLGSASLGWALVELDDNDNPVRLKDAGVRIFDPGVVGGEAEIQKGRDKSKASERRLARQTRKQTHRRSLRQKKLFRLLQEHGLLPSAENRAQQKFSIQRHEILNALDQKLTAAWRGKATLPGSSMDMADQSLVYLLRQNAVDRQLEPFELGRILYHFSQRRGYRSNRLDADNADDLGNADAADATEPEETKKKAKAAKEPTEKTLGEVAKGISTLRSEMEAKGTRYLGSYFAMVNPHEKRIRHRWTERAMFEEEFTAIWNKQREFYSELLTDQLEKEVRYWLFFQRPLASSNHLIGFCELEKGERRAPWATLEAQRFRLLQKINDLRVIERGMQNERRLKKEERERVLDHLETKGDLTFKALKELLAPVVIDGSNMERGVKDKIESNRVNVHMLRVFGDRWNVLSREERQKAVEQWRTIESAETLKRVGVEQWQLDENAAARWGDTKLARPPKDYCNLSRLAISKVLPMMETGCPFKTVEREIYGNRFSGAEPMRLVPRVADYLPSITNPAVMRALTELRKVTNAIVREYGKPYQIRIELARELRRNRKDREKQFLDNKARQERREKGARWILAQQSKPTPSAQDVRDVPGHMVDKWLLAEECRWLCPYTGKSINYTSLFSYPEFEVEHIIPLSRCTDNSLTNKTLCHRDENQRKGNKTPWVAYHEDEDRWAQILKRVSQFTNGPRIGDHQKLRRFKLSSTEDIEGFTRRQLTDTRYTSKLASRLLMALYGGRDTTVSADDDTAEFFDKTGRRIFASTGGVTHLLRDAWVLHPDVVLNMPSMNDGERRKGKDRSDHRHHAVDALVIALTTEQQVKAVSLHAASKQEKKWPLDYRDLVRGLKTPWNNRDQFLGDVFHRMLVSHKPEHKLGGKLHIDTIYPEPLRDPNDGKHYVSLRRSIVGITDKQIKAIQGDNIRMAVEQKLQEHCGNSKKFDPDNLATLPVVKSRDGRLIPIKKVHVRESKSPESLMSFPGSRQVESESIHHFEFFARRDRKNREEWTHIPVSIIEAHVRYGRKNPVIAHAHPEDQNAEFVFSLMKGDTVEMDYNGSRDVFKVKKFYSSGQIWFTQINNAQKDEEQKKDKTAWSVNPNPLRLLNPQKVTIDPLGRKYGVNRAT

SEQ ID NO: 17233 - protein, 1064 aa, unidentified
  REGION 1..1064: note = Cas Enzyme sequence
MSSTLETAQKYVLGLDLGSASLGWALIALDDADDPVSLIRAGVRIFEPGVDGTSMEIEQGKDQSKAVERRTARLHRRQLRRRAARHRDLFRLLQRHSLLPTPEGVIGSPEEQRHLILNTLDQQLTDKWQSAFPINRFAELPLYFLRKAALDQPLEAREIGRILFHLIQRRGFLSNRRENKQNPDQKKELGQVKAEIHSLEQEIQNAGARTLGEFFAGLDPHAQRVRRRWTARRMFQDEFERIWAIQANHHPNLLTAELHDKIAHLLFFQRPIAAQTHLIGKCQLEPGKQRGPWAAMEAQRFRILQKVNDLRLINPGSLISNSLTGEERQRLYELLDREGDQTFKAIRKYLSFPPEVQFNLEKGDEKRLRGNRTQAVMRKVFGDRWDTIGGGKQHQIIENWRNSESEEVLIREAIEQWSLDGAAAALLSEQTPEPGYCAVSLVALSKLLPLMACGKSFKEAETELYGARFSGGIVFETLPEVRKQLDSLRNPAVERSLTELRKVVNAIVREYGKPQEIRIELARELKKPRQERIEATKRNRNRQREREDVAGRILLECGLSNPSRKDIEKARLHEECGGYCPYTGRHIPFSNLFDNSEFDVEHIIPRSRYPDDSFQNKTLCYLPENRDVKKGQTPWEAYGKDEQRWAEIMTRVSSWKNRGKMARFSIQTEEALGEFSARQMNDTRYASVLASRFLGALYGGRDVVEGEKVRQAIFASSGAVTATLRSSWGLEAILHEIVRAEPGESRGKPRTDHRHHAIDAITIALSRPKVIQSMALAASREPWQRDSRAWRKIESPWRDFVPSIRPHIEQMLVSHRPEHKLSGELHKGTNYSAPRNYKGKPTVHTRCLLSALSAADIADDEVIVDPAVRDAVRRKLEDLAGNPKLFDRAENAPCLRARDGRFIPIRKVRIRETKNPLKVGQSIRERFVASGGIHHIALFVARDERRREKWDSCVVQITEAYERCRRKLPVVSQELVNVAGAEFIFSMMKDDTIEITDASGAKILRVKKFGDNKQVWFVPVNDAHDDAQQKKLGITWSRTPNSLKELRPRKVVIDLLGKVHPAND

SEQ ID NO: 17234 - protein, 1106 aa, unidentified
  REGION 1..1106: note = Cas Enzyme sequence
MSAAMDSSQKYVLGLDLGSASLGWAMIALNDSGQPTSLLHTGVRIFEPGVEGTSTDIQEGKDQSKAVDRRTARLHRRQLRRRAARQRELFHTLQRAGLLPVGESGAKATQLERQAILNELDRALLTKFASVFTSEADPASFAQMPLYHLRKRALDHQLEPFEFGRVLFHLIQRRGFKSNRKETKKSAKENEDQGEVKAALHSLELEMQAAGARTLGEYLAGLNPHNPTNDPKLRVRRRWTARWMFEKEFALIWEKQFQYQPSLLTSELRTGIAHLLFFYRPIAAQKHLIGTCELERGDDTHPPERRAPWASLAAQRFRILQKVNDLKVIHPDSDIATPLSPEDRMKLYHFLDTEGTQTFAKIRKHLGIAGGRFFNFEKSDRNKDGDKTLLGNRTQHSMLKVFGRFWYEFTEGKQNQIIENWRNSESDDSLMEEAIQHLGLTAEEAQILVNEKAASDYCALSLKAIHRLMPLMLEGVSFKTAETAIYGDRFSGLTVHETVPEMRKVLPTLRNPAVERALTELRKVVNALVRQHGKPHEIRIELARELKKPRGERVKETDKIRKREKERSTVAKKILEQFNISNPGRALIEKALLYEECGGICPYTGISIRYSSLVNDSEFDIEHIIPRSRFPDNSFQNKTLCHQSMNQLKGGRTPYEMHKGNPEEYEKLLDRVRAWPIKNRGKLDRFRVGEPGVKEDNSLEGFSQRQLNDTRYTSVSAAKLLATLYGGRERINPDGSKEQAVYATSGSITAALRNTWGLEEILRELVPTQPGDTRGKPRIDHRHHAIDAITIAATRPAVIAAMARDSSRSIDPRTRPKIEQPWKNFIDSIRPHIEQLLVSHRPEHKLSGELHDETNYGRPYQQNQKTLVHIRKRVPGLSPKDIANIVDPVVRSAVERKAAELGGDLAACELKNDWPVLSARSGSSIPIKKVRLKKVLDVTPVGNDIRRRYVAESSNHHVAVYAQINAAGKEKRWDGVIVSLLEAYQRISESKRSEAYKKHRRGIPIIQRSIPGAVDLQFRFSLMGGDTVELHRNCDHAKDVCKPEIYRVRTIAASGQLSLAKITDARMKKDIIAAGDWWQPRVDALRKLGCRKVVIDLKGVRRYAND

SEQ ID NO: 17235 - protein, 903 aa, unidentified
  REGION 1..903: note = Cas Enzyme sequence
GYRSNRIDLAGDKKDEERGKVEPAIAGLRMEMAQGDTRTLGQHFSRQAPAEKRIRQRYTARDMYEHEFEAIWNAQQGHYAEELTTERKRQLHKAIFFQRPLRSSRHLVGFCELEKGKRRAAAALLISQEFRLLQKVNDLRVGLPGEAERELTAAERQALIERLQSEGDQKFSAIRKLLRMPAKERFNLERGGETKLPGNQTNAALRKELGARWDAMRGEERDKVVAYLRSFQKQEKLAAALARKFGFDEETAKRVAEISLEPGYMSFSQAALKKLLPLMREGRALAEARKELYPEKSAEARDVLPPVVMAGKELGSIKNPAVVRALTELRKVVNAIIRTYGRPAEIRIELARDLRNSRVQRERMAKSYRENEKQRSEAAKRILKETGNAHPSRDDIQRALLWEECGGICPYTGKAIPFHALFGRDAAFDVEHILPLSRSLDSSFANLTLCDAEHNRHVKRKQAPWEAYSGDAAAYEAILDRVKRFQGGYAEEKLRRFRMTTEEIATFLEDFTERQLNDTRYATRVAADYLGLLYGGRVDGEGKRRVKTTAGQVTAILRNEWKLNEILNDGPTANGGEKAKTRDDHRHHAIDAIVTALTDDGSIQALSRAAENAAEFRRRRFAPVAEPWPNFLEDVQKEIQRMVVSHREHRRARGALHEETIYSHPIGRGGEQRGKRGKGRSEEFRVRKPLSSLKATEVGRIADDAVRKLVGAKLEGFPGQEPSRVFSNAENLPYFETKDGLRIPIKKARLRTDLKHPVVLGSGGAARHVKSEANHHAEVFAEVNERGQVTGWDCEVVSLLEAVRKKQAREPIVRKEGSEGREFLFSLAPGDILEMDGQGGTRELAVIRAISQEPRIAYVSVRDARKKSEMEAAYVRKTPNALFKLNARKVRVSPLGDVSEAHD

SEQ ID NO: 17236 - protein, 1025 aa, unidentified
  REGION 1..1025: note = Cas Enzyme sequence
EGNIESGREESRNVARRSARLQRRQTWRRSRRNLRVFRLLQTWGLLPVGASKTSQERHDLLDLLDLRILGSDWFQRKRIDNSIPEPMQVLPYLLRASALDEPLEPHFLGRALYHLAQRRGFLSNRKVSSRSKADDDSGLVKPAIADLRKQMLETGSRTLGEFFSRTSPSQARIRSRWTGRDMYEGEFTFIWDSQTVHHPTILTPERKKLLHKAIFFQRPLSSARHLIGTCELEPKHRRAPRSLLVSQRFRLLQRVNDLQIVLPGQPTRDLAPEERADVLNSLERKGDLTFPAIRKLLHLPKEAKFNLEAAGETRILGNRTNAFFLRLFGDRWDKMPSEERDQIVDYVRSFQRLDKLPTAAAKKWGLSEESAQILESDPLEPDYLNLSKAAMCKLLPLMEEGVPYAEARRQVYPQRFVSQAPQELLPPVFLAEASVGRIRNPSVVRSLTELRKVVNAVVRKFGKPKQIRIELARDLRNSRAQRERMAKSNRENEKLRADAAKRILKEIGNPGPSRRDLQKAQLWDECHGECPYTGKVISFASLFGPEPQFDIEHIIPFSRSLDNSFTNLTLCHAEHNRNVKQNRAPSEAYGSDPDTYQAILNRVRKFSSRSATEKLRRFLMTPEEIQNFVSDFAESQLNDTRYASRLASDYLGLLYGGRVDADHKLRIRATVGRITAILRDEWKLNAILNDGSTSQGGLTLKSRDDHRHHAIDAIVTALTDEGTIQTLSRAAENAYLAKRRRFAPIEEPWQGFFEDVRNEISRIVVSHRTSGRVRGPLHEQTLYSHPIPVAAGASGQKKPGKPGFEHRVRKPLESMTTEEAANIGDPVVRSLVAEKLAQFGGAVPKTVFSVPANLPVFQASDGRRIPIIRVRVRKPLTATVLGSGPSTRYVVPESNHHAEIFAELDQKGKEIEWDIFIVSLAEAIRRKHSRESVVSKNHGAQETFKFSVAPGDVIEMDVASGRRQYFVVRGTSYPSVSLAPIADARQKKELVKDHAYLRMVPNSLRKKNARKIHVTPLGDVEEAHD

SEQ ID NO: 17237 - protein, 1058 aa, unidentified
  REGION 1..1058: note = Cas Enzyme sequence
LDIGIASCGWAVINQEKERIEDLGVRIFDKAENPKDGKSLAAPRRDARSTRRTLRRKKHRMQRIKVLLVKHGLLSKTELDHLYESATEVDVWNLRLDALERKLYPKEFARILIHLAKRRGFKSNRKETTLSENGQILESISENQQIMEKQNYRTVGEMILKDKKFENHKRNKNGTYVGTVTRQQLQDEIQMIFHAQRLYKNDYATEEFESSYLEIWASQRPYASKDQIEKMIGYCTLEPKEKRAPKASWSFQYFVALQTINNLRLISKDRIEELSFEEKKQIMNLALEKSIVKYIDIRKLLSVPNEFQFNSLSYSADTVDTAVESRKCIELKEYHSINKVYKQIYGENALNLLPKYYDTIAYGLTIFKDDKDILEYLQNKYVNAKGKPISNFANKTYDDTFIQALLNLNFTKMGHLSFKALKNIIPFLEEGLSYDKACEKAGYNFKGTSYTEQTKYLPVIPQNTNPVVHRALSQTRKVINAIIKKYGSPNAIHIETARELSKTFQERKEIDSMYQDNSKKNEHAIHKLKELGNINPSGINIVKFKLWNEQDGRCMYSGKYIEPHRLFEEGYTEVDHILPYSRSLDDSYNNKTLTLGTENQRKGNKIPYEYMGNTSIWNDFETRVQSNKKINKKKQQKLLLQHFSYAREQEFIERNLNDTRYATIYLSSLIQQHLIFSESSRKKKVHTVSGIITSHLRSRWGFNKDRKEGHIHHALDAVIVAVTSDHMIQRVTKYYKLKELNRNLQAKRMPFPEPWEGFRLELEARISPNTQQYLKGLRFKNYADVNLSEIKSIFVSRMPKHSITGELHQETIRKFIGYNEKGKVLTAIKTKLEDIPFDANGDFPMYGKESDLYTYNAIKERYLSHKKDKRKSFQEPLYKPTKSGGIGPLIKSIKIMDTRTIVNPVNQGKGVVYNSKIARTDVFKKEEKYYLIPIYTIDLMKNILPQKAITAGKGYEDWTTIDPSFTFLFSLFPNDLIQIVPSKNKTIKARTTVSKKEVLLPSLTGYFKGVHSGTAGITVETHDGSVIANVGSKQLLLIEKYQVDVLGNYTKIKEEKRI

SEQ ID NO: 17238 - protein, 1056 aa, unidentified
  REGION 1..1056: note = Cas Enzyme sequence
MKKQSYILGLDIGTNSIGWAIIHNSNEPDDVSNKLVIGSRVFESVLDKTEIEKGQGQTKNVDRRNARQLRKQLDRRRRRKARIFSTLQQSQLLPDGNAEKVLPELDAEFRSKYFINKKIPAIEHTLSYYLRARALDERLELFELGRALYHLAQRRGFLSNRKNASNAEEDSGIKGEIHNLNENLKAENARTLGEYFSRIDPEIERIRQRHTSRQMYINEFELIWEKQSEYYPEVLTDDLKKRLSNDIFYQRPLRSVKHLIGQCSLEPKEKRAPYSCYEAQLFRTLSQVNNSSVLYGQTGEILELTAEHRKILLNELAKGDLSFSKAKQVLKLKRTDKFNYELGGEKRFIGNRIQETIMSVFGEEWFGMSEKQQLAIIEDIKSFEDKAALRKRGMKTWGLGKEQAEEFSDLVLEEGYCSLSRKAIQKMLPDMVGGMTYAEARKKHYPESFDAKQGYSVLPSVTSALSNLRNPVVERTLNELRKIVNSVIAEHGKPEAIRIELARDLRNSQKKRQEMSKTMDSRRKKREAVAKRIIEEAGIARPKRSDIERALLAEECGWTCPYTGKKISMTALFRDSAFDVEHIIPFSRCLDDSFANKTLCYHEENRNIKRNRTPYEAYHSSPDKWEDILKRVNDFEKEGGRNPKLQRFKMESIDDLEDFSQKQLVDTRYASRLAMEYLGLLYGGQSDQLNKRRIYAGNGRVTAFLRGLWGLNRILGDKEQKQRDDHRHHAIDAVVTALLSPRLIQQMSHSAEYAEGDPQAVWKRLFSKLEMPWDGFYDDVKEKVDDLTCSHRLRRKASGALHEETLYSNEKQSPDGSLHTHVRKRIDSLSVKDVGLIADARIRKVVQDKLTELGQTEPAKAFADPANHPVLHTPGRRIKETPIHKVRLRLNQKPIQIGKDKSTRNILPGNNHHIELYEVLDKEGQVTKWEGKVVSLLETRQRISNNLPIVERDHGKNTRFLFSLCGGDCILLKKANGSEQPYIIRGITQRSSGSVELSFVGINDARLKKEIENDDKARKLKGENKGFRTASPNALKDIGCRKILVTPLGQIRWAND

SEQ ID NO: 17239 - protein, 1161 aa, unidentified
  REGION 1..1161: note = Cas Enzyme sequence
MGEMSKTNMDRHRSYRIGLDIGIASVGWAVLENNSQDEPIRILDLGVRIFEAAEVPKTGAALAAERRDARTARRRIRRRRHRLERIKWLFEREGLIQIDSFMERYHSPNLPDVYELRYEGLERKLSNEEFAQVLLHIAKHRGFRSTRKAELKEGDNGKVLKATEENRERMEEHGYRTVGEMIYKDAYFHTECAWADNGYLLTPRNKADDYSHTMLRALLEEEVHILFDSQRKFGNEKATEKLEQEYLEIMLSQRSFDMGPGQQADGTPSPYAMEGFGNKVGYCTLERESGERRAAKATYTAELFVALQKITHMKLVHMDGTSRFFTEEERNILLEMLSSKKEIKYAAVRKKLNLPLEEKFNTLNYNMKRKGKDNEEEGMDEAAIIAATEKATFISMSNCYEYRKRIGDYLDTLPEEEQQDLLDEIGTILTCYKNDDSRMNRLTEAGLSKELADSLLELTPAKFQHLSIKAMKNIMPYMKEGMVYDKACEAAGYDFKNDNHGKKMKLLKGENITEIINEITNPVVKRSVSQTVKVINAIILKYGSPQAVSIELAREMSKNFEERRKAEKQMEENRKKNEMAKKEIQELGKLSPNGQDILKYRLWHDQQGICLYTGKKIPLEELFQPGYDIDHILPYSITFDDSYRNKVLVTSQANREKGNRTPYEYFGQDEVRWSAYEARVNHFIKDYKKRRNLLKQGFTKEDRREFKERNLNDTKYITRVIYNMIRQNLEMEPLNREDRKKQVFAVNGSITSYLRKRWGLPTKDRSTDTHHAMDAVVVACCTDGMIQKISRSTQYREVLYKGQSHPDYEIVDVETGEIISLEELSREEWDKCYGAQVPPPWNHFREELKVRMGSDPKNDLDTHPDMYQLFRYPEDVYNNIRPIFVSRMPNHKVTGAAHADTIRSPRHYNDGGEIFDDSGYVLSRTNIEDLKLDKDGEIKDYYNKDSDRLLYEALKARLAEYEGDGKKAFAEKFYKPKADGTQGPVVKKVKTYKKMSLGVEINKDEAGVGRGIAENANGGMIRVDVFRENGKYYFVPIYIADALKKRLPNKASVANKPYSEWKEMKDENFLFSLYSRDLIGFKNPKGKKVKCKDGKEIVLTNEIVYYVGANINTASISCKAHDNQYEFGSFGIQSLQELKKYQVDVLGNITEVRQEKRRGFH

SEQ ID NO: 17240 - protein, 1004 aa, unidentified
  REGION 1..1004: note = Cas Enzyme sequence
MKKILGLDIGIASVGYSVINYDDEKFEGKILNAGVRVFDACEVSKTKESLNAKRRELRGVRRRLSRRASRLKAIRQLFIANDYLKEEEINNMFHCAENRVDVWDLRKMALGRLLTIKEFYRILHQIAKRRGFKSIRKSEEAKREGNLLKNISKNTQEFENSDFMTIGEMFATIYVDKAKRNKQDDYKNSIPRELLLKEVKTIFKIQRKFGANFANEDFEKKYIDIAFYQRPLQSMKGMIGKCQFEPNEKRAPKAAYTSEIFVAAQKLVNTKLITSNSDELTLNEEQIHLIMELAHKNSKVTYKQVRKLLNLEEGIIFKTLQYGKIEKDKKTGEEKEINPEENTLIELKKYQEFRNAIKKNLGEEYFEKIKYNKELFNNIAEVLTYEKSDEAITKELLKKEVSQEIIDCILNISASKVMHLSIKAMDKIIPYLLQGLKYSDACSEAGYDFKNSKNSKNLNYLPVLTKEELTTNPVVNRSISQTRKVVNALLRLHGKFDSIIIETARDLGKSVEERNKIKSGQDNFQKEKELAKQRCIENGVNPDSKNNLLRFRLWEEQGGYCPYSKKPIDIKRLSEPNYTDIDHIIPYSRCFDDSLNNKVLCLSDENRMKGNKIPYEYLCGKYDWYEYSAWIRELHLRSAKENRLLRKTYSSEDNNNFSSRNLNDTRYITIFIKDYIKDNLDTKVETRNGSLTAYLRKQWQITKDRDENDRHHAIDATVLACSTQGMVKYVSTISAKRENYDFINHSKPKFKKPWETFNEDLDKAINEIFVSRAPKNKIPGALHDATIRSSKHLDEGFTTLKTPIKNIKLKDLENMLDKNRNIEVYKILKERLEEFNDDPKKAFAEPVYMKLSEVKKEAGIKPHEIKSIKIKTTGTSGMEVQNGIANNTSMPRVDVFSKKNKKGKDEFYLVPIYVSDFAKGILPNKAIVAHKPESEWIIIDETFNFKFSLFNDTLISFNKTNNPEDETICYYCSTHRALGGIIIEAVDNNKTLKGVEVGVKSLYS

SEQ ID NO: 17241 - protein, 1105 aa, unidentified
  REGION 1..1105: note = Cas Enzyme sequence
MGIKIGLDVGITSVGYAVLRTDDEGVPYKIETLNSVIFPAAENPKSGDSLAAPRRGNRGSRRRTRRTKFRKYRTKRLFIRHGLLTAEEIEDIFNQKLGHKTIYELRTEALDRKLTNEELFRILYFFAGHRGFKSNRKAEKAEDDIGIVLSAISEIKTALEEGTYRTLGEYMHAHPKYEEHKRNKDGKDRYLGTAQRDFIIDEIKQIVNAQRGFGNEALTETFEQEFIGNGEGEAAGIFTAQRDFDEGPGKGSPYGGDQIEKMIGWCTFEKEEHRAAKGTYTFQYFELLSKLNNLKIQEFAGDDWKELNPNQRQFIIDKAFSKDKLQYAEIKKLLKLEPEAKFNLLSYGSKTEQDKTEKTNFVALSSYDKVRKALGKEVYEAMPNSLKDEIGTILTTYSSDKSRRRVFADRLSLTSEQVEALLPLTMTQYGHLSLKAMRNIIPYLEMGLTYDKAAESAGYDFKHNAIDRAFIHENVSNPVVKRAVSQCIKVVSQLTREYGKPDAINIEFSRELGKNFEERRKIEKNQKENMARNESIANELRENGIAVNGENITRLKLWREQGNMDPYTGKEIQYGDVFYGHYDVDHIIPYSISFDDSFGNKVLVSSAANREKGNRIPMEYLANDPVGIQNLEKIAGTIRNYNKREKLLKKKLSPEDVDGWKSRNINDTRYIARLLRNYFRQNIEFSEKENIKEKVAVNNGTVTARMRARWGLGPKHRDNDRHHAMDAVVVACMTPAFVRRVTAYSKRQEVRYNKSLWNADTLESDLAHMSIEKREEYEKMFSKSFPQPWEGFRDELNARLSDSPKELIKNIRNTLGTYADEEIEKLKPMFVVRRPNKKITGPAHLETIRSGKLLTEGKSLSRVSISKLKLNKNGEIGTGNAEFYKSEDNGWMPVYNALKAEMEQNGGSGEKAFPDGVFTYTQENGQTHTVRKVKVIQKSTLQAVLNDGKAMADNGSMVRIDVFRTPKKYVFVPVYVKDTVAKELPEKYCVQGKNYVDWPEISDEDQFVFSLYQNDVVRVDHKSGMPLTYSGENIGVEKMENLIGYYSSANIALGCITIRSNDSSFSAVNVGIATLRSLEKMQVDYLGNLSKVKEKTRQTFSNMKR

SEQ ID NO: 17242 - protein, 1009 aa, unidentified
  REGION 1..1009: note = Cas Enzyme sequence
MKYGILSRDELEHLYDVPGEDIYKIRVEALDRALDDHEFARLLIHLAQRRGFRSNRRVDAKDTDEGKLLSAVNENARLMKERGYRTVGEMLYKDPKFSTVKRNKEESYSNTVSRSQMEDEVRRIFEAQRKCGNQKASEELEKEYLDIYLSQRSFEEGPGGNAGDYCPYSGNQIEKMVGHCTFEPDEKRAVKASYTFERANLLQNINKMQLIDENGEMYPLNEEQRHALVERAHQTASLDYSKIRKTLNLKETERFAYVDYNQKSTFENAEKKQKFEYLKHYHELRKALNSVEKDLIQKCPVQVRDEIGTILTYYKTDLKIRAALDKIEDPFLTEEVKDAVMGMSGCSGVGSLSLKALNNIMPYLEQGMMYDKAAEAAGYSFRGHDRYNKGMYLPNLSEDDDIRNPVVRRAVSQTIKVVNAIIKKYGKPVAINVELARETARTFEDRQKILKQQKKNREANQKTKRLLQEEFHLLSPSHLDILKDRLFKEQDGICLYSGEKIDRTRLFEDGYVQIDHIVPYSISWDDSYSNKVLVMTRENQQKGNRLPMEYLNGKKQDEFCVRVERQIRDLRKKTNLLMKSIPADKKESFKDRNLNDTKYICRFMLNYLNDHLLFDQSVDMGKRVTALNGSVTAYLRKRWGLNKVRGNGDKHHALDAVVIGCINNSLIMRVTQYFKYRENFLFEPEQHVQKKAEVPSPWPNFREEVEFRMADNPKAFYDRLSTKISLTNYSEEELEQVKPIFVSRMKVKKKTGSANDATIRGLKVLEDGQMVAISKVPLSTLRLDKNGEIKSYYHKEDDRLLYNALKERLEEYGGNGEKAFTEPFYKPKANGEQGPLVRKVKVAEKITNGVVLNHGEGIASNGSMLRADFYRKNGKYYAVPVYVKDMVNDHLPDRAVTLKHPYDQWDKMDDNDFLFSLYPNDVVYIRFNKPKNGKVVNEDSTLNKNESFDEIYGYYKALGIATNSITVITNDNSYRLDSIGIKTLPEIKKCAVDVLGNLIPVARETRKHR

SEQ ID NO: 17243 - protein, 998 aa, unidentified
  REGION 1..998: note = Cas Enzyme sequence
VAPPTQADKALQSAPALDLLPPAPSISEHLPNGHRRPITPEQRQDLLNQLDRRILSSAWFQTKVNSGAFPEPEHTMPYILRAAALDEPLEPHMFGRALYHLGQRRGFLSNRKQAPKKNDDEGAVKEGIAELRKAMQTSGARTLGEYFSRLNPSTERIRCRWTARDMYEKEFNAIWDAQAPHHADLLTPERKKQIYDAIFFQRPLWLDPGTVGNCELEPGEKRAPAYLLVSQRFRLLQTVNNLRVLPPDDVDMPLTPTDRKKLVDALEMKGDLTFKEISKLLKLEKGYKFNLESGGEKRIKGNRTNADFYAVFGERWLAMSPEERDRAVEYVHSFQKAEKLKDAARKKYDLTEEQAEQLAGISLEADYINLSRKAIEKFLPLLEEGVTYGEARKKLYPESFEAREAMPLLPPVETALAQIRNPAVMRSLTELRKVVNALVRRYGKPSCVHLELARDLKKSKKQRQAISENNRRNESARAKAAEAIIKADVGISAPSPDDIRKVLLAEECHWTCPYTGRSISMRSLLGPEPQFDIEHIVPFSRSMDNSFQNLTLCYVPENRSVKGNRTPWQAYHGDPERYQAILDRVRKFAGDRQTVAAKLRRFTMTDDELEGFLEDFRNRQLNDTAYATSLAAKYLGLLYGGVNDADGRKRVQATSGQATAYFRSLWKLNSILNDGPTSDGGAVPKSRDDHRHHAVDAVVIGLTDAAMIKRLSDAAQRAQLEHRRRFASLEAPWPNFVDSVRTEIDRIIVSHRVSKKVSGALHEETIYSRPMGKDGEVRVRKPLDSLSRPEVEKIADEGVRKLVQQKLEQLGGIEPKKAFPNPENLPRFPSSGVVIKNVRITKPLPIFTLSEGRRARHVTSESNHHVEIYAELDEHGNEKKWGGEVVSMAEAYQRLKTGKPIVQRDHGPLVKFKFSLAPGEVVECEGKDGMRGLFVMRKASQLTSGQLQIGFAPLADARKAREIQTSRAWLWASPNTLGERNPRKVVVSPIGEVTETHD

SEQ ID NO: 17244 - protein, 1079 aa, unidentified
  REGION 1..1079: note = Cas Enzyme sequence
METRASPDYVLGIDLGSNSLGWAMIGLEDGQPAKLLRAGVRVFEAGMEGDIESGQEESRNLKRREARLHRRQLWRRARRLRRVFNLLQRFGLLPPGEGSLPEKRQDFLNELDKTILSSPWFAAKKISGVYPEPEQTLPYILRAAALDERLEPHFLGRALYHLAQRRGFLSTRKKAKAAKEEEEGVVKQGISDLRRKMEEAKARTLGEFFARIPPSEERIRGRWTARPMYEEEFQQIWNAQAEFHGELPTDERKKLLFQAIFYQRPLKDQPELIGHCELEPEERRAAAYLVTSQRFRLLQTVNNLTILPPGEPEKKLTPADRAKLIEALELHGDQTFPHIRKLLGLTRNYGFNLERGGEKSIKGNRTNSDFYAVFGERWSRMSPEERQRAILDVRSIQKPETLLRRAREYWKLDEEAAQRFCDISLEPDYLNLSRRAMEKLLPLLEDGITYGEARRLLYPERFQAVEPLPLLPPVQDALTEIRNPAVTRCLTELRKVTNAIVRQYGKPGEIHIELTRDLKQPKKRRQDRADRMRANEKARKAAAKRIVEEAGISDPSPDDIRKVLLAEECRWECPYTGKSISMRKLVGPESEFQIEHIIPFIRSLDNSFLNLTLCHVEENKVKANKTPYEAYSGDPERYERILERVKRFQGDKGIVAQKLHRFLMTPEQVEEFLAGFTARQLTDTAYASRLAADYLGLLYGGVVDQAHVRRVQATSGQVTAYLRNLWLLNTILRDGETTHGGYATKPRDDHRHHAVDAVAIALTDAGTVKQLSDAAQRAPLERRRRFASLQAPWPDFVDSVRQEINRIVVSHRVSKKVSGALHEETIYSAPVAAGGTCPDLIGSPPGATLKGGATDVRHVRKPLASLTKTEIEDIVDPGVRQRVLDKLEELGGDIKKFTKEENLPFLLAKDGRRIPIKRVRLRKKTPTVTLGEGRRAREVTPGSNHHIEIFAELDEHGEEVEWDGQVVSMFEAHQRMKAGQPIVQKDQGPDHLFKFSLAQGEVVECDDKQQGRSLFVFRKVTQFTAGGIQIGFAPLNDARKAREIQVSRAWLWATPNTVGERHARKVAVSPLGEVSEAHD

SEQ ID NO: 17245 - protein, 1079 aa, unidentified
  REGION 1..1079: note = Cas Enzyme sequence
MADTTPTEFVLGIDLGTNSLGWAVVGLIDGEPANLIRAGVRVFDAGMEGNIESGQEQSKNLKRREARSHRRQLWRRGRRMTKTFNLLRKFGLLPEGDASTPEKRQDLINALDNTIRSSAWFTAKASSGAYAEPEQTLPYILRAAALDERLEPHFLGRALYHLAQRRGFLSNRLKSAKQEDEEGAVKKGISELRKAIEESPARTLGEYFAHASPNDARIRGRWTARSMYKEEFDRIWRAQATHHSGPLTDERMKQLSQVLFFQRPLWFNPDVIGRCELEPEERRAPAYLLVAQRFRLLQTVNNLRALPAGQAERDLSPDERKKLIEALELKGDQTFGQIRKLLGLKGCEFNLERGGEKRIKGNRTSADFYEVFGERWLKMAPEERDRAVEYVHAFERPEKLAAAAKKACDLSDEAAAELSGISLEPDYMSLSRKAMGRLLTLLEEGVPYATARRQIYPERFEAGRPLPLLPPVEESLTEIRNPAVKRSLTELRKVVNAVVRTYGKPLEIRIELARDLKKTKKQRQALSEGIRKNEKARAEAVKEIIKSDLGIKEPKPDDIRKFLLAEECRWQCPYTGRTISMQGLFGPEPQFDIEHIIPFDRSLDNSFANLTLCFHEENRNVKRGQTPFQAYGGTDRYDPILDRVARFSGERRLAAAKLKRFKLNDEELELFLADFRNRQLNDTAYASTVAAGYLGLLYGGLSNAAGNRCVQATSGRTTYFFRSLWKLNSILNDGPSTDGGHVAKSRADHRHHAVDAVVIGLTDAGMVKRLSDAAQRAALAGRKRFAALEGPWPDFVDTVRSQVNRIIVSHRVSKKVSGALHEETIYSRPFPAAAVSDRRSRSNPDGGGDIAATVVRVRKPLGALTKPEVEEIADPQVRSMVQNKLAELGVEDPKKAFADESKLPFFATQDGRHIPIKRVRVKKQVPTYVLGEGRKARHVTSESNHHVELYAQTDGQGKEGAWDGEVVSMFAAYQRQSARKNIVQRDHGPLAEFKFSLAPGEVIECDGKGGSRNLYVMRKASQLSSGQLQIGFAPINDARKAKEMQTSRAWLWANPATLSQRHPRKVIVNALGEVSDAHD

SEQ ID NO: 17246 - protein, 1068 aa, unidentified
  REGION 1..1068: note = Cas Enzyme sequence
MMEQPCGEFVLGIDLGTNSVGWAMIGLVDGEPSKLLRAGVRVFDAGMEGDIESGQEQSRNLKRREARLHRRQLWRRARRLTKTFNLLRQFGLLPDGDPSTPEKRQDLINKLDQDIRGSEWFKAKAQSDAYPEPEQTLPYILRAAALDEPLEPHFLGRALYHLAQRRGFLSGRLRPAKKEDDEGAVKKGIGELRTAIEEKHARTLGEFFAQASPTERRIRGHWTARSMYEEEFEKIWAAQAPHHPTLLGDDRKKQISRALFFQRPLWFDPDTVGQCELEPGERRAPAYLLTAQRFRLLQKVNDLQIEEPDKAPRYLTPEERGKLSDALELQGDLPFHKDRKAEGRVVPSVRTLLGLPKNVPFNLQRGGEERMAGNRTTSAFYAVFGERWLDMSAEEHKQAILDVLSIHKPEALRRRALGHWKLDDPAADMFCEISLEPDYMNFSRKAIENLLPLLEQGVPLQAARKQIYPESFEARDAKPLLPPVEEAVREIRNPAVMRSLTELRKVVNSVVRRFGKPTYIRIELARDLKKSKKQRAVVSEINRRNEKARAKAAEEIVKGDVGIKEPKPEDKRRYLLAEECHWQCPYTGKTISMQALFGPEPQFDIEHIIPFSRSVDNSFQNLTLCYVPENRAAKGNRTPYEAYSGDPERHQEILDRVKRFTGERAMVSAKLKRFMMDEGDLEEFLADFRKRQLNDTAYAARLATRYVGLLYGGLADPEHQQRVFAPSGQTTAYFRNLWKLNGILNDGPSTGGGRVEKSRDDHRHHAVDAVVIALTDAGMVRRLSDAAQRASSAGRKRFAALEGPWPNFVDTVRERINGIVVSHRVSKKVSGALHEETIYSSPGADGSVRVRKPLAALTKSEAEEIADDGVKALVLSKLGGGDPKKVFASEENLPCFETPDGRRIPIKRVRIRKAVPTFTLGEGRAARHVTPESNHHVEIYAEVDENGKEGTWGGDVVPTDEAYGRVKMRKPIIQRDHGPLAKFRFSLAPGEVIECDDGRGGRSLWVVRGATSQRESPRLFLVPINDAREKAEVVKSGLYWRPFLNPLRKLNARKVIVSPLGEVSEAHD

SEQ ID NO: 17247 - protein, 1076 aa, unidentified
  REGION 1..1076: note = Cas Enzyme sequence
MFVKGEMMTEQPCGEFVLGIDLGTNSVGWAMVGLVDGEPTKLLRAGVRVFDAGMEGDIESGQEQSKNLKRREARLHRRQLWRRARRMTKSFNLLRQFGLLPGGDASTPEKRQDLINELDQDIRACDWFKNEAASRAYPEPEQTLPYILRAAALDEPLQPYHLGRALYHLAQRRGFLSNRLKSAKKEDDEGAVKKGISELRKAIEEAHARTLGEYFAHVSPTERRIRGRWTARSMYEEEFEKIWAGQAPHHPTLVSDDRKKQISQALFYQRPLWFDPETIGQCELEPGERRAPAYLLTAQRFRLLQRVNDLQIEEPGKVPRYLTPEERAKLSDALELQGDLSFHKDRKVNGRVLPSVRTLLGLPKNVPFNLQRGGEEKMPGNRTTSAFYAVFGERWLEMSAGEHNQAILDVLSIQKPETLKRRALGHWKLDEPGADKFCEISLEPDYVNLSRKAIDNLLPLLEQGIPLQTARKQIYPESFKASDARPLLPPVQETLTEIRNPAVMRSLTELRKVVNGVVRCYGKPTYIRIELARDLKKSKKQRAALSEINRRNEKARAKAAEEIVKGDVGINEPRPEDKRKYQLAEECHWQCPYTGKTISMQSLFGPEPQFDIEHVIPFSRSMDNSFQNLTLCSVPENRSVKGNRTPHEAYAGDPERYQAILDRVKKFTRERAMVSAKLKRFMMNEDELEEFLGDFRKRQLNDTAYAARLATRYVSLLYGGLADAEHEQRVFAPSGQTTAYFRNLWKLNAILNDGPSTDGGRVQKSRGDHRHHAVDAVVIALTDAGMVKRLSDAAQRASSAGRKRFAALEGPWPNFVETVREAINGIVVSHRVSKKVSGALHEETIYSSPRADGSVRVRKPLAALTKNEVEDIADDGVKALVLAKLGGGDPKKVFANEENLPCFETSDGRRIPIRRVRVKKAVPTLPLGTGRTARHVTSESNHHLEIFAELDAQGNEVEWDGVVVSMAEAFRGKKRHLPVVQRDRRPHRQFKYSLSPGEMVRCGCGPQAGKLMVARAISQYTSGQIIVDFVSPTEARIKKEVVQSGGWLRIVPNTLRKWGAQKVVVSPLGEATEAHD

SEQ ID NO: 17248 - protein, 1084 aa, unidentified
  REGION 1..1084: note = Cas Enzyme sequence
MFVKGEMMAEQPCGEFVLGVDLGTNSVGWAMVGLVDGEPAKLLRAGVRVFEAGMEGDIESGQEQSKNLKRREARLHRRQLWRRARRLAKSFNLLRQFGLLPSGDASMPERRQDLINKLDRDIRASDWFKTKASSGAYPEANQTLPYILRAAALEEPLEPHHLGRALYHLAQRRGFLSNRLKPVEKEDGEGAVKKAISELRKAMEETHARTLGEHLAHVSPTERRIRGRWTARSMYEEEFEKIWAAQAPHHPTLLNDERKKQMRQALFYQRPLWFDPDAVGQCDLEPGEHRAPAYLLTAQRFRLLQRVNDLQIEQPGRVPRYLTPEERAKLSDALELDGDLSFHKDRKANGRVLPSVRTLLGLPKNVSFNLQRGGEEKMPGNRTTSAFYAVFGERWLEMSAEEHNQAILDVLSIQRPETLKRRALAHWKLDEPAADRFCEISLEPDYMNLSRRAIENLLPLLEQGIPLQTARKQIYPESFKVSDAKPLLPPVQEALPEIRNPAVMRSLTELRKVVNGVVRCYGKPAYIRIELARDLKRSKKQRAALSEINRRNEKARAKAAEEIVKGDVGIKEPKPEDKRKYQLAQECHWQCPYTGKTISMQSLFGPEPQFDIEHIILFSRSMDNSFQNLTVCYVPENRSVKGNRTPHEAYSGDSEAYQAILDRVKKFTGERAMVSAKLKRFMMNEDELEDFLSNFRSRQLNDTAYAARLATRYVSLLYGGLADAEHQQRVFAPSGQTTAYFRNLWKLNAVLNDGPSTDGGRVAKSRRDHRHHAVDAVVIALTDAGMVKRLSDAAQRAFSAGRKRFAALEGPWPNFVESVREEIDRIVVSHCVSKKVSGALHEETIYAAPIGDGGEVRVRRSLSPNAKSTKQVSASEVDDIVDPGVRALVRAKLKELGGDLKKFSDEAKLPFFQTDDGRRIPIKRVRIKKVVPTFALGEGRVARHVTPESNHHVEVYAEVDTNGSEGKWGGQVVPMHEAYRRLKSGEPAVQHDHGPLVRFKFSLARGEVIECDDGQSGRKLWVLRGATSQDDSPRLFLVPIEDAREKSEIVKSGLYWRPFLNPLRKLNPRKVVVSPLGEVSEAHD

SEQ ID NO: 17249 - protein, 1109 aa, unidentified
  REGION 1..1109: note = Cas Enzyme sequence
MAEQPAGNYILGIDLGSNSLGWALIARENGEPKGLIRAGVRVFEAATEGDRESGQEESRNKARREARLHRRQLWRRARRLKKVFDLLQQYALLPRAKGSTPEQRQDFLNDLDKQILTSPWFATKKTSGLYPEPEQVMPYILRAGSLDERFEPYFLGRALYHLAQRRGFLSNRKAAPKKDEKPGEVDKGINELRDGMAQTGARTLGEYFARLDPFDRRIRQRWTHRGMYKDEFDRIWKAQEAYHAEILTTDRRQELSRAIFFQRPLKFPRSLVGHCELDPEEPRAPRYLFIAQRFRLLQVVNNLKVEFDGAERLLTPEEREKLVETLELEGDRTFAQARKLLKLSKASRFNLERGGEKNLRGNRTTSALYKVFGARWLEMTAAEHDAALHDVQSIQNEEVLKRRAVGHWNLDEAAASAFAKISPEPGYFNLSRKAMERLLPLLETGVEYAKARHQLYPEKFQARGELASLPPVEVAADPAKLQEWIKRRKALRPGAQSPDPITAIRNPAVMRSLSELRKVVNAIVRQYGKPAEIHVELARDLRKPKWQRQETSGRMRENERARKAAAQRILAETGIKEPSPEDIRKVLLAEECRWECPYTYTGKTISMRKLVGHDSEFQIEHILPFSRSLDNSFVNLTLCHVAENAVKGNRTPHEAYSGDPDRYDRILTRVRAFSGNRGIVAEKLRRFQMTPEQLQEFLSDFSARQLTDTAYASKLAARYLGLLYGGEIDDAHQRRVQATSGQVTAYLRNLWLLNRILNDGPTTHGGAVPKLREDHRHHAVDAVTIALTSPATIKTLSDAAQRAPLEHRRRFASIQSPWPDFVDTVRDAVNHIVVSHRVSKKVSGALHEETIYSPPMVAAVSAPRSAGSLPARLRATGDGGATRETVRHVRKPVKSLTKPELAEIVDPVVRQRVQAKLEELGGDLKKFAKEENLPYLETKDGRHIPIKRVRIKKKLSTFALGSGRTAREVTHESNHHLEVFAELDEDGREIEWDGVVVPMLEAYRRNRQGQAIVQREHGPQRRFKFSLAPGEVVECDDGPEKRRQLVVRAVSQYSAGAIVISLVRLNDARKKKDIQESKAWLSIVPNKLRQLHPRKLVVSPLGEVGEAGD

SEQ ID NO: 17250 - protein, 1065 aa, unidentified
  REGION 1..1065: note = Cas Enzyme sequence
MSELNHYSPYLLGLDLGSNSIGWALIKLDNDDNPCGIERVGVRVFEAGMEGQYESGKEESRNKKRRDARLVRRQIERRARRYRKLANVLQQIKLLPEGNMNDSLERKNIIDNLDKELRKMYIKEDLPEYEKNRLNQIFLYYLRSLAVEQKLEPYALGRVLYHLGQRRGFLSNRRGQKKDDEEKGKVKEGIAEIRKEMACLGTRTLGEYFAKIDPIAQQKRIRGRWTARDMYKQEFYAIWDYQAQFYPDILNDENKKSVFKAIFYQRPLKSQKEKIGFCQFECIARGAQRNRRRAPWVILKAQRFRLLQRVNDLEIKEDKLNKRPLTVEERRLLIDYLEKNGDATFAQLRKILGLPKTVKFNLEEGGEKKIPGNRTASAIREVIGERWDNMSTEERDKLVEDIYSIVNNKALEKRLIKHWKFSEDEALQISEIKIEDSYCNLSRQAIDKFLPGLEEGRRYGELVKEIYGMDNVRDEFKVDLLPPLEEAPIGEIRNPTVTRTLAEMRKIVNELVKRYGKPRFIRIESAKDLRNTKKEREKIWKNNRDLEEVRSKIRQKLINQGIPNPTRSDIEKYMLAEECSWVCPYTGRSISFTALFGSEPQFDIEHIIPLSRCLDDSFKNKTLCYHEENRTRKHNKTPFEAYAYDENQWEQILSRVEKFNSHFSEEKLRRFKLHGKALEDFIDKFSSAQLNDTRYASREACMYCGLLYGSEYRKHIFTISGSVTSVIRRMWNLNRILGDAEKNRDDHRQHAIDAIVIAITSPAMVKRISEQAENIPTKERKNKKWWRFIEPPWPSMTEEAEEKVLSIIVSHRPERKVSGRLHEETNYSPPKLDKNGETVVHVRKSLSNISKGEIDDIVDPVVRKAVQDKLIELGGDPKKAFADPMNYPLMPNKKGLQIPIKSVRIKKKVPVFPVGEKERVRYVTSDENHHIEIFETKDKKGRTKWEGYVVSMYEAIQRRKRGESILIKKLIREDGSVDENAKFLFSLCKKDMVQMKGSDGKEGYYLIIGIGLSNNNIKIRFKPHYKAKVEQYELKGLIKEPNVLKETNIKKVAITPIGIIQPAND

SEQ ID NO: 17251 - protein, 1072 aa, unidentified
  REGION 1..1072: note = Cas Enzyme sequence
MALRFAFDLGTASLGWAVFKLRVDTDRDGKPVYSPEMLVATGVRIFDDGRNPQTGESRAQGRRLPRAMRRSRDRFVQRRDFVMAKLVEIRLMPADRAAQKTLEQLDPNRLRADALKSALPLHHVGRALFHLNQRRGFKSNRKTDDPGDGGKIASAAARLAEKMQGFETLGAFFAARQADADVRKRLPTRIRPDNANKDELYEFYPTRDMLEHEFDLICRRQAAFNADFPGAAEIDQLRHAIFHQRPLRDVHPGYCSFYPKEPRLARAHPLAEDWIFYQKINQLRAEDDDGYPVPMSLAQRDDMVDRLRRGENLTWDRVRKALHMPGKSGRINLEEGGEKQIEGSALVKRFKGTKARPGPFFAQWDGLTEDGVLAIIAAYRNSDTDAQLLASLESFALDAARQELALGCSLPDGYIAVSERAAREIVAELKREIVPYSEAARRAGLHHSDKRDGEVFDRLPYYNEIAELKRHLGHGTGDPNDPRDLRFGRIANPTVHIGLNQLRRVVNALSDRFGRPDQIVLELSRELKQSRQQKLDAGRMRDANRKVNDQRREELKSYGFYQEGDRRRTQEGLMRMRLWEELGPPSNRFCPYSGRPITSLATLLSDEVEIEHILPLSRTLDDSMANKTVAFRQWNRLKRNLTPADAAKRYPEMFDQDEMIVRTRSMPGNKRWRFHPDAMERFAGDKSFEARQLAETQHFGVVARHYLSKLSPANPDQGEMQVWVTTGRLTADLRRKWGLHLGTNQKNRDDHRHHAVDACVIGVIDRGLVNRLAGAAARDEENQALSRILADIDEPYEGYSDEVNKAVRQVVVSHRANHRIGGKLHEDGAYGPVRDNEENAARGELSAANAVIRRDVTSLTAKQIGQVRDLAIRNRLEAVLAEGRRIYPDKSDFDRHLPELLAEWSRKTGTRRVRALVRDESVVPLGRRSDGSRYKYVVPGENHHMDIVETPDGIWRGVAQSVFDANQKAPQTDWRGIYPNARFIMRLHKNDTIQLFDEDGVNRIKRVVRIAPSANRLMLAEHMQAGKLQERHDDKEDAFRWDLATIGKLKARRARQVRVDETGRVRVVPYGP

SEQ ID NO: 17252 - protein, 1397 aa, unidentified
  REGION 1..1397: note = Cas Enzyme sequence
MARKLKNINGPWFAGIDLDGTSVGFVATDEYGEVLYHKGQPVMGARCFKEALHASEARMPRTARRRLQRARGREREMERVFAPAIAPTDPDFFVRRRMSYKLMRDDIAADPAAAAWQGLLDGYPTLAHLDVDLMEADGPRDPRLIFWAIANHVVRRGHFLMEGIDVTSANSDPSAQVEALVRELDALGEACGEAIELDGGALDGMGGSWTARELQRAVSGAVSVTGDDIDAKIARAQAKALGDLVAGYKANMDAFALEGELIGKISVSDADALDEFLANCPDRLAPTIEAARGLYSAWRLQGLLSFAPGKTLSHNQVAQYEVYGRQLRTLKDLALKYIVHADSEDGPDEDGLALYRDFFGGPKRTGRRGYDKVLVKKLDGAKRNMGYTAYDLNVIPYEEFKKRVERLFKGTDATKDPAYIDMVAALGEHRFLRRIHTTDNSAIPYQLHAEVVGRIIDAQGNFYPWLKDAGAHILKVLTSRIPYYVGPLDSSAAPVDAHGKARFAWSRRLPGHECAFVAPWNYEEHIDTDAAAEAFIRRMTGKCTYLVDEDVLPANSLIYERFRFLNELAGIRYTEDGQDWLPLDAAMRAAVVEAASDGSVMTLSRIANILSRDFTMAHPHVKGVSDAKRMTSRLSVSAWIAGLLGVRSLTAAQKSMAEDIILWNTVFEERSILKRKVAKEYGGILDEGAIEAFCARRLKGWGQLSERLLTGVWVDTARGDMCIMDVLEQGAPYGRFRGTSMNLMQALSDTELGFRARIDEVNATALEKAGELGIDALPGSPALRRGISQAMKVIEDMASVAGCAPAKVYVEVTRTASNKLKGKRSRSRAQEIEAALKALDDDARRDLDAARLLRELGMFDEKEINERLYLYFRQAGKSLYSGKPIDIARIASAYYCVDRILPRSVRRDESLDNKALVLYAESLDKRDSILVPQPVQRKMAPFWMHLRRAGLMTERKLNALMRTQISERMLKSIVGRQLTETSQECKLIAAVLEATYAGVKVVPVKAGVASSVRRRAGIPRSRKANRYYHAHDALIALTTGRFIETRAPMWSNNRAFYERIMRDIEAQERRGGADSELDFFSGGFFRDLVDYDTAEVLWDSDFERERLVRACSWKNLRVTFAPYEEGGAFWKQTVYSPRDSKTKLIPVKGDRDAALFGGYSAQTFAYFMIYETEGKKGNLFRFAPVPTSIASKATDSLTELYARSLCRESGERFVRVVRDRILKETVYEAYGERFRVKGLKTAGPVRQLALDAADTRLLRIVERMVDGEQPSPRRDLESDAKVLCRLWARLLELAPSNFPRVSKVLKLGALKTPEEVFADTEADDLAKTVHAIAESEVQVVELLSGIRGTADVRPLGGSAFAGTLSMTFDKIVNDPKAGFAIVDISAAGLHERVSTLG

SEQ ID NO: 17253 - protein, 1046 aa, unidentified
  REGION 1..1046: note = Cas Enzyme sequence
MDKAKGADIGELGFDPATFATALMTLEEFRSKDRVIWAGLDIGVASTGLCLVDVRNHEIVLMASHLFKSPVVDKKKATAAPESLASVRRGARSVRRNIMREGRRKKAIRAALADFDLIPADADGEWFSARRDERTVVRLRSKALGYLLNSRELARVLYSFASHRGYIDHGKSDKEDDAGKVKKALAANHAALADGGCKTFGQYLAGQPRSRNRAGDYSYTADIGMTVDEVRTIFARQRELGSEIASKALEERYIAELTWLTDTSKRDRSTYLKVGFCTYLGAPYRRGATSTISFEMVRAHQTLCNTVILHADGTSSTIPGDIRIEIVRDLFAVKKSVKPLKWSGLRRRLGLSEGDSFKGRPVEEEKRDCIALPAWAVLCAGLYEGHRDLLERLHDHIDDADAVCSALTFASSAASLTGRLAPLALSDDEDEAIIDLPYSARLFSGYANASLEALQMLRGTFEDPRVTSLRQAEEDSGLAQARAILAEERDGSADGLLCAFSDYDPTCRNPVVLRATAQMRRMVNSVIRHYGLPDVIRVEVARDLKRSKHEREIVAESNRARLELNEQAKRDIIEFLGLPDDHHVRGRDLALVKLYREQGGKDPYTGTGIDFRRMLEEHGYAEIDHILPVSRTCDDSQANKVLCLTKSNRDKSNRSPYEWMTSGEASAPDWGEFCGRMERWAKMCEPRRYARKKLANLTCENLTERAGNFIDRNLNDTRYMSVALAKWLRECLPFAKDGHEHVFCVAGGATALMRSVWNIGITGPDGKKNREDDRHHAVDAAVIACCTPGIVRNVALVNEGHARADVRQRLFSDSLPYPEFKEQVDAWIPCIVPTLTLPNAVTGSVLKDTVYPYLGRDEAGKDLYLTVKRDKDGRIVERKVNKATTMWKDGQGGCRKYDEMCALDAVFDASVGKRGRWSFDPVYCIDIPHREAVRRTMRVFSKEKAIDLWGTVEVPDEAPRMTIRRGDVLVCDGKAARFHCFDISVNAIRLFSQRGGKQLQATGPLSAEAFPPPSKWGEGVRIMQEDCLGLCWLSFLAQRAADVQME

SEQ ID NO: 17254 - protein, 1389 aa, unidentified
  REGION 1..1389: note = Cas Enzyme sequence
VIIRTYELKTITTIAILKMFQLLTGGLSMTKLGKPYGIGVDIGSNSIGFAAVDENSHLIRLKGKTVIGARLFEEGKAAADRRASRTTRRRLSRNRWRLSFLRDFFESHITPTGPNFFMRQKYSEISPKDKARYKYEKRLFNDRTDAEFYQQYPTMYHLRNRLLTDPSKADVREIYFAIHHILKSRGHFLTSGYAKDFNTNKVALNEIFPALQDAYAQVYPDLDITFDENKVNEFKTVLLNEKATPSDTQRALVNLLLAEDGDKDILKQQKQVLTEFAKAVVGLKTKLNVALGTEVDSSEATVWNFSLGQLDDKWAGIESAMTDEGTEILDQIRDLYRARLLNGIVPAGKTLSQAKVDDYAQHHEDLELFKDYLKQLEDDGTAKAIRQLYDRYIDGDDAKPFVREDFVKALTKEVTAHPNAKSPELLERLAQPDFMLKQRNKANGAIPVQMQQRELDQIIKNQSVYYDWLAAPNPVEKHRKSMPYQLDELLNFRIPYYVGPLVTAKEQKAAQGGVFAWMVRKDPDGNITPYNFDEKVDREASANTFIQRMKTTDTYLIGEDVLPKQSLLYQRYEVLNELNNVRVNNEKLSIEQKQQVIRELFERHNSVTIKQFAENLRAHGDYAHIPEIRGLADEKRFLSSLSTYRQLKSLLPDAIDDPAKQADIENIIAWSTVFEDAAIFKTKLKEINWLDSQTITKLSNIRYRGWGQFSHKFLNGLTLGNGHTIIQELFLSNNNLMQILTDETLQKKMTELNADKLKAANINDAIDDAYTSPSNKKALRQVLRVIEDIKRAADGQDPSWLYVETADGGGTPGKRTRARQHQLQEIYANAAHELIDSAVRGELEDKIADKADFNDRLVLYFMQGGRDIYTGTPLNIDQLSSYDIDHILPQSLIKDNSLDNRVLVHAIINREKNATFASTIYAQKMNATWRQWHEAGLISGRKLRNLQMRPDQIDKYASGFVARQLVETRQIIKLTEQIVAAQYPETKIIAVKAGLSHQLREELEFPKNRDVNHYHHAFDAFLAARIGTYLLKRFPNLQAFFTYGKFKKADVKKLRGFNFIRDITHAEDKIVVKDTGEVIWDKKRDVDELDRIYNFKRMLITHEVHFEKADLFKQTVYGAKDSKEAGGKKQLISKKKGYPVDIYGGYTQETGSYLSVVRLTKKAMYAVVKVSTRDAAKLAVAKSISEQKENETLNDIIDEKLSKISKNGKITHELFEVVLPRVGQKTLFKNSKYNLFLVNSDTYMHNYQELWMPREYQKMWKDISLSKYGDAQTEDQLDQIFGFIVSQVNSYFNLYDINQFRKKLNDAADKFATLPMRDTDDMQGKIATIGQLLIGLQANAARSDLRNLDIKTSLGLLQIPNGISLDSDTSVVYQSPTGLLEREVHLSDL

SEQ ID NO: 17255 - protein, 1360 aa, unidentified
  REGION 1..1360: note = Cas Enzyme sequence
MTKLGKPYGIGVDIGSNSIGFAAVDENSHLIRLKGKTVIGARLFEEGKAAADRRASRTTRRRLSRNRWRLSFLRDFFESHITPTDPNFFMRQKYSEISPKDKARYKYEKRLFNDRTDAEFYQQYPTMYHLRTRLLTDPSKADVREIYFAIHHILKSRGHFLTSGYAKDFNTNKVALNEIFPALQDAYAQVYPDLDITFDENKVNEFKTVLLDEKATPSDTQRALVNLLLAEDGDKDILKQQKQVLTEFAKAVVGLKTKLNVALGTEVDSSEATAWNFSLGQLDDKWAGIESAMTDEGTEILDQIRDLYRARLLNGIVPAGKTLSQAKVDDYEQHHEDLELFKDYLKQLEDDGMAKAIRQLYDRYIDGDDAKPFVREDFVKALTKEVTAHPNAKSPELLERLVQPDFMLKQRNKANGAIPVQMQQRELDQIIKNQSVYYDWLAAPNPVEKHRQSMPYQLDELLNFRIPYYVGPLVTAKEQKAAQGGVFAWMVRKDPDGNITPYNFDEKVDREASANTFIQRMKTTDTYLIGEDVLPKQSLLYQSYEVLNELNNVRVNDNKLSFDQKQQVLGELFERHNTVTIKQFVDNLLAHGDYDRIPEVRGLADEKRFLSSLSTYNQLKGILHEAIDDSDKQTDIEKIIAWSTIFEDKAIFKTKLNEISWLNAGMINSLANIRYRGWGQFSHKLLNELTLSTGRTVFEELLISSHNLMQILTDEVLKQKIAELNAHELKASGIYAAIDDAYTSPSNKKALRQVLSVIDDITNAAGQAPNWLYIETADGDGVPGKRTNSRQRKIQEIYVNAAQELITGSVRGELEDKIASRADFTDRLVLYFMQGGRDIYTGEPLNIDNLSSYDIDHILPQSLIKDNSLDNRVLVHPLVNREKDTIFASTRFAKQMNGMWRQWHAAGLISSRKLRNLQMRPDEIDKYASGFVARQLVETRQIIKLTEQIVADQYPDAKIIAVKAGLSSQLRKELDFPKNREVNHYHHAFDAFLAARIGTYLLKRYPNLEPFFTYGKFKKTEVKKLKSFNFIRDMTHAKDKIVAKETGEIVWDNASDINELDRIYNFKRMLITHEVRFETASLFKQTLYAAKNSKNRGGSRQLIPKKKGYLVDIYGGYTQETGSYLSVVRLTKKAMYAVVKVSTRDAAKLAVAKSISEQKENETLKKIIDGKLSKTSKKGKTTHQLFEIVLPRVGQKTLFKNSKYNQFLVNSDTYMHNYQELWMPREYQRMWKDILLSNHGDAQLEGQLDQIFKFIVSQVNSYFNLYDINQFRKKIADATDKFAKLPTHDTDNARGKIATIGQLLIGLQANAMRSDLRNLDIKTPFGLLQIGTGITLDLDTSIIYQSPTGLFEREVPLTDL

SEQ ID NO: 17256 - protein, 1390 aa, unidentified
  REGION 1..1390: note = Cas Enzyme sequence
VIIRTYELKTITTIAILKMFQLLTGGLSMTKLGKPYGIGVDIGSNSIGFAAVDENSHLIRLKGKTVIGARLFEEGKAAAKRRAGRTTRRRLSRNRWRLSFLRDFFESHITPTDPNFFMRQKYSEISPKDKARYKYEKRLFNDRTDAEFYQQYSTMYHLRNRLMTDPSRADVREIYFAIHHILKSRGHFLTPGDAKDFNTNDVALDEIFPALQDAYAQVYPDLGITFDEDKANEFKTILLNEIATSIDTQRALVKLLLAEEDDKDILKQQKQVLTEFAKAVVGLKTKLNLALGTEVDSSEATAWNFSLGQLDDKWAGIESAMTDEGTEILDQIRDLYRARLLNGIVPTGKTLSQAKVDDYTQHHEDLQLFKAYLKQLEDDGTAKAIRQLYDRYIDGDDAAPFLRENFVKALTKDVTAHPNTKSPELLERLAQPDFMLKQRNKANGAIPVQMQQRELDQIIKNQAVYYDWLAAPNPVEKHRKSMPYQLDELLNFRIPYYVGPLVTAKEQKAAQGGVFAWMVRKDPEGNITPYNFDEKVDREASANTFIQRMKTTDTYLIGEDVLPKQSLLYQRYEVLNELNNVRVNNEKLSIEQKQQVIRELFERHNSVTIKQFAENLRAHGDYAHIPEIRGLADEKRFLSSLSTYRQLKSLLPEAIDDPAKQADIENIIAWSTVFEDAAIFKTKLKEISWLGSEAITKLSNIRYRGWGQFSRKFLNGLTLGNGHTIIQELLLSTNNLMQILTDETLQKKMTELNADKLKTANINDAIDNAYTSPSNKKALRQVLRVVDDIKRAADGQDPSWLYVETADGGGTPGKRTRARQHQLQEIYANAAHELIDTAVRGELEDKISDKADFNDRLVLYFMQGGRDIYTGAPLNIDQLSSYDIDHILPQSLIKDNSLDNRVLVHAIINREKNATFASTIYAQKMNATWRQWHEAGLISGRKLRNLQMRPDQIDKYASGFVARQLVETRQIIKLTEQIVAAQYPDTKIIAVKAGLSHQLREELEFPKNRDVNHYHHAFDAFLAARIGTYLLKRFPNLQAFFTYGKFTKADVKKLRGFNFIRDITHAEDKIVAKDTGEVVWDKQRDVDELDRIYNFKRMLITHEVRFETADLFKQTVYGARDSKEAGGSKQLIPKKKGYPVDIYGGYFRENTAYLAVVKVTKKTETIFKVVKIATSQVAALNKARSRSTAEELSVLTELLKPKFSKVGKNGKITDTPFEVVLPRVPREQLFYNAKYGFFMVNSDTMFHNFQEIWVSRSDQKILQQIRKAKIDYPNVDQDLDNLFHNLADQIVKYFDLYSIAGFKEKISQSQNTFNDLAVDDTDQSVGKITVINELLKGAQANGMTGSLKVLKISTPFGFTQDKSGVLTKDSSIIYQSPTGLFERSVRLTDL

SEQ ID NO: 17257 - protein, 1242 aa, unidentified
  REGION 1..1242: note = Cas Enzyme sequence
VIIRTYELKTITTIAILKVFQILTGGLSMTKLGKPYGIGVDIGSNSIGFAAVDENSHLIRLKGKTVIGARLFEEGKAAADRRASRTTRRRLSRNRWRLSFLRDFFESHITPTDPNFFMRQKYSEISPKDKARYKYEKRLFNDRTDAEFYQQYPTMYHLRTRLLTDPSKADVREIYFAIHHILKSRGHFLTSGYAKDFNTNKVALNEIFPALQDAYAQVYPDLDITFDENKVNEFKTVLLDEKATPSDTQRALVNLLLAEDGDKDILKQQKQVLTEFAKAVVGLKTKLNVALGTEVDSSEATAWNFSLGQLDDKWAGIESAMTDEGTEILDQIRDLYRARLLNGIVPAGKTLSQAKVDDYEQHHEDLELFKDYLKQLEDDGMAKAIRQLYDRYIDGDDAKPFVREDFVKALTKEVTAHPNAKSPELLERLVQPDFMLKQRNKANGAIPVQMQQRELDQIIKNQSVYYDWLAAPNPVEKHRQSMPYQLDELLNFRIPYYVGPLVTAKEQKAAQGGVFAWMVRKDPDGNITPYNFDEKVDREASANTFIQRMKTTDTYLIGEDVLPKQSLLYQSYEVLNELNNVRVNDNKLSFDQKQQVLGELFERHNTVTIKQFVDNLLAHGDYDRIPEVRGLADEKRFLSSLSTYNQLKGILHEAIDDSDKQTDIEKIIAWSTIFEDKAIFKTKLNEISWLNAGMINSLANIRYRGWGQFSHKLLNELTLSTGRTVFEELLISSHNLMQILTDEVLKQKIAELNAHELKASGIYAAIDDAYTSPSNKKALRQVLSVIDDITNAAGQAPNWLYIETADGDGVPGKRTNSRQRKIQEIYVNAAQELITGSVRGELEDKIASRADFTDRLVLYFMQGGRDIYTGEPLNIDNLSSYDIDHILPQSLIKDNSLDNRVLVHPLVNREKDTIFASTRFAKQMNGMWRQWHAAGLISSRKLRNLQMRPDEIDKYASGFVARQLVETRQIIKLTEQIVADQYPDAKIIAVKAGLSSQLRKELDFPKNREVNHYHHAFDAFLAARIGTYLLKRYPNLEPFFTYGKFKKTEVKKLKSFNFIRDMTHAKDKIVAKETGEIVWDNASDINELDRIYNFKRMLITHEVRFETASLFKQTLYAAKNSKNRGGSRQLIPKKKGYLVDIYGGYTQETGSYLSVVRLTKKAMYAVVKVSTRDAAKLAVAKSISEQKENETLKKIIDGKLSKTSKKGKTTHQLFEIVLPRVGQKTLFKNSKYNPDLKSKCNT

SEQ ID NO: 17258 - protein, 1333 aa, unidentified
  REGION 1..1333: note = Cas Enzyme sequence
MKILGLDLGTNSIGWAVVDKDYSEFTLLQKGVRIFQEGVKIEKGNESSKAAERTKYRSARRLKYRRKLRKINVIKVLVKYQYCPEIPDQELDLWRYKGIYPRNIEFREWLRTDEKGNRTPYYFRNLAVSEKLDLNNVSARYQIGRAFYHLAQRRGFHSNRLESTNENEGIVKQAISEINEEKGDRTLGQYFYEKYLAGEKIRDTYTHREDHYLAEFNRICEFQNLPQGLCSEMGKAIFYQRPLKSQKGLVGKCVFEKNKPRCPVSRPEFEEFRMLSFINNIKIKMPDDDKLRPLTQAEKQKILPLFLRKSKDYFEFEDIAKNLAPKKQYKYFKDNKKNPEDWLFNYSLKTTVSGCPVSARFIEIFGDQYMLFKTEYLNKTNGGRGIIDINDVWHVLFSFDSDKKLADFARDKLNLSTEKIDKFLKIKLKKDYSTLSLKAIKKILPFLRMGLIYSHAVFLAKLDDILPSEIWNIEKNRRIISDAVSEIIRSQNQEKSIIDIVNGYIKDNRENNSTWSEEAKEIYRIELNSRIENYYGKKTYSFFPEERKTQIENKAFTLFESQMKRNWGKGDFASIQRIDEQVKAFISDNFNISAQKLEKLYHPSAIDVFDPPKRRADGRLYLGSPMVSSIRNPMAMRSLHQLRKLINELIENDVIDANTRVNVEMARDLKNANERKALKRWQEARETLHKEYADLIKQHYIANGLNIEPSSDDILKYQLWEEQNHKCLYTGSEIKVSDFIGSNPAYDIEHTIPRSISLDNSQVNKTLCSNRFNRSVKRNKMPSQLDNHSEILSRIEQWKGKYEELDKQVHSLTRVVKNAADKEMKDRLIQKRHYLVFERDYWREKYYRFIMEDVSDGFKNSQLVDTGIITKYARLYLKTYFDKVYTVKGNTVADFRKAWGLQSEYEKKERVSHIHHCIDAITIACITKENYELLAKFYHDWEEAEMAGSKSKPKIEVPWPTFITDVLGVEKEVLVSHYTPDNLSKQSKKKLRARGIIKRNENGQPVFQKGDTVRGALHKETNYGAIKVLVNNRYGVKEERIIYVFRKSLDALTASDIKNIVDPHIREIVTVDKTKEGEIKKELDNLNKQIKNSEDEHEINRLNSLINDLKHELSALFHIKNKNGSITPIKKVRCIASNITNPIQIKKHRDLSLHDYKQYSNFENDRNYLIAIYEGVNNKGIIKRDFILVNYLEAGQYYCGKLDYEIVPKIHPRSSFPIKQIIKIGTLVLLIENNSDEIDRLSFPDIQKRLYKVIGLSVQRIKSTAGKINEYATIVLRHTCEARLSKELKIQDGIFRMDEPYIAQRKLNQNQFKALVEGFDFTMSATGIVHFKD

SEQ ID NO: 17259 - protein, 1143 aa, unidentified
  REGION 1..1143: note = Cas Enzyme sequence
MTKILIIDTGTAKTGIATIIDGRYEESFNLAQPDPISKDKLGNYRTTARIRTQYKSQRSHYRLRRERLCDLIEFMVDNELCPFVPKTTLRKWRNNRIPPIQFLNDFIGNVNPYEIRSFLINNKIDMNSQSDRYMFGRALYFIVNARGYYFRNVAGDVISDDDINESFYSENINDSNIENNEDSKKKKKSSSLSMSEKKSMTFQEEIESAGFKYISEFFAWRLKNNLPVRRQFIISRSQVKAEFNAICEKQGISDKMKNELEYLIFGPGHRKFPELKRANCPFEKNRKVCFDSHPSFEEYRMWQTIRSIKVQDVNGWRPLNDSEVEKVIKLFYKYKGPFKFSNIQMKLKLPINYKNDQPAAPCSFSMSIAALISPDNLEGWKDEASRRLSISLKRNVSPDEAADIIWHECFRAFREERDSILFFKHKLFVDDYASDDIMISDNTTSVSKEACQKITYWMREYGLNLAYATKMVNMKHVIKMHTSGYMADEVNSERISTVAEKIKDFSKEKGERLNSYITGILNSMALDVQVTVKELDEILWNHSSAERYPHIVYKGVKILPMPSVSIGNPGVYSTMCMCRRFINYLLLIGKIDRDTIIIIESGRQTNTINERLAQDIIKKENCERRMKIEKKCKSLLKSKTVDEHDILLYELWEETGGLDLWTGKMIPEKDILFGQYDDEHTYARARGGHNTKDNMTISDAHFNQRIKKNLLPMEVPGIEDVQKRAKSVFGPKIAELEEKIEKNKNKAKFCKDPDRHQKLVVERLVMTERLEYFQKKLNAFWIDKEIVSYADSQAATNDYTAKQIYKWMKTVFHDVRYSRAEDMTEARDKWSVPKNRDNNYNHAEDAFIHGCLVYYGLKKEDKCPYPEFYEDLEKLHKNTLTLNKEPKAYGRLMKEGAYKHSIHKDSQYSVNKDKDGNLYSSMRMGIKDILLKKKIDLIVDPEIRKCVRESYDAGERNEFFSRQGNIIRHARVYQKMANVENMVKVPFKVQTSVKEYKNYRYYVTDGCSCAGYYSNSIFCPLGNNDETKGETIPKTYRRRGHQMGELLFTVRNNDMVVLFRDDETPDIFENMSREDFFKRLFKVDSIEKDGRIRLSHHDYNSENKQYGIIDNSLIGRQEIMAIRTPKINCLKVDKNMRKRFLKF

SEQ ID NO: 17260 - protein, 1128 aa, unidentified
  REGION 1..1128: note = Cas Enzyme sequence
MIDSSANIQGVRYRIGIDVGLKSVGFCAVEVDQRDQPIRLLNSMVFIHDAGVDPNENKAAKSRKLTAGVARRTRRLYRTRHQRLVNLDRVLSKEFGWPLPDFSSFKDPREPWHVRAGLLDGYIADDEKRKEALSIALRHMARHRGWRNPYAKVETLLQPSDPSDFLKGLNERIGTALRRSFPEDATPGQLIDAYLAHPDYVGRAGTPKLRGPEGILAGKLHQSDNAQEIRRICDVQQIGPADRDRLIRVVFEAKSPKGSAKERGLVGYDELPGQGKHVRAEKAHPAFQLFRMVSVLANLRIREGREERPLSPDELQGLVDFIDQVSLKQEVTWQDLADNLGIERSDLRGTAKASFDGSPVLRNPPTDVTTEKIMACKVKWLKEWWKDADDEQRGYFVDAFSNSGGSEDGTDVNDEVAELLEQATEEDQLEFEKISLPQGRASYSLDSLRRLTCRMLSEGVDLHTARRLEFKVGDDWKPAVEPIGAPTGNPAVDRVLKQVSRWLHAATERWGEPTVINIEHARDGLGSERVARELMRENERRRKANASAVAEMAAKLKLSGKVHRSDQIRYFALQRQNCQCLYCGVPITYTTAEMDHIVPRADGSSTNDRSNLAAVCRTCNHMKGKIPFAVWASSDKANQGVSVTGALERVNMWQRDNGMLPKQFKQLQREVSARLKSRKPDEDFDGRSMESVAWMAVELRARIEGFYRSRDEESVPSVGVYRGQLTAEARKASGFESRVNLIGGRGKTRFDRRHHAMDALVIALMNPSVSRTLALRLNMRDAQRLTGVEETWKNFYGKPGEASQRFESWRESMLRGVELFNIALSDNAIPFVENIRLRVGSSVIHDATVHSFCPPKTPDGKQIITKGYGEQHTLGSALPAELIDRAETPALWTALTRCPDFAPKKGLPENPQRTISVNGTRVGPTDLLNFFGSSAACLKVRGGYVELGSSIHHARIYRIDGKKTAYAMVRVFQVDLMRMKHQDVFTTPLKPSAISMRTAEPKIRQALANGTATQIGWLVEGDELRIDTSKYRGGFIGEVLERYPEATSWRVAGFPMPANLRLRPYLLSAEGLDKDADKAMKDLLEGNGWRPSVNVVFSSGMVEIVRRNCLAEPRFGCRASLPTSCVVE

SEQ ID NO: 17261 - protein, 1138 aa, unidentified
  REGION 1..1138: note = Cas Enzyme sequence
MNAFSENVPGIRYRVGIDVGLKSIGFCAVEVDRNDQPIKLLNSMVFIHDAGVDPNENKAAKSRKLTAGVARRTRRLYHTRRQRLANLDRVISKDFGWPLPDQSTFKYPTEPWHVRSRLLEGYIADDDKRKAALSIALRHMARHRGWRNPYAKVETLLQSAEPSEFLKGLNERISASLGREFPADTTPGQLVDAYLAHPEYVKAPGTPKLRGPEGILEGKLHQSDNAEEIRRICNVQQIDPADRDRLIRAVFQAKSPKGSAKERGLVGHDELPGQGKHVRAEKAHPVFQKFRIVSVLANLRIREGRVERPLTPEELQGLTDFLLIAGLKQEVTWQDLADNLGIERSDLRGTAKASFDGSPVLRNPPTDVTTEKIMACKVKWLKEWWKDADDEQRGYFVDAFSNSGGSEDSSDVNDEVAELLEQATEDDQVEFEKISLPQGRAAYSLDSLRRLTDRMLRDGVDLHTARCLEFNVGDDWKPAVEPIGAPTGNPAVDRVLKQVSRWLHTATERWGEPTVINIEHARDGLGSEKVARELMQENEKHRKANKVAVAVMAEKLKLSGKIHRSDQIRYFALQRQNCQCLYCGASISFATAEMDHIVPRADGSSTNDRSNLAAVCRTCNHKKGAIPFAAWASSDQANVGVSLKGALERVKFWVRDNGMSPKQFKQLQREVSARLKSRKPDEEFDGRSMESVAWMAVELRTRIEGFYRTRDEESVPSVGVYRGQLTAEARKASGFESRVNLIGGRGKTRFDRRHHAMDALVIALMNPSVSRTLALRVNMRDAQRIAGLEETWKNFYGKPGEASQRFESWRESMLRGVELFNIALSDNAIPFNENIRLRMNSSAVHEDTLFSFSHTKPVKKGSTTMKERGVQCALGDAIPIDLIDRAETPALWTALTRCSDFDPVKGLPENPNRTIVVNGRHVGPTELLNFFGSPSACLKVRGGYVKLANSIHHARIYRIDGKKTTYAMVRVFQVDLRRMKHQDLFTTPLMPSSISMRTSETKIRKAIADGTATQIGWLVEGDELQLNPSMYGDGSIAKVFSRYPELTAWRVAGFKSASKIRIKPLLLSKEGFVDDKDAARLGIEPTPDEVRKAVDDPGWVTAINVLLQAGGVRVIRRNCLGEERWRSSASLPVSMMLE

SEQ ID NO: 17262 - protein, 1043 aa, unidentified
  REGION 1..1043: note = Cas Enzyme sequence
VLVFGFDIGTTSIGFAAIEFDPQAGTGAIIRLGSRIFPEARDPDGTPLNQTRRTKRMMRRQLRRRRDRRRTLNEALHAAGLLPAYHSPSWQALISADPIALRVKGISEPLTPHELGRALYHLSKRRHFQGRDLETSETDEALDQTATADEKAARSGRDVTIAALKASGHTLAQYLNEFKPEDRKRGIHALRHYVRDEFERLWSTQAQHHPALANETLKSHIFDVVFAQRPVFWRLNTLGKCRLDPDGELAAKGGWLSAQRRMLEKLNNLEIAGGNARPLDDEERTAILMVLQAQQSMTWGGVRTALKPLFKARGLGTDTVRFNLELGGDPKLLGNPIEQKLSAVFGTQWDNHAHKDAIRAATHSRLWAADYGKIGQQRVVIKRAQERLSDRRRAAETFAADYGAGVDQVKALENLSFATGWDAFSVTALEKLLPELERGIKMGTLLNSPDYASWRQTNFPHRDAPTGEIVDRLPSAKVEEEARRIAKLRNPTVVRSQNELRKVVNNLIDFCGRKPDLIRVELARDLGKGKREREEIQSAIRKQEKRRKDAAKDLQSKGIAEPSGRDIEKWLLWKECQDKDPYTGDQIGFSELFLEGLYEVEHIWPRSRSLDDSFRNKTLCRKDVNQTKGNQTPFECFQTQPDQWDAIKDRLQGMISSKGGVGMSPGKVKRFLAESMPDDFASRQLNDTGYAARQAIEQLKRLWPDVGPTSPVYVQSVNGKVTAHLRRLWGLNHILGDTGEKNRADHRHHAIDALTVACAHPGVSHLLSRYWQMKDDPRSSGGEAPNIPAPWPTIRQDAERAAAEVIVSHRVRKKVSGPLHKETVFGDTGKDTQTKTGTYREFVRRKSVEVLTTGEYDDIRDDAVRQVMKAWLADHGGDPKKIDWSAYPRLTPDGPQIKRVRILVRQQIKLMAPVSTGYADLGSNHHIAIYQRPDGKAEFEVVSLFEASQRLARREPVVRRDRTGAKFVMSLAQGDQIRVPKGDKHGNWTVKKLSGNGQVFLKEHNAATPAKVGLWGPNPNTFLSDGFFKTSVDPIGRVRPAND

SEQ ID NO: 17263 - protein, 1049 aa, unidentified
  REGION 1..1049: note = Cas Enzyme sequence
MALVFGFDIGTTSIGFAAIEFDAQNQSGSIVHMGTRIFPEARDLDGTPLNQTRRTKRMMRRQLRRRRDRRRLLNETLAEAGLLPLFASGDWPRAMIADPIELRTRGLNEPLTPIELGRALYHLAKRRHYQGRDLEDDGTSPDSDSNDAEAADEKAARSSRETTVAALKASGQTLGQHISLLHQRDPKSRKRGVHALRHHIKDEFERLWLAQTPHHPALADPNLKAHIFDVIFSQRPVFWRLNTLGKCRFEPDAELAAKGGWLSAQRRMLEKLNNLQIAGGNARPLDDEERAAILATLQTQQSMSWGGVRGALKPIFKAKGLGTDTVRFNLELGGEPKLLGNPVEQKLATVFGHDWDNHPHKTAIRDATHSRLWAADYGKIGKQRVVIKRTQERAADRRKAAESFAADFGATAEQVNRLEALSFPTGWDAFSVSAIEKLLPELEAGRKMGELLAGPDYSQWRQTTFPRMEAPTGEIFDRLPSPKDKDEAARISQLRNPTVVRTQNELRKVVNNLIDFCGRKPDLIRVELARDLGKGKKEREEIQSAIRKQEKRRKEAAKDLQANGIAEPAPRDIEKWLLWKECQGKDPYTGDQIGFSELFLEGQFEVEHIWPRSRSLDDSFRNKTLCRKDVNQTKGNRTPFECFQNKPDQWDHIKLRLQGMIATRSGEGMSPGKVKRFLAESMPDDFASRQLNDTGYAGRQAIGQLKRLWPDVGPMAPVNVQPVNGKVTAHLRKLWGLNHILGDTGEKNRADHRHHAIDALTIACTHPGVTNQLSRYWQIKDDPRQGGGESPHIAPPWPTIRADAERAVAAVIVSHKVRKKVSGPLHKETVYGDTGEDTQTKTGTYREFVRRKQVEVLTKGEYDDIRDPHIRKIMQDWLAENGGDPKKINWKSYPRVSPTGPEIKRVRILVRQQIKLMAPVSTGYADLGSNHHIAIYQRPDGKAEFEVVSLFEASRRLARREPIVRREREGARFVMSLAQGDHIEVPSGEKCGAWIVKKLSANGQVFMKRHTDASPAKENLWGPGPNAFVSETFLKRSIDPIGRIRPAND

SEQ ID NO: 17264 - protein, 1109 aa, unidentified
  REGION 1..1109: note = Cas Enzyme sequence
MTIAPTDARIARVGFFNLIGVAMDTSLTRYAVGIDVGDFSVGMAAIKVGEDGMPQEILSAISHIHDSGLDPDNIQEARTRLEISGIARRTRRLFRHRRRRLIRLDAFIQSKGWGLPQNDESDDPYLPWRVRAELASRPIPTEEELGAKLSIAIRHIARHRGWRNPYSRVNSLMADVPPSDAFKAIQEHFSNILGRSFSDDMTLGQMVAACNLTNTKLRGKGGAISARLQQSDFAHEIRKICAMQEIDESTVREIIEHVFAAESPRGANATRIGKDPLQPSEDRALKATDAFQRYRIAALIGNLRVREGSGKRELSFNERKLVFDHLVHLEPKVEPDWTAVAEKLNIGRRDLLGTATTMDDGERAGARPPVHETNRRILTCSVKPLVKWWQEADDAERRAMLIALGNGSIEDYDDAQGAKVQAFFTDLPDEDIEKLDKLQLPVGRAAYSEDTLTKLTKAMLSNGVDLYTARRQVFGISEDWAPPVPEIGEPVGNPAVDRVLKVVARWLRAAENTWGVPESINIEHVRAGFMSRSKSLELDRDNERRAKRNLELFTQMQQKFGQDIKPSRADLWRYQSVQRQNGQCCYCGTTITYQNCEMDHIVPRAGRGSTNTRDNLVAVCHDCNLSKGNIPFAVWAEKSAKPGVSVAEAQERLRHWVCDPGLKTPQFRRFVKSVNDRLSRKTIDEELDARSIESVAWMANELRGRIAHKYRDAKVRVFRGQLTAEARKASGISKKIAFIDGPGKSRLDRRHHAVDAAVIAFMSAKVAETLAIRSNLKFDQELRKDAPQWKEFTGSTDAHKIIWSKWRNRMSALADLLQTALDEDRIVVMSNLRLRLGNGAVHEEKVRKLKKLKVGGPISAVDVDRASTEALWCALTRHPGFDPKEGLLADPDRNIRVQGRHLSADDTIEVFPVSAGAVAVRGGYVKLGRSFHHARVYKIADGNKVEYAMLRVYSIDLKKYKNEDLFTVELQPQTMTMRKCKSSLRKALAVGKAEYLGWLVVDDELHLDTAKFNTGQIVNIQEELGEITRWRVDGFKTESKLRLRPLQMSKEGIRKDMSEDVNKILDSEGWQPTVNKLFGVGKVTVIRRDALGRVRLSSNAHLPVTWTTG

SEQ ID NO: 17265 - protein, 1109 aa, unidentified
  REGION 1..1109: note = Cas Enzyme sequence
MTIAPTDVRIARVGFFNLIGVAMDTSLTRYAVGIDVGDFSVGMVAIKVGEDGMPQEILSAISHIHDSGLDPDNIQEARTRLEISGIARRTRRLFRHRRRRLIRLDAFIQSKGWGLPQNDESDDPYLPWRVRAELASRPIPTEEELGAKLSIAIRHIARHRGWRNPYSRVNSLMADVPPSDAFKAIQEHFSNILGRSFSDDMTLGQMVAACNLTNTKLRGKGGAISARLQQSDFAHEIRKICAMQEIDESTVREIIEHVFAAESPRGANATRIGKDPLQPSEDRALKATDAFQRYRIAALIGNLRVREGSGKRELSFNERKLVFDHLVHLEPKVEPDWTAVAEKLNIGRRDLLGTATTMDDGERAGARPPVHETNRRILTCSVKPLVKWWQEADDAERRAMLIALGNGSIEDYDDAQGAKVQAFFTDLPDEDIEKLDKLQLPVGRAAYSEDTLTKLTKAMLSNGVDLYTARRQVFGISEDWAPPVPEIGEPVGNPAVDRVLKVVARWLRAAENTWGVPESINIEHVRAGFMSRSKSLELDRDNERRAKRNLELFTQMQQKFGQDIKPSRADLWRYQSVQRQNGQCCYCGTTITYQNCEMDHIVPRAGRGSTNTRDNLVAVCHDCNLSKGNIPFAVWAEKSAKPGVSVAEAQERLRHWVCDPGLKTPQFRRFVKSVNDRLSRKTIDEELDARSIESVAWMANELRGRIAHKYRDAKVRVFRGQLTAEARKASGISKKIAFIDGPGKSRLDRRHHAVDAAVIAFMSAKVAETLAIRSNLKFDQELRKDAPQWKEFTGSTDAHKIIWSKWRNRMSALADLLQTALDEDRIVVMSNLRLRLGNGAVHEEKVRKLKKLKVGGPISAVDVDRASTEALWCALTRHPDFDPKEGLLADPDRNIRVQGRHLSADDTIEVFPVSAGAVAVRGGYVKLGRSFHHARVYKIADGNKVEYAMLRVYNIDLKKYKNEDLFTIELQPQTMTMRKCKSSLRKALAAGKAEYLGWLVVDDELHLDTAKFNTGQIVNIQEELGKITRWRVDGFKTESKLRLRPLQMSKEGIRKDMSEDVNKILDSEGWQPTVNKLFGVGKVTVIRRDALGRVRLSSNAHLPVTWTTG

SEQ ID NO: 17266 - protein, 970 aa, unidentified
  REGION 1..970: note = Cas Enzyme sequence
MNLLPQSDASKIIPELDRELLSKYADSFKSVETVNLDNLLPYWVRKRALDEQLESYELGRALYHLAHRRGFLSNRKSPQKADEELGKVKAGINELKQQITDSGSRTLGEFFAGLNPHERRIRSRWTHRDMYREEFDAIWQTQQQYMPEVLNEKQYSELYNAFFHQRPLKSAKHLVGKCELEPSCRRAPWATLEAQEFRMLQMLNNCQLITEDGEVKNFSDSQRTKLIEALEIQGDLKFSDAKKLLGLKRTAHFTLENGGESRFVGNRVNARMLQIFSQDWQTFDDAKKEQIINDLRCYQNPAALAERAKAIYGLPAAKAEEFADIELEGSYCNISRKAIRKFLPLLREGMTFPEAKKKLYPQKFQAVEPKNSIIPLAKHIDLRNPVVSRVLTELRKVVNNIVLKYGKPGIIRVELARDMKNNAVKKKALTKRNRDNERVRKAAAEKIAKETIVKNPRRDDILKLQLAEECNWTCPYTGRHFGMNDLFGGSPTIDIEHIIPFSRSLDDSYLNKTLCDAEYNRNVKKNMAPGEYLSPDSEAWNKIIGSVSRFKGDRDTIAEKLRRFKLSAAEIEEQLVEFSSSQLNDTRYASKVAADYLGTLYGGVNDAQGKRRIQATRGGTTAFLREMWKLNNILGDGVKNRGDHRHHAIDAIAVALTTPATIKTLSDAAVRECDRRTHKGRFKMPAMPWDNFWQDTKDAIDKIVVSHRVKRGINGQLHDTTNYAPVKIMGEKGKPVFHVRRQLAGLKSTEVEQIVNPVIRQAVKDKLDSLGISDPAKAFTDFANHPFVTAKSGKTIHIHKVRISVSASPQAIASGPRERFCNTASNHHMEVFAVLDKDGNEIRWDAVVVSMLEAKQRLKALYKQKHKDKNFKIGSIVNRNHGPNTKFKFSISPGDTLQFENPSEKMPTLVHLKCVPFSQQLMFTSLNDARLQKESKAAKEWFSSKVDPLRKLKPQKVMVLPLGEVIPAND

SEQ ID NO: 17267 - protein, 1055 aa, unidentified
  REGION 1..1055: note = Cas Enzyme sequence
MPIRLGLDVGTNSIGWALIDTDTGRIIDLGSRIFSDGRDPKSGASLAVDRRDARAARRRRDRYLGRRSAFLETLISHGLMPENADEAKLVEVKDPYDLRARALDERLEPHEIGRALFHLNQRRGFRSNRKAERGRKETEDGKIETGAKALDAAMKDAGARTLGEFLNGRETKRVRMGGENQSYDFYPQRRHVEAEFGEIWNAQAPHHPGLLTEETRAALHRILFFQRDLKDQEVGKCTFAGWNGVPDDERRLAKAHPLFQERRLYEEVNNLKIVSPGAADRDLTLAQRDALILKLRSTRKSSFSALGKLIKLDDGERFNKESETRKDLLGDEVRAELADKKRFGDRWGFLDLDEQLKIIDRIHNEENPEVLLDWLKAEYGLDEEAAVAVGKARLPEGYGRFGETATRRLIEALKAGVVTYDKAAQAAGFHHSDLRTGEVWDRLPYYGQILTTEIAPGKAEYGDENERRFGKITNPTVHIGLRQLEKLINAVIAVHGRPDEIVVELARELKLNEEEKKKHEARIRRDTAAAVARGEKLEAEGIPDNGANRMVLRMWEELNPSNPLDRRCPYCGEVIGIRALFSGEADVDHIIPYSQSLDDSAGNKIVAHRSCNRAKGNKTPYEKWGHDEARWEIISAQVARMHRSKQWRFGPGARERLEKDGGFEARQLTDTQYLSRATAKYLSALYTPDEGRRVYALPGRMTAMLRRVWGLNSLLPDHNYVENAHSNAPKNRLDHRHHTIDGVVAAVTDIGLMQRIATAAGRAEEKELDRIFEELAPPWPTFRDDLKDRLARVTVSHKPDHGRKGRPSPNRDVTAGRLHNDTAYGFTGEVAADGKTPIVVHRVPFASLKPGDIADPTRIPDEALRNALFAATRDLSGKPYDQALARFAKEHPIFKGIRRVRVREALNVIAIRDKEGRPYKGYKGDSNARYDVWRLPDGKWVADIVSMFDAHRPDRGDRRPHPAAKKVLSLRQNDLLAVERDGETQILRVVKFSSTGQITLAAATEAGALKARDAAPQDTDPFKYIYSSGSGLKKMLARQVRIDPLGRVFDPGPRP

SEQ ID NO: 17268 - protein, 1064 aa, unidentified
  REGION 1..1064: note = Cas Enzyme sequence
MKDLEYTLGLDMGVASLGWSVVSTKKRFIDSGVRIFPAGTDNFNSAKEKHPNVDRREARGMRRRIRRKAERKKLIRGILQELGWMPTDSEKLEDWLNLNVYELRSRAVSEQITLEELGRIILHINQRRGFLSLRKTEESSADAETKGMLGEISALQKDIESTGAKTLGNYLYQIYDKEGIQIKIRSRHIRRSMLHDEFALIWEAQSKYHSDLTDQLRFGRIGKREKPTKVVTPAPREKNKSMLEQFGIENITFFQRRVYWPASSIGNCELEPSEKRSPIADRRFQEFRMLQEINNLKILDNSNPDIPQERNLTEQERELAIAYISGKKEVKFEQLKKYLCKNKDLKGTLPEAYSQISFNLESGGRSKISATPTDALLAGKNGLGKDWLDLSEASKNKIIEALTLPAATDDDIRSALEEIPELKSDKVIALLKLSLPTGYCHLSTKALEKLLPHIREGKLYMAKDEADSAMHAAGYTRRDEKKHTTVNLLPTFDALLNPNSKDYDPHQVEINNPVVLRALTELRKVVNGLVKKYGTPTRINLEMARDVKMSPKQRSEHQKQSRQFEKERDQAAKALADYGIIPNGDAINMYRLWQDQDEVCIYSGKAIGISQLFGGEVDVDHIFPFSRSADNSFTNKVVCFAKENRDKGNKTPYEWLYASEHDKFEEILQRAKKLPRGKYKRFIATEIPEGFVNRDLNDTSWMAKAALHYLARLLPKKHHILAIKGRHTATLRSQWELHGLLRDDALNLKNRDDHRHHALDAIVIALLDQNRLQQITKKIKYQMRDKEAKEAGKRIYRLKARGEKLDLPWDSFRLDVAESLNSMWVSHRSKRKVSGALHKETNYGKTRDGLLVLRKPVQGLSKKEVEGICDPMIQQVIKDHIKDNGGDRAAALAAISEESPLQMPSGIPIRKVRTAIPYAHITIREGTEHETYVQSAATHHVAIFSLGDEKYHLEPVTLYEASRRKRSNEPIVQKTYDEMPPEAEFLFHLCSGDSMMATIDGQDQLFIFKTMPVTSKQARFHMHTDARPSKEAKSFSCMPNTFEKNFHDARKVNILPTGEVRSAQ

SEQ ID NO: 17269 - protein, 1070 aa, unidentified
  REGION 1..1070: note = Cas Enzyme sequence
MKDLEYTLGLDMGVASLGWSVVSTKKRFIDSGVRIFPAGTDNFNSAKEKHPNVDRREARGMRRRIRRKAERKKLIRGILQELGWMPTDSEKLEDWLNLNVYELRSRAISEQITLEELGRIILHINQRRGFLSLRKTEESSADAETKGMLGEISALQKDIESTGAKTLGNYLYQIYDKEGIQIKIRSRHIRRSMLHDEFALIWEAQSKYHSDLTDQLRFGRIGKLEKPTKVVTPAPREKNKSMLEQFGIENITFFQRRVYWPASSIGNCELEPSEKRSPIADRRFQEFRMLQEINNLKILDNSNPDIPQERNLTEQERELAIAYISGKKEVKFEQLKKYLCKNKDLKGTLPEAYSQISFNLESGGRSKISATPTDALLAGKNGLGKDWLDLSEASKNKIIEALTLPAATDDDIRSALEEIPELKSDKVIALLKLSLPTGYCHLSTKALEKLLPHIREGKLYMAKDEADSAMHAAGYTRRDEKKHTTVNLLPTFDALLNPNSKDYDPHQVEINNPVVLRALTELRKVVNGLVKKYGTPTHINLEMARDVKMSPKQRSEHQKQSRQFEKERDQAAKALTDYGIIPNGDAINMYRLWQDQDEVCIYSGKAIGISQLFGGEVDVDHIFPFSRSADNSFTNKVVCFAKENRDKGNKTPYEWLYASEHEKFEEILQRAKKLPRGKYKRFIATEIPEGFVNRDLNDTSWMAKAALHYLARLLPKKHHILAIKGRHTATLRSQWELHGLLRDDALNLKNRDDHRHHALDAIVIALLDQNRLQQITKKIKYQMRDKEAKEAGKRIYRLKARGEKLDLPWDSFRLDVAESLNSMWVSHRSKRKVSGALHKETNYGKTRDGLLVVRKPVQGLSKKEVEGICDPMIQQVIKDHIKDNGGDRAAALAAISEESPLQMPSGIPIRKVRTAIPYAHITIREGTEHETYVQSASTHHLAIFSLGDEKYHFEPVTLYEASRRKRSKEPIVQKTYDEMPAEAEFLFHLCSGDSMMATIDGEDQLFVFNTMATSSGQVWFAHHTDAAKAHKHPDTGVSLLRSCMSGSFEKKFPYARKINILPTGEVRSAQ

SEQ ID NO: 17270 - protein, 1067 aa, unidentified
  REGION 1..1067: note = Cas Enzyme sequence
MNTHNYILGIDMGVASIGWGAVSVESKWLDCGVRVFPAGVDNFNSPKEKHPNLDRRSARGMRRRIRRKAERKAIICGFLQELGWMPPAGAERDDWYALDVYALRSRAISEKISLAELGRIILHLNQRRGFLSLRKSETSAADKETQGMLGSITELQREIDASGHRTLGNYLHHLYLAKGLSVRLRNRHTRRGMLHHEFSLIWETQEAFHPELSDSLRYGRVGRLANPTTVVKPAPRQKGVSLLEHFGFESLTFFQRKVYWPPNSIGRCELEHEERRAPVADRRFQEFRMLQEVNNLRLIDNSEPGIPTERALTPDERQECIDYLSGRKEAALIGLRKHLCKQRKFRGSLPESPDQISFNLESGGRTKISVLATDYLLARAYGKGWEMLDEAKRNEISDALLEPAATDDDIRAALEAIGEVSPEQIDMLLGVSLPTSYGHLSVKALEKLLPHMRDGKLYMARDGSDSAMHAAGYRRRDENEASELDVLPSFQSLLNPDSPDYDPLQSEINNPVVLRSLTELRKVVNAIIRKYGKPERIHLEMARDLKMSPKQRAEYQKRIRDFEKEREDAAKELELLRIVPNRDAIELYRLWKEQDHVCIYSGKTISSSDLFNGDLDIDHIYPYSKSADDSMSNKVLCYAIENREKGNRTPCEWLADRDADRFEQVLQRAKNLPRGKYKRFLSREVPEGFVNRDLNDTAWMARAARQYLSRLFPKPHHVLGVKGVHTALLRDRWGLHSLLRDDGLNLKNREDHRHHALDAIVIALCDQTAIQRLTRACAFELRRKEARESGKRIYHLRATGDGSDAPWEGFREAVGTALNGIWVSHRPRHKVSGSLHKETNYGKKPDGKLVVRKKVKDLSKKEIEGICDPAIKGIITAYIERKGGEIAALKEIPENQPLCMPSGIPIRKVRTAISYAHITIRSGTPHETHVQSASTHHLSIFALGDGKYHFEPVTLFEATRRLRVKESVVQKQYEGMPPEAKFMFYLCSGDSMMATIDGNDELFVFNTMAVTSKQVWFAHHTDAAKAHKPEKTEKSILRSCMESTFGQNFPQARKVTVLPTGEIRDAS

SEQ ID NO: 17271 - protein, 1130 aa, unidentified
  REGION 1..1130: note = Cas Enzyme sequence
MRSYTLGLDMGVASIGWAAVSADEKKIESGVRIFPPGVDKFGTGKDTHLNQKRRQARGARRRQRRKGDRKLLIRKILTGLGWVPNAPEKLHKWEQLDVYMLRAKAVKERVELDELARIILHLNQRRGFLSLRKSEVAAAEGDAKKELEGMLGEIDALEQAIQDSGSLTLGEYLYGLYQKDGISVRLRNRHIRRQMLHKEFSLIWEKQAEFHPELTDALRYGSFGKREDPVAVVKPVPRTSGETHLQQFGIENLSFFQRRVYWPISSIGRCELEPNELRAPVADRRFQKFRMLSELNNLRLLDQSAIGKPTERKLSVGERAVALVYLSSTQKPTFGGLRKAVAKAPGAPSVRQIVFNLENGTRDKISGLVTENQLRKAVGEAEWDKLSEDEKNQIVEVLTLPESGQSKVIQRTDSETKDLLVELSTLKIKQIEKLLRVPLPSGYCGLSIKALEKLMPHMEAGFGFQGKDETDSARHLAGYPRRDETVKATYDLLPRLEAMSDRNDEHYDPNFPDVNNPLVLRALHELRKVVNGVIRKHGKPARIHVEMARDLKMHGKRRDEYIKKQRDRENERDRAAEALEEHGVLATRDAITLYLLWEEQNKACAYSHPARMISIQQLLGGEVDIDHIYPRRANDDSYMNKVVCFASENRQKSDRLPSKWLENNPEKYEALVQRSKSLPYPKRLRLLADSVPEDFAARDAVDTAYMTKVARHYLTCLVDQPHLVFCTKGKHTALLRRHWEINDLLRDDLLDVKNRDDHRHHALDAIVTALCGPDLVQKLSKELHYENRWKDFKKDLEKDREKNGKERVVRRVYRLKPIADGIDSPWEKSTFRESVKSSLDRIWVSHRPSRKLSGPLHEETNYGATQTPGEIVRRKPLSSLTEKEIEKIRDVTVRQVVKDYLVKEKRLYRQDFGKALKGDLAAVFSERDSITTDDIKAVPEAKLRGILEKKLKSKNPLVDADHGLIKLPSGIPIKKARIVSRSGAAVPRRQAVGHELVVPGNTHHVAIFVLSDGSHHFVPVTLLEASRRLKERKPVVDPTPPVECPDAEFLMHLCSDDSILAEVDGITELFVLNTISSGTLQMAMLHHCDARDSKNRKPVRCRPGTFAKNFPNARKVTVLPNGELRNIDRQ

SEQ ID NO: 17272 - protein, 1046 aa, unidentified
  REGION 1..1046: note = Cas Enzyme sequence
MASELVFGFDIGTTSIGSAVVRMDSNAETGSILHLGVRIFPEARDPEGIPLNQERRKRRMMRRQLRRRRVRRRDLNSLLTDSGLLPPFTKEMGSPWSIAMAQDPWVLRAQALDRALSPTELGRVLYHLAQRRHFRGRDLEGPAADLADSKEAPTADEQKAASQREKDRSTLKASGLTLGAFMAGIPDRTERRRGHHFAREDVSAEFRAIISAQLPHHSKLRDQDLGTALEQTIFDQKPVFWRKATLGACRFMPDAELAASASWVAQEKRMLEKLNNLRIEEGNGRPLDDQERAAILNLLRKQDRVSWAGIHRHLKLYWRKHDLSEKPTFNLQRGGEKGLVGNRLENRLATIMGTRWETDPALQERMRREIHARLYAADYGQIGGRIVIRREAESLQERTRERERLRADFALSEQQADEIAKLSFAPGWEPFSEAALWQFLPRLQQGAVFGSLLASPEEEAWRAITFPQRAQPTGAWVDRLPTPGNSLEEVERQKSVRNPTVLRVQNELRKVVNNLIAVYGRPDRIRVEVAREVGKSARERAEGLARNREREKERKKAAEELQKCNITEPSREDIEKWLLWQECKHQCPYTGQMIDFAALFHRGEFQVEHIWPRWRSLDDSFANKTLCQRDFNLRKSNRTPFEVFENDQKSWEEALRRVQAFLGPPGRVAIKARRFAASAIPEDFAARQLTDTGYAARQAVGFLKMLFPDLGQTGEVRVATLSGRVTSRLRHNWGLNNILSDSGGKSRADHRHHAIDALVAALAHPGYTQRLSRWFQARDSATPQPEPELRPPLPDVRHQAEKKVAETIVSHRVRKKVSGPLHKDTTYGDTGPAGGTGGIAYRWFVTRKSVGALSKSLLAEDEAWPDPHVRDRVRAWVAANGGDPKKAFANGYPTVSEGGAPIRKVRIKFKQQQKLMAKLKNGYADLGNNHHMAVFRRADGRVENEIVSLFEAADRLRRKQPVISRPETGLSFVMSLAQGDTLLFPGGELKGLWIVQSVWSAGPVVLWRAEDAEGNSVFRPTAASILKSGGRKVSVDPIGRIRTARD

SEQ ID NO: 17273 - protein, 1051 aa, unidentified
  REGION 1..1051: note = Cas Enzyme sequence
VEIKGMASELVFGFDIGTTSIGSAVIRMDREAESGEILHLGVRIFPEARDPKNVPLNQERRKRRMMRRQLRRRRQRRQELGALLAESGLLPPFGKDRGTAWSKAMAQDPWPLRSRAHEEALRPYELGRVLYHLAQRRHFRGRDLEADQGEEKKIADEASQEEAKAASQREKDRNALKKSGLTLGAFLAAIPDRSARRRGHHFAREDVIEEFRAIVAAQAPHHGALRNPDFVNALEQAVFNQRPVFWRASTLGQCPFIPSAALAASACWVAQEKRMLEKLNNLRIETGNGRPLDDHERKAILDLLRKQDSVSWNGIRRHLKLYWRKHDLAEKPTFNLERGGEKGLVGNRLENRLAAIMGERWNADQHLRESMRQEIHARLYAADYGQIGERIIIRREAERREERTRVRERLKADFALTDEQADALVALTFAPGWEPFSEEALWKFLPRLEAGAVFGALLNGPEEEIWREETFPNRARPTGSWVDRLPTPGNSREEIERQKSVRNPTVLRVQNELRKVVNNLIDAYGKPDRIRIEMAREVGRSARQRAEDEKRMRAREKVRKDAVQDLRSKGIAEPSRRDIEKWLLWKECRGVCPYTGENIAWNDLFGISPRFDIEHVWPRWRSLDDSFFNKTLCRKDFNLEKANRTPQELYEGRPDELARVINRVRQFDDRFGPGWRKVDRFLKPIPDDFAARQLTDTGYAARQAVGFLKMLFPDLGQQGELRVATVSGRVAAQLRRLWGLGNILSDDGEKTRADHRHHALDALVVALAHPGYTQQLSRWFQARDSVQAIPEPVLDPPLPDVRAQAERKVQEIVVSHRVLRKVSGPLHKDTTYGDAGPAEGTGGIAYRFFTTRRPVEKLTNALLADEEAWPDPHIRETVRAWVEAHGGEPKKAFVNGYPTVSEGGPPIRKVRIRIKQQEKLMARLKNGYADLGNNHHAAVFRCSDGRIETDTVSLFEAATRLRHRQPVVCRSKEGAEFVMSLAQGEILAFPDGKLKGLWVVQGVWSAGPIVLWRAEDATGATVFRPTAASILKSSGRKVSVDPIGRIRPARD

SEQ ID NO: 17274 - protein, 1043 aa, unidentified
  REGION 1..1043: note = Cas Enzyme sequence
MRVFGLDIGTTSVGFAVIDLDETRESGQILRLGARIFPEARDADGTPLNQQRRAKRMMRRQLRRRRQRRRSLNELLAAHGLLPRFGSLEWAKVMAADPYALRDRGIAAPLAPHELGRALYHLSKRRQFKERDLAESEGERDDKEKPEEVEDAKARDSFVAALRASGQTLGQALARRDSIAERKRGEHATRAIVLDEFKRLAAAQSAHHPMLRDRAFVGALEEAIFAQRPVFWRKSTLGRCPLVLDAPLCPKGSWLSQQRRMLEKINNLAIAGGNARPLDAEERAAILDALAAQKSMSWGGVREALKPIFKARGESSKSVRFNLEYGDERGGLKGNLVEAALAKVFGDAWASHQHKQALREFLPDALWQCDYGEVGTQRVVIRPEADRARRRAVLADRLAADYCASRDEAEALTKLHFPQGWEPYSAKALERILPELEKGERFGTLLASPEKETWRDETFPNRDRSTGEILDKLPSPSPKNRDEERRIASLRNPTVVRVQNEMRKVVNNLIDAYDKPDLIRVELAREIGLSKREREERTAGMRANERRRAKAADDLRANGVDRPEARDIDKWVLWQECQKKCPYTGDAIGFDDLFRSGRFQIEHIWPRSISFDGSLRNETLCRQDVNIAKGNRTPFEYFRNRPEEWARAKDRLDAMVREKAMPRGKAKRFVAETMKDDFTARQLVDTGYAARQARAMLQRLWPDLGPTAPVNVQAVTGRVTAQLRRRWGLNHILAEDGEKTRADHRHHAVDALVVACAHEGYTQKLSRYFELEDLHRKGLGAKPNEAECPPPWPTIREDAAKAVAEIVVSHRVRKKVSGPLHLETIYGDTGVDETKGRAAYRLFVTRKPLERLTKGEVERIVDDRVRNAVKDWVAAHGGDPKKAFAKDFPRVGADGAPIRKVRLRMPQQIALMAPVSTGFADRGENHHVAIWRRADGAVASEVVSLFEASRRLARKEPIVRRARGESETFLMSLSRGDALQFPDGKMQGVWIVQGVWAAGPIVLFHANDATGETVTRPNASSIVGAGAEKISVDPIGRVRPAND

SEQ ID NO: 17275 - protein, 1049 aa, unidentified
  REGION 1..1049: note = Cas Enzyme sequence
MTLIFGLDVGTTSIGFAVISHDHGSEPAKGRIERLGVRIFPEARDPKANTPLNQDRRAARLRRRHLRRRRQRRQDLNKVLSEAGLLPFPDSQQWSVVMKADPYALRKRAFQGEELTPHEVGRAIYHLAQRRHFKGRDLDEISGSDQESKPDKKDPAAAEEAAGKEAALQTSEKLKKEGKTLGSWLAEKGPHERKRGERATRQDVEDEFNGVWRPLLAGDVGEKVHDVIFHQRPTFWRLNTLGQCRLVPGAPPCPKGSWLSQQRRMLEKLNNLELGGGLGERPLTSEERNAILKKLQTQASMTWAGVRRALAPVYRSQGEAGLEKGLKFNLEEGGEKKLLGNPLEARLAAILGATWENHPHKQAIRDAVPDAIWRANYREEGQRVLIVPAKERQQRIGEAVGQLKERFGLSEEEAGKLIQEKLPVGWDAYSKEALQKILPLLEAGIRFGAILNSTDSHMESWRKENFPNGVPQAENSEGLARLPSPANQEERKHLATLRNPTVARARNELRKVVNNLIHMFGKPDLIRIELARDVGHSKREREEKAKAMKAQEKRREEARKALKEHHIAEPSREDIEKWLLWKECDHRCPYTGNHICFDALFHRGEFEVEHIWPRSRALDDSFRNKTLCRSDVNQRKGNQTPYECFQRDPKEWEAICERLKMKSSKKGQGRMSPGKVKRFLAEEIPEDFTSRQLNDTAYGARDAVAYLKKLYPDLGPQGPVKVSAVSGRVTAQLRRLWGLNNILADTGEKNRGDHRHHAIDALTVACTHPGMTQKLSRYWQAKDEGRVKDLQLEKPWETIRADAETAVKDIIVSHRVRKKVSGPLHKETVYGDTGNEVEEKGVTYQYFVTRKNVEALTKSELDKIRDQHVRAIIKRHVEEHGGDPKKAFPSYPKHSPKGQEIRKVRLLIKQQQKLMAKVSTGYADESSNHHIAIYRLPNGNVVHHTVSLLEASRRLSRQEPVVQRERGDGAQFVMSLSKGDSLMLTKDNQDRIMIVNSVSSKGQVVLADHDDAKKDKKDLFSPRARPLVEVYHAKKISVDPIGRVRPAND

SEQ ID NO: 17276 - protein, 1049 aa, unidentified
  REGION 1..1049: note = Cas Enzyme sequence
MASAIVFGFDIGTTSIGSAVVRMDDTAGTGNILHLGTRIFPEARDPDGIPLNQERRRRRMVRRQLRRRRARRRALNSILGEAGLLPPFSKGKDSAWVATMALDAWSLRTLALSEAVTAHELGRALYHLAQRRHFRGRELEEADGEGAETAGASSADEQKAASQRESDRSALKASDSTLGAFLAAIPERTERRRGHHFAREDVAAEFRAIIAAQAQHHEKLREADFVAALEQTIFDQKPVFWRKATLGSCKFIPDAELAASSSWVAQEKRMLEKLNNLRIEDGNGRPLDEHERATLLDLLRTQDSVSWGGIRRHLKLYWRRHDLPEKPTFNLERGGETGLVGNKLENRLADIMGDRWNQELDLTNRMRRQIHARLYAADYGQIGGRIVIRREAERRRARAAEKELLKVDFGLSEEQAESLVALTFAPGWEPFSEDALWQFLQRLQEGAVFGALLAGPEEESWRASTFPSRQQPTGNWVDRLPTPGNSKEEIERQKAVRNPTVLRVQNELRKVVNNLISVYGRPDRIRVEVAREVGKSARERAEDLKRNRDREKERKKATEELQNGGIAQPTRDDIEKWLLWQECNRQCPYTGQMIDFAALFHRGEFQVEHIWPRWRSLDDSFANKTLCHRNFNLRKSNRTPFEVFEHDADGWEAALTRVRAFAGPPGRVAIKARRFAATEIPADFAARQLTDTGYAARQAVGFLKMLFPDLGQASEVRVATLSGRVTSRLRHNWGLNNILSDSGEKTRADHRHHAIDALVVALAHPGYTQRLSRWFQARDAATQQPEPPLDPPFANVRVQAERKVAEITVSHRVRRKVSGPLHKDTTYGDAGPADGGGGIAYRWFVTRKPVEALTSKLLAKDEAWPDAHVRDRVRAWVNEHGGDPKKAFVNGYPTVSEGGPPIRNVRIRVKQQHKLMAPLKNGYADLGNNHHALIYLRPNGKPDFQIVSLFEAATRLRKGLLPIDNSDKGSLKFRMSLAAGDTIRLTGDRAGLWIVRKLSANGQLTLWPINDTDAEKHKTIFEPTIGGMISRGMEKISVDPIGRVRPARD

SEQ ID NO: 17277 - protein, 1052 aa, unidentified
  REGION 1..1052: note = Cas Enzyme sequence
MERIFGFDIGTTSIGFAVIDHDPNAATGLIRRLGVRVFPEARDRVGTPLNQTRRQKRLVRRQLRRRRQRRRVLNQTLAEAGLLPPFNSAAWAAVMHLEPYGLRQRGLNLALTAHELGRALYHLAHRRHFRGRDVEETDKEESRDAEEKEARTEAEQTSKTLKDAGTTLGAWLAGRDPHASRRRGVHALRTDVRDEFETLWEAQAAHHPVLRQSGFKARVEDAIFAQRPVFWRWKTLGTCRLIPGEPPCPKGSWLSQQRRMLEKLNNLALAGGNARSLEPDERAAILDKLQTQASMSWAGVRAALKPIFNRQGDPGAEKKLRFNLELGGENKLLGNPLEARLAAIFGAAWAAHPHKHAIRTAVHDRLWSADYREIGMQRMVNCSERERRADPQRVVIRSERERQANREAAAASFTRDFNVTPDQAEQLRRLTFPAGWEPFSTSALEVLLPELEAGERFGVLLSGPEKEAWRNAAFPQRQQPTGEILAKLPSPRERDERERLAKIRNPTVVRVQNELRKVVNNLIGLYGKPDRIRVEVARQVGLSKREREEKQSAIRRNESRRRAATRELEANGIAEPSRTLVEKWLLWQECRERCPYTGDPISFEALFDEVRFEVEHIWPRWRSFDDSFANKTLCRKDVNLAKADRTPYEYLHHDKRQWEDLKVRLQGMMASRGGDGMPPSKVRRFLADAIPDDFASRQLNDTGYAAREAMACLKRLWPDVGPQAPVTVQAITGRVTAQLRNLWGLKNVLADDGRKTRADHRHHAIDALTVACADQGMTQRLSRYWQAKDDPHPLEPDLPPPWATIRADAAAAVAAIVVSHRVRKKVSGPLHKETTYGDTRQDVTTASGSYRCFVTRKAVATLSKGELGDIRDPRVREIVQAWVAARGGEPKKAFPPYPRLGTGGPEIRKVRLLSKQQLKLMAPASTGYADLGSNHHIAIYRLADGKADFEVVSLFEAARRLARREPVVRRDGGDGATFVMSLAPGDAVEFPSGERKGIWVVTGVWGDGRAVLEQHLDAAGTTTTRPNANSLIRDRVRKIAVDPIGRIREAND

SEQ ID NO: 17278 - protein, 1034 aa, unidentified
  REGION 1..1034: note = Cas Enzyme sequence
VERIFGFDIGTTSIGFAAIDFDKDRSRGRILRLGVRIFPEARDPDGTPLNQTRRAKRMARRQLRRRKQRRRTVNELLAAAGLLPPFGSEEWRELMAKDPYELRDCGLSEALTPHELGRALYHLGKRRHFKGRDIEETDQKDADSPDEKAAATNRDATLAALKASGGTLGQWLARRPNGERKRGYHATREVVREEFDKLWTAQAAYHPVLSNDVLRGQVADAMFAQRPVFWRKSTLGHCRFEPGAPLCLKASWLSQQRRMLEKLNNLALAGGNVRPLDPEERAAILARLQTQASMSWGGVREVLKPLYKARDESSRNLKFNLEVGGEPKLLGNAVEQKLAAIFGDAWGSHAHKDGLRREIAQRLWDADYGHLGKQRVVILPADERARRRAKMRDDLIADFDVTSTQAQALSDMKLPTGWEPYSSAALEKVLPELEQGVRFGALVNGPEWENWRDNAFPNRDRPTGEFHDRLPSPRNSDEARRIAQLRNPTVVRAQNELRKVVNNLIDMFGKPDLIRVELARDVGKSKREREEIKSALRKQERRRKEAEKDLQSKGIAIPSRADIEKWLLWKESQEQCPYTGDHIGFDDLFRTNRYQVEHIWPRSKSLDDSFRNKTLCRTDVNVAKGNRTPFEHFEHQAETWNQIKLRLDKLMGKDGMPPGKVKRFLAETLPDDFAARQLNDTGYAARQAKDMVKRLWPDVGVDAPVSVQAVNGRVTAQLRKRWGLNNILSDDGEKTRADHRHHAIDAVTVACAHGGYAQRLAAYFKEESEGRTPHLAEPWPTIRADAASAVSEIIVSHRVRKKVSGPLHKETTYGDTGRNDAKTGAYRLFVTRKRLEAMTKAEVFSEDPEVGIVDPQIRKDVQEWVRNHGGDPKKAFETYPQVNGNSQEIRKARLTTKQQPTLMARASTGYADLGANHHISIYRRVDGKIGYEVVSLFEATRRLARRQPVVQRNSTDGSAFLMSLAAGETIQFETGSMKGLWIVQGVWASGQVVLCASNDAANATITRPMPNSIITGNARKVAVDPIGRVRPSGD

SEQ ID NO: 17279 - protein, 1079 aa, unidentified
  REGION 1..1079: note = Cas Enzyme sequence
MHVNVLFSCDQWGDVIVACIFGFDIGTTSIGFAVIDHDSELETGGILRLGVRVFPEARDPDGTPLNQTRRQKRMVRRQLRRRKARRRSLNELLAKSGLLPTFRSDDWPAVMAIEPYALRKRGLEEALSAHELGRALYHLAKRRHFHGRDIEDEEPGEKEKDDADEKAAKTERESTLQALKAANTTLGAWLADRGPHDRRRGVHAQRKVVEEEFEKLWIAQETHHPILKDEAFKAEVEDAIFKQRPVFWRKNTLGQCRLMPGEPLCPKGAWLSQQRRMLEKLNNLALAGGNARPLDAEERAAILEKLQTQASMTWGGVRAALKPLFKQNGDPGGEKKLKFNLELGGESKLLGNPLEAKLADIFGPAWAGHPQKQAIRDAVHQRLWSADYGEIGGRRVVILAECQRRANREKAAESFVRDFDVSPEQADKLKALTLPTGWEPFSTRALEAFLPKLEAGVRFGELVNGPDWEDWRNVTFPNRDRPTGEILPRLPSPKDKEERERLAKLRNPTVVRAQNELRKVVNNLIGMFGKPDLIRVEVARDVGLSKREREEKQSGIRKNERRRREAVRDLETNGIAEPSRDTVEKWLLWKESRERCPYTGDQIGFDALFREGGFDVEHIWPRSRSFDDGIRNKTLCRRDVNLAKGNRTPFEYLGHDGDRWAAIQARLDGLMAKKGGDGMPPGKVKRFLAESMPDDFAERQLNDTGYAARQALACLKRLWPDVGQKAPVTVQAITGRVTAQLRELWGLNNILSDDGRKTRADHRHHAIDALTVACTHPGMTNRLSRYWQAKDDLRAQQPHLPPPWPAIRADAEAAVGRIVVSHRVRKKVSGPLHKEMPWGYTEQDIAKDGRSLRVYVKRMPVEKLGLETLKISRVEDISRTAKFVVRDEAIRKTLLRHLEAANVLPTKAYPPYPRVSPDGPEIKKVRVLTVQQKNLMMPVSKVRDPASRAKRPNGFADPANNHHIAIFRLPDGRADFEVVSLFEAARRLARREPVVRRTRDDGAAFVMSLAPGDAIEFPAGEKKGIWIVQGAWANGQVVLSRLTDAVGSTVTRPNPGAVLREGGRKVSIDPIGQIRPAND

SEQ ID NO: 17280 - protein, 1079 aa, unidentified
  REGION 1..1079: note = Cas Enzyme sequence
MHVNVLFSCDQWGDVIVACIFGFDIGTTSIGFAVIDHDSELETGGILRLGVRVFPEARDPDGTPLNQTRRQKRMVRRQLRRRKARRRSLNELLAKSGLLPTFRSDDWPAVMAIEPYALRKRGLEEALSAHELGRALYHLAKRRHFHGRDIEDEEPGEKEKDDADEKAAKTERESTLQALKAANTTLGAWLADRGPHDRRRGVHAQRKVVEEEFEKLWIAQETHHPILKDEAFKAEVEDAIFKQRPVFWRKNTLGQCRLMPGEPLCPKGAWLSQQRRMLEKLNNLALAGGNARPLDAEERAAILEKLQTQASMTWGGVRAALKPLFKQNGDPGGEKKLKFNLELGGESKLLGNPLEAKLADIFGPAWAGHPQKQAIRDAVHQRLWSADYGEIGGRRVVILAECQRRANREKAAESFVRDFDVSPEQADKLKALTLPTGWEPFSTRALEAFLPKLEAGVRFGELVNGPDWEDWRNVTFPNRDRPTGEILPRLPSPKDKEERERLAKLRNPTVVRAQNELRKVVNNLIGMFGKPDLIRVEVARDVGLSKREREEKQSGIRKNERRRREAVRDLETNGIAEPSRDTVEKWLLWKESRERCPYTGDQIGFDALFREGGFDVEHIWPRSRSFDDGIRNKTLCRRDVNLAKGNRTPFEYLGHDGDRWAAIQARLDGLMAKKGGDGMPPGKVKRFLAESMPDDFAERQLNDTGYAARQALACLKRLWPDVGQKAPVTVQAITGRVTAQLRELWGLNNILSDDGRKTRADHRHHAIDALTVACTHPGMTNRLSRYWQAKDDPRAQQPHLPPPWPAIRADAEAAVGRIVVSHRVRKKVSGPLHKEMPWGYTEQDIAKDGRSLRVYVKRMPVEKLGLETLKISRVEDISRTAKFVVRDEAIRKTLLRHLEAANVLPTKAYPPYPRVSPDGPEIKKVRVLTVQQKNLMMPVSKVRDPASRAKRPNGFADPANNHHIAIFRLPDGRADFEVVSLFEAARRLARREPVVRRTRDDGAAFVMSLAPGDAIEFPEGEKKGIWIVQGAWANGQVVLSRLTDAVGSTVTRPNPGAVLREGGRKVSIDPIGQIRPAND

SEQ ID NO: 17281 - protein, 1042 aa, unidentified
  REGION 1..1042: note = Cas Enzyme sequence
MALVFGFDVGTTSIGFAAIDFDPDAETGRILRLGARIFPEARDPKGIPLNQTRRRKRLVRRQIRRRRQRRRDLNRLLTEAGLLPSFGSTEWTKLVNPNDPKLGEQPDQLRARGLTEALKPHELGRALYHLAKRRHFAERELAETDAEEVDDDEKDAASARDGLKSHLKKSGETLGQFLAGREPRDRKRGHHATRDIIRDEFEKLWTAQAAHHAVLRDVDFKASFSETMFMQRPVFWRVNTLQTCRLIRGAEPAPKGSWPSIQRRMLEKLNNLGLAGGNQRRLDPEERDAILARLQIQGSMTWAGVREVLKPLFERRGEGTKHLKFNLEEGGERVLIGNPLEAKLADIFGSAWSSHPRRDDLREAAHAWAWAADYGTVGARVVIQSADRRRAGRQAMADRLIADFGVTAEQAAAVASLSHPSGWDAYSRKAIGLLMPELAQGTRFGDLIAAPEFAAWRDATFPDRVQPTGEVLARLPSPADGEERERIATIRNPTVVRVQNELRKVVNNLIDFCGRKPDLIRIELARDIGLSAKERDEKISGQRKQEGRRARAAENLIANGIVGPSSRDIERWLLWKECGQECPYTGLPISFEALFKDNRFEVEHIWPRYRSLDDSFRNKTLCEKAENLRKRNRTPYEAYANDPERWNAIKVRLINMQAKRGGEGMSPGKVRRFLAASMPDDFASRQLNDTGYAARLAAAQLQRLWPDVGPGAPRTVQTANGKVTAHLRRLWGLNNILSSDGEKTRADHRHHAIDALVVACAHPGMSQRLSNYWQAKDDPRRAKLEEPRLDPPWPTIRDAASEAIERVVVSHRVRRKVSGPLHEETFYGDTGQDEVKGRQTSRLFVSRKPLPSVSKSMLEDIRDDQVRAIVNDHVKAHGGDPKKAFAQFPAMSPGGPPIKKVRLLKRQQLALMVKIGTGYADPGANHHMAIFQTDQGVIDYEVVTLFEAMARLRLRQSVVRRDRPGARFVMSLAQGEVLRFEDGESKGLWVVTGVWANGQIILDRINDAAGATTYRPKAASVVKVGARKVAIDPIGRIRPASD

SEQ ID NO: 17282 - protein, 1097 aa, unidentified
  REGION 1..1097: note = Cas Enzyme sequence
MGKMERIFGFDIGTTSIGWAVIDYDKDAGEGRIIAKDGVPGMGVRIFPEARDPDGTPLNQTRRQKRMMRRQLRRRKQRRRLLNEALTEAGLLPPFSKDKDSEWAKVMALDPYPLRARGVSEPLSTYEVGRAIYHLSKLRHFKGRDLEDDDDFLDDADPNGEAGPKPKRRSKTAAEGGENKPANGDDEKKLKEEIASTHKLLRSRGVTLGQYLAERKADATKGAPPMERRRQVHAHRVDVEAEFEALWTAQSRHHKQLDDAALEDRVRMAIFAQRPVFWRKATLGKCRFVPDAELCPRGSWLSQQRRMLEKLNNLAIVGGNARPLDEEERQAILAQLQTQGSMTWSSVRKILKPILRKKDQPEDPKFNLELEKGGTLLGNPLEAKLAAIFGDRWDTHPHKQAIRDAVHERLWSADYGEIGTQRVVIRSSADRRSRRAEAAQSFIADFGATPEQAAKLKELGLPTGWEPFSTAALKKILAELERGEPFGALVNAANDDKVMRTRENTTRETYGDWRNEHFPDRERPTGEYVDFLPSPASKEEQERINSLRNPTVVRVQNELRKVINNLIRVYGRPDLIRIELTRDIGKSKREREEESRRNRKKERERRKAAEDLKSKGIPDPSRDDIKKWVLWKECGEFDPYSGRAIDFDGLFRTGEFDVEHIWPEPVSLDSSLSNLTLCARDWNRRKHKRTPFEAFGNDPSWETMKARVWARVQAGAMGKGKAKRFCREEPLPEDFARRQLNDTGYAARQAVAFLKRLWPDVGPTSKVYVQPVSGKVTDRLRRYWELNNILSDDGEKTRADHRHHAVDALVVACAHPGVVNKLSRYLQAKDAPQTQRPRLDPPWPDIRRDAEKTAAEIVVSHRVRKKVSGPLHKETIYGDTGENVKAGKTTYRQFVTRKKVDVLTKGELDEIRDARVGTTIRDWVAAHGGDPKKAFATHPRLGHGGAEIRKVRLLIKQQMDLMAPVSTGYAAMGSNHHIAIWRLSTGETDFDVVTMFEATKRLARREPVFQCNRGDDSQFVMSLAPGDAVVFAKDDKSPICIWRVQKLSGNGQIYFVDHRDASQSLVSMFAPTVGGLMSRQGKKISVDPIGRVRPARD

SEQ ID NO: 17283 - protein, 1037 aa, unidentified; identical to SEQ ID NO: 15370
  REGION 1..1037: note = Cas Enzyme sequence

SEQ ID NO: 17284 - protein, 1080 aa, unidentified
  REGION 1..1080: note = Cas Enzyme sequence
MARIWGFDIGTTSIGWAVIEHEIANSESGQGAGRILGMGVRIFPEARDPDGTPLNQTRRQKRMARRQLRRRRERRKALNQALADAGLLPPFSKDKDSEWSRIMALPPLPIRARVLKERVEPHELGRALYHLAKRRHFKGRDLEESDSPETEDAEEKAASNARERTIAELKATGKTLGEMLATTPAHERSRGIHALRSHVADEFERLWSAQAAHHPALTDTLKAHVADTIFAQKPVFWRKSTLGQCRLMPGEALAPKGSWLSQQRRMLEKLNNMEIASGNRRSLDAEERAAVLAILQTQASMTWGGVRRALKPLYAARGEKGMEQRIKFNLELGGEPKLLGNPLEAKLAAIFDNGWETHPHRQAIRNEAHRRLWSRDYEEVGQRVVIRAASERADRERQIVGELIDDFGISETQATALAALKLPTGWEPFSTKALEAILPELERGERFGTLMVSPERAQWREATFPNRDAPTGEILDKLPSPTKRRINGRPNHAGEAEIGRIKEIRNPTVARTQNELRKVVNNLIDAFGKPDLIRLELTRDVGLSKREREEKKAGIAKNRRRRAEARKDLEAKGILEPASRDIEKWVLWKEGQEKCPYTNDPISFDALFRRGEFEVEHIWPRSLSFDDSQGNKTLCRKDINIAKGNRTPFEFFRSRPDEWDAVKRRMDEMTASKAGPGFPRGKVRRFVAEEIPKEFTARQLVDTGYAAKQAVALLKRLWADVGEPNQAVDFGIDEELRRRKVLPVTSKVTAQLRKLWGLNNILSDDGQKTRADHRHHAVDALAVACADPGVTQRLSRYWQQKDDPRAEPPRLPPPWPSIRADAERAVEAIVVSHRVRKKVSGPLHEETIRHPIDGSGRPGSSDPLLVARKPVAKLTPSILASDEAVRDPHVRVILQEWIAEHGGDAKKAFETFPTVSPDGPPIKRVRVGERRQLKLMAPVANGYADAGLNHHISVYRNAAGKTEFEVVTLFEACRRISKRQPVVSRSKAGATFVVSFSLGETVELTADNGERTRWVVVGIEGDGRAALSPLNDARPGDAKTAKAAGFDSARVTFRPRIGGLMKREPRKISVDPIGRVRPAN

SEQ ID NO: 17285 - protein, 1089 aa, unidentified
  REGION 1..1089: note = Cas Enzyme sequence
MRRIFGLDIGTTSIGWAVIEHDPATFEGNILGMGVRVFPEARDPEGTPLNQTRRMKRLARRTLRRRRQRRRALNELLADAGLLPPFSKDKASAWAELMKTEPLTLRSKGVAPKDGTADRLTPHELGRALYHLARLRHFKGRELAETEEEPGETPDEKKAGEARQQTIQALKASGQTLGQMLAGRVAPKGEVPRQQTRRIHALRSHVESEFNRLIQSQEAYHPILRDPKFAARLHTTIFAQKPVFWRKNTLGHCRFLPEAPLCPRGSWLSQQRRMLEKLNNLTVVGGNFRPLDKEERAAILARLGSQASMSWSGVRSALKPLYKRRGEPGAEKALRFNLELGGEPKLLGNAVEAKLAAVFGNDWMSLPHRDAIRYEVQERLWRADYDEIGQQRVVIRPESDRRERREEAARDFVRDFGITEAQAKSLSDLQLPAGWEPYSTEALSLFLPKLEEGVRFGALVAGPEWEEWREASFPDRERPTGEILDRLPSPADPEEQKRLGTIRNPTVVRVQNELRKVVNNLLRVYGKPHLIRVELAREVGLSKSQREEMRNALRQQEQRRRTAADDLRSKGIDQPSRAVIEKWMLWKEGLERCPYTGDQIGFDALFRNGEYEIEHIWPRSRSLDDSFRNKTLCRRDVNGQKGNRTPFEYFRSNPDEWDAVVKRLQSMVARKGSPGVPVSKFKRFTAEVIPEDFTNRQLTDTGYAARQAVSFLKRLWPDLGPEAPVNVEAVSGRVTGQLRRFWELNNILSEDGEKTRADHRHHAIDALVVACTDLGTTNRLSRYWQQREDPRAERPRLPPPWPGIRRDAERAVEGILVSHRVRKKVSGPLHAEMPFGDTGEEVEKNGVRQRVFVKKMPVGKLSSTTLEIGSPSEISRTAKFVVRDKAVREALKRHLDHAGGDPKKAYVSYPSVSGAGPEIRKVRTLSLQQSRLMAPVSVKREGSGEGGPTGFADLANNHHLAIRRLSDGSVGFEIVSLFEAARRLAKREPVIRRRFGDGASFVMSLAPGEAVEFLDGPREGVWIVQGAWANGQVVLTRHTDARPTSKGEAESLGMDGVRQEFRPAASTLVSDAVRKVSIDPIGRVRPASD

SEQ ID NO: 17286 - protein, 1089 aa, unidentified; identical to SEQ ID NO: 17285
  REGION 1..1089: note = Cas Enzyme sequence

SEQ ID NO: 17287 - protein, 1082 aa, unidentified
  REGION 1..1082: note = Cas Enzyme sequence
MNWRLGLDLGAGSLGWCALALGEEGQPAGILAAGSRIFGDGRAPARGEQAGTPLAVERRTARAMRRRRDRYQRRRTGLLRQLTTDGLFPEEPEARLALQGLDPFELRARALDQPLSPHEIGRAFFHLNQRRGFKSNRKADRGTDKETGKIAVGIDRLRTAIEASGARTFGEFLHLRRRNAPDQNRIPSVRTRLRPEPGEGAKGDGYDFYPGRALIEEEFEAIWEAQRQFHPDRLTEAVHDRLHEIVFHQRPLKEPKVGTCTLVPGETRLRKAHPLFQKRRLLEEVNALLLVRTGETAQRLTREQRDLLYLRLKDKQKVSFETLRTRVLKLDPSTRFNKESESRSDLKGDEVAALLGDRKRFGTAWAHLPAERQWAVVERLLDVETDEEAAALQAWLQQEHDLPAERAAAVVAAAGRLPQGYGRFGETATRGLIAALEAEVIVYSEAVVKAGFGHHSDFRDGEVHAELPYYGAILERHILPGTGDPADPEELRVGRLTNPTVHIGLNQLRRVVNALIRTHGRPAEIAIELARELKLDADEKARRSRENAKNRIEAEKRSQKLQEIGQRDTGANRNLLKLWEELNPDNVLDRRCVYSGRQISIDMLFNGSTEVDHILPFDATLDDSNGNRILCLREANRDKRKRSPFEAWGHTDRWPEIAERAARLPREKRWRFEPDAMKRFADLGGFHARHLTDTQYLSRLSREYLSALYPEKGEGSSHVWVSPGRLTEMVRRKLGLNDLLPDHNIGGGAEHAKNRLDHRHHTIDAAVVAVVDRGLLNEMARASGQEGRDGAERVIVPEPWPGFREDLRRAVNAIVVSHRPDHGTASKAGLPRGRDQTAGKLHNDTAYGLTGEADGRDNQLVVHRVPLGALKPGDLDRVRDCKLRKALQAFTAGREGKEFERAVARFAEVAPPPFRGLRRVRVLEPLSVIPIRDADGRAYKGYKGDSNYRYDVWELPDGRWVAEVVSMFDAHQPGWTSAIRADCPTARKVLRLHRDDVLAIERTGERELVRVVKFRQTGQLTLAAPEEAGDLKKRDAASDQSDPFKYLYAAAGTLRAWKARQVRLDELGRVFDPGPRSRVETA

SEQ ID NO: 17288 - protein, 1090 aa, unidentified
  REGION 1..1090: note = Cas Enzyme sequence
MQRIFGFDIGTTSIGWAVIDHDAARAVGCIVGMGVRIFPEARDPDGTPLNQIRRQKRLIRRQLRRRKLRRRALNELLNEAGLLPPFAKGKRVNGSYVRSSWEEVMQLPPLELRKKALAERLEPYELGRALYHLAHRRHFKGRDVESDTPVESSAEEKAAQSARATTVQILQESGKTLGEMLAERAPTRGEIPRQRTRGIHALREHVIEEFNRIIEAQRRHHPILRDPVFVDQLRNVVFSQKPIFWRTNTLGECPFVPGSPLCPKGSWLSQQRRMLEKLNNLSIVCGNLRPLDSEERAAILEKLQVQASMTWAAVRAALKPVYAKRGEPGAEQALRFNLELGGESKLTGNLVEAKLVSIFGERWKTHPHRQAIRDAIHERLWKADYVEIGTQRVVILPETERRRRRAELAKKFIHEYDISDAEAKALSELQLPAGWEPYSVEALRRFLPLLEQGVRFGALVAGPEWTEWREANFPNRKQPSGGSLDLLPSPANSGEQKRLAAIRNPTVVRVLNELRKVTNNLIRVHGKPDLIRIELAREIGLSKRERAEIREQLRRQEKRRREAEEDLKSKGILQPTRAEIEKWLLWKESQERCPYTGDHISFDALFRNGEYDVEHIWPRSRSLDDSFRNKTLCRRDVNIEKGNRTPFEFYQSRPDEWAAIVTRLRGMTAKGRSAGMPYGKVKRFLAESMPEDFANRQLTDTSYAAREAVTFLKRLGSKSGAGTSVAVQAVAGRVTAQLRRLWQLNNMLADNAEKTRSDHRHHAIDALVVACTDPGMVHRLSRYWQQKDDPRAERPHLPAPWPGIRAEVQQLKDCGEIRISHRVRKKVSGPLHDEMPYGDTGKEIMKNGTILGVFVKRMPVEKLSLETLKIDDVAQISKTAKFVVRDKAIREALRNHLAAAGGDPKKAYPPYPRVTPNGPEIRSVRVLSLQQKSLMAPVAMSWNGERERQPNGFAELGTNHHVAIYRTSSGKAEYEIVSLYEAARRLARGEPIVRRQRDGAKFVMSLAAGEAVEFLDGERKGIWIVQGVWANGQVVLTRDYDARPTSKKESERLGMSGKREEFYPKVSTLISDSVRKISVDPIGRIRVAND

SEQ ID NO: 17289 - protein, 1090 aa, unidentified
  REGION 1..1090: note = Cas Enzyme sequence
MQRIFGFDIGTTSIGWAVIDHDAARAVGCIVGMGVRIFPEARDPDGMPLNQIRRQKRLIRRQLRRRKLRRRALNELLNEAGLLPPFAKGKRVNGSYVRSSWEEVMQLPPLELRKKALAERLEPYELGRALYHLAHRRHFKGRDVESDTPVESSAEEKAAQSARATTVQILQESGKTLGEMLAERAPTRGEIPRQRTRGIHALREHVIEEFNRIIEAQRQHHPILRDPVFVDQLRNVVFSQKPVFWRTNTLGECPFVPSSPLCPKGSWLSQQRRMLEKLNNLSIVCGNLRPLDSEERAAILEKLQVKASMTWTAVRAALKPVYAKRGEPGAEQALRFNLELGGESKLTGNLVEAKLVSIFGERWKTHPHRQAIRDAIHERLWKADYVEIGTQRVVILPETERRRRRAELAKKFIHEYDISDAEAKALSELQLPAGWEPYSVEALRRFLPLLEQGVRFGALVAGPEWTEWREANFPNRKQPSGGSLDLLPSPANSGEQKRLAAIRNPTVVRVLNELRKVTNNLIRVHGKPDLIRIELAREIGLSKRERAEIREQLRRQEKRRREAEEDLKSKGILQPTRAEIEKWLLWKESQERCPYTGDHISFDALFRNGEYDVEHIWPRSRSLDDSFRNKTLCRRDVNIEKGNRTPFEFYQSRPDEWAAIVTRLRGMTAKGRSAGMPYGKVKRFLAESMPEDFANRQLTDTSYAAREAVTFLKRLGSKSGAGTSVAVQAVAGRVTAQLRRLWQLNNMLADNAEKTRSDHRHHAIDALVVACTDPGMVHRLSRYWQQKDDPRAERPHLPAPWPGIRAEVQQLKDCGEIRISHRVRKKVSGPLHDEKPYGDTGKEIMKNGTILGVFVKRMPVEKLSLETLKIDDVAQISKTAEFVVRDKAIREALRNHLAAAGGDPKKAYPPYPRVTPNGPEIRSVRVLSLQQKSLMAPVAMSWNGERERQPNGFAKLGTNHHVAIYRTSSGKAEYEIVSLYEAARRLARGEPIVRRQRDGAKFVMSLAAGEAVEFLDGERKGIWIVQGVWANGQVVLTRDYDARPTSKKESERLGMSGKREEFYPKVSTLISDSVRKISVDPIGRIRVAND

SEQ ID NO: 17290 - protein, 1090 aa, unidentified; identical to SEQ ID NO: 17288
  REGION 1..1090: note = Cas Enzyme sequence

SEQ ID NO: 17291 - protein, 1050 aa, unidentified
  REGION 1..1050: note = Cas Enzyme sequence
MGEDMTRTFGLDIGTTSIGWSVIDYDRSRELGSIQRLGARIFPEARDPKGTPLNQQRREKRMARRQLRRRKERRRKLNELLTSVGLLPPFSSEKRAEWAEVMSQDPYTLRARALNSELKAYQLGRALYHLAQLRHFKGRDLEESVELAEDPDEVAAESEREAVLADLRRTGKTLGQWLADRATGKRKRNIHASRDAVADEFQRICEYQKKWHPRLADRQFLARLEEVIFFQRPVFWRKSTLGDCRFIPGAALCPKGSWLSQQRRMLEKLNNLALAGGNARDLDEEERSAILSSLQVRASLSWASVRSALKNLYRERGEPGAEKRLRFNLEVGGEAKLLGNPLEAKLSRIFGDEWDSHPRQNDIRRAVHRYVWSADYGEIGDQRVVILSAKERAGRRKLAQTAIVEDLGLTVEQASALMSLSLPAGWEPFSIEAIEAFLPELEAGARMGALLNSPEWESWRDETFPGRKRPTGEFLDFLPSPANKEEAARIAGLRNPTIGRTQNELRKVVNNLIREFGKPDLIRIEVTREVGMSKREREVKQAGIRKQERRRKQARKELEDHRIAEPSRDDIEKWLLWEESGHRCPYTGDEISFDALFREGEYEVEHIWPRSRSLDNSYANKTLCRHDVNREKGNKTPYEAFGHDENRWSAICQRLDGMMARKGGQGMSRGKVRRFLATEMPDDFAARQLNDTGHAARQAVAQISRLWPDLGPTAPVRVEAVSGRVTGHLRRLWSLNNILADNGEKTRADHRHHAIDALVVACAHRGVTRQLSDYWQLKDDPAARRPDLQPPWPGIREDAGRAVGDIVVSHRVRKKVSGPLHKETIYGDTGIEVETKSGTYRQFVTRKRVELLSKSEIAADPDVSGEGIRDNEIRKLIQAHVAANGGDPKKAFPPYPVLPGSVVPVRKVRLLSKQQTDLMAQIGTGYADLGSNHHIAIFRSEDGKVNFDVVSLFEAVRRLAHREPVVRRQRNDGAAFVMSLAAGECIEVTKEGVKELRIVQGVWASGVIVTLRHDDADGHTIWRPTAASIIGNGGRKISVDPIGRFRPSND

SEQ ID NO: 17292 - protein, 1048 aa, unidentified
  REGION 1..1048: note = Cas Enzyme sequence
MARIFGFDIGTTSVGFAVIDHDPARERGNILRLGVRIFPEARDPDGTPLNQQRRQKRMMRRQLRRRRVRRRTLNECLAKSGLLPSYGTDQWQQVMAMEPLALRARGLTDRLGPHEFGRALYHLAQRRHFKGRDLEEGEDEAADELEARTCRESTLRSLKANGQTLGQFLYAKGGHERSRGVHANRSSVLEEFDRLWEAQATHHTVLRDPAFRARVEDTIFAQRPVFWRKNTLGECRFMPGEPLCPKGSWLSQQRRMLEKLNNLALVGGNARPLDNEERAAILEKLQVQASMSWSGVRAALKPIFKARGEAGREKSLRFNLEEGDDSKLLGNAIEAKLAEIFGETWADHPHMQAIREAVHQRLWAADYGEIGDQRVVILPEPERRRRCAEAEKSFVADFGVTAKQAAALRDLKLPTGWEPFSIAAIQQFMPHLEAGVRFGTLVNSLELQWQDWRTRIFPNRQQPTGKILDRLPSPANKEEQKRITSLRNPTVIRAQNELRRVVNNLIGLYGKPDLIRIEVAREVGKSKREREEMQAGQRRQEKRRKEAAADLHSKGIEPSRANIEKWMLWKECGEFDPYSGRPICFDDLFRTAEFDAEHIWPRSKSFDNSFANKTLCLRALNAKKANQTPFEAFRNDPEWERMKERVWTLVKDGKMAQGKAKRFCREEPLDEEFKSRQLNDTGFAARQAIAFLKRLWPDVGVEAPVTVQAVTGRVTAQLRKLWELNNILSDDGEKTRADHRHHALDALVVACTHPGMTQKLSAYWQAKDDPAALRPHLRPPWKNVRADAERAKEEIVVSHRVRKKVSGPLHDELPLGYTNQDISKNGTTLGIFVKRMPVEKLTLETLKISRVEEMSRTAKFVVRDDAIRKALLAHLEAANLPPAKAYPPYPRVSPNGPEIRKARVLTIQQKKLMVPIANGFADPANNHHIAIYRMPNGKVDFEVVNLFEASRRLAKREPVVRRTRDDGAAFIMSLSAGETIRFAKEKEQSPRMWRVQKIASKGQISLLDLTDASPKEPSLFEPLVGGIISRNAVKLSVDPIGRIRPAND

SEQ ID NO: 17293 - protein, 1071 aa, unidentified
  REGION 1..1071: note = Cas Enzyme sequence
MSRIFGFDIGTTSIGWAVIDHDPKAGQGHIHGMGVRIFPEARDPKGTPLNQNRRQKRLVRRQIRRRKQRRQSLNQILTEADLLPPFSKDKNSAWAKVMAQSPLPLRKKGLSEQLDPHELGRALYHLARLRHFKGRDIEESDKPEEEDSAEEKEAKSARDITIRELKISGKTLGQMLAERIPTKGEIPTQQTRRIHALRSHVEDEFNRLIKAQAAYHPVLRDIAFAEPLHRTIFAQKPIFWRKNTLGQCRFIPGAALCPKGSWLSQQRRMLEKLNNLAIVGGNMRPLDSAERAAILEKLQTQASMTWAGVRAALKPLYKKRGEPGQEQVFRFNLELGGESKLIGNPVEAKLADIFGNSWANHLQKQAIRDAIQERLWKADYGEIGEQRVVILSEVERRTRRMEAAESFIRDFGVTDKEAKALGELKLPGGWEPYSIAALNLFLPKLEKGIRFGTLIAAPEWTKWRETHFPDREQPTGEILDRLPTPANREEQRRLTSIRNPTVIRIQNELRKVVNNLIGVYGKPDLIRVELAREVGLSKREREEMSSGLRKQENRRRDAEADLKSKNIPQPSRADIEKWLLWKEGRERCPYTGDQISFDALFRNGEYDVEHIWPRSRSLDSSFRNKTLCRRDVNIAKSNNTPFEFYQARPDDWSAVTNRVRGMIAGKGTPGMPLGKIKRFLADSIPGDFANRQLNDTGYAARQILASLKRLWPDVGAEAPVTVQAVTGRVTAQVRRLWELNNILSPDGEKTRSDHRHHAIDALVVACTDPGITNRLSLYWQQRDDPRAQSAKLDKPWANVRIDAERMKDEGKIKISHRVRKKVSGPLHGEMPFGDTKDEAVKDGTKSGIYVKKMPVENLSLATLKIDSVSQITRTAKFVVRDPAVRRALAQHLEKGGGNPKKAYPPYPRLTPDGPEIRRVRVLSLQQKSLMAPVAMKINDQGVREPSGFADLAKNHHIAIYRLTDGSADFEIVSLYEASRRLANGEPIVRRKRQGAKFMMSLAPGDAMQLLDGDHKGIRIVQGVWASGVVVTLDDTDATGASVWRPSPSTILTSGVRKISVDPIGRIRLAND

SEQ ID NO: 17294 - protein, 999 aa, unidentified
  REGION 1..999: note = Cas Enzyme sequence
LNECLAEAGLLPTYGTDLWREAMAKEPLALRTRGLTEQLEPYELGRALYHLAKRRHFKGRDLEDGDGEAAEKDKPKPEEEVEAKTREALVATLQETGETLGSHLAKIPSLARKRGVHATRAIVVGEFERLCDAQVAYHTILPTVRGMLEDAIFSQRPVFWRKSTLGLCRFMPGEALCPKGSWLSQQRRMIEKVNNLAIAGGNARPLDEEERAAILEALATQKSMGWPGVRKVLEPVFKARGESAKHVRFNLEYGDEKGGLKGNCVEADLAKIFGARWPEHPHRMALRAFLPGALWQADYGEIGTQRVVIRPQQDRAQRRRLLTDRLVQDFATSRDEAEALVALDFPQGWEPYSTKALEIFLPELEKGIRFGTLVNSPQPEWQDWRARNFPNREQPTGEILDRLPSPADKDEQKRIAQLRNPTVVRVQNELRKVVNNLIGLYGKPDLIRVELAREVGKSKREREEMQAGMRKQERRRADARKDLESKGIASPSRDDIEKWLLWKESQERCPYTGDQIGFDDLFRAGRYQIEHIWPRSLSLDDSFRNKTLCRIDVNIAKGNRTPFEFFRGRDDEWNAVKERIWKMVGRDGMAPGKAKRFAAETMPDDFASRQLNDTGYAARQAIAFLKRLWPDVGPTAPVNVQAVSGRVTARLRRLWGLNNILSDDGERAGRLEAPPRDAARGAERLAVRGEKTRADHRHHAIDALAVACAHGGYVKRLSDWFAAEERGEHPHLPEPWPSIRKDAERRVEAIVVSHRVRKKVSGPLHMETTYGDTQRDVTTKTGTYRLFVTRKPVERLSKSELDQIVDDHVRDVVKHWVDTHGGDPKKAFVAYPRVTESGPEIRKVRLHSKQQLSLMAPVSTGYADLGQNHHIAIYRRPDGKTDFEVVSLFEAARRQAAREPVVQRSRDGADFVMSLSAGDALEFPEGEKKGIWIVQGAWANSQVVLVRHIDARPSTKKEADRLSMDGVREEFLPTASGLLQRKARKLSVDPIGRIRPAND

SEQ ID NO: 17295 - protein, 1068 aa, unidentified
  REGION 1..1068: note = Cas Enzyme sequence
VSYSLGLDIGTNSIGWCIIGYSDDGIADHIEAIGVRIFSDGRDPKSKSSLALARREKRAMRRSRDRFLRRRQALLNLLVKYDLLPKDRLERKQQELVNPYIARAAALDSALPLYQVGRCLFHLNQRRGFKSNRKTDKGDPESGKIAFATSKLRAAMSESEARTFGEFLAGRLRKGLPLRIRMRDDEGPEKANGEASEGYAFYPDRALLEEEFRSIWDAQKQHHPDALTPERFEALFQCIFFQRPLRQPEVGNCMLLGTERRLPKSDPLFQRRRLLEELNGLTIERGPGKVAERLTVEQRDTLILAMHGKRSVAFTSLRKALKIRDAVFNKERAGRDKLTGDEVFAELANKDRFGPFWSDVDTERQRAIVSKIRDEQDGDKLVAWLMSECDLDEGRARKVAGASLPEGYGRVGETATRALIRELTAPGEDGRVIVYSEAVKRAPELSHHSDFGTGEVHDKLPYYGEVLERHIIPGSGDPDEHNIEKRVGKLTNPTVHIGLNQLRRVVNAIIETYGHPSEIIVELARDLKTSEDQKRDIQARQKKDYQDALLRGQKLRELGQTDTGANRALLKLWEQLGKDPLDRRCIYTGQVIGAAMLFSDAVDVDHILPWSRTLDDSNANKIVCIAGANRAKRNRTPFEAWGGSSEWEEILHRAERLPRNMSWRFNPDAMKKFGEESGFLARHLIDTQHLSRLARQYLEAVAPNRVWVSTGKLTAMLRRHWGLNSLLPDHNYAKTVHEKNRTDHRHHAIDAAVIGVLSLSLIQKVSREAGLREEKGVQDVIDSIAEPWDGFRNDLGEAVNRIIVSHRPDHGSLGDVSGKRNQRTAGGLHNDTAYGLTGETDSKGKKLVVHRVPLGAIKIGHLEESGTHIRDDQIRALLRGATEGMSGKDFEQAIQTFTRTHKDFRGMRRVRVIEPLSVIEISDREGNAYKGYKGDANYRYDVWRLPDGKWVADVVSMFDAHSPEHDKQPRRPHPAAKRILSLHKDDMVKFEHPKSGQIIGRVVKFGQNGQITLAAHNEAGELKSRDASSDDEDPFNYYSPTAGGLKKARARQIRIDEIGRVWDPGFRD

SEQ ID NO: 17296 - protein, 1073 aa, unidentified
  REGION 1..1073: note = Cas Enzyme sequence
MGEADVQAAHEQTKKRHQLNYRLSLDIGTNSIGWWIYELDQHDRPFRSHDGGVRIFSDGRNPKDQTSLASTRRLGRSQRKRRDRYLRRRAKLLRALIELGLLPKDETQRQALVIHDPYALRAAALDGPLPLAELGRALFHLNQRRGFKSNRKTDRADSERGVVRSGVNRLKEQMAAAKARSLGEFLHQRHQSGDWVRARKRPLPNDKGKLVPQYDIYPDRQMVEAEFDLIWEAQAAHHPAILTTAARRRLKDIIFFQRRLKPQEVGLCTFEHEAGERRLYWADPLSQRRRVFEQANQLMIVPPGQASIGLTKAQRDLVADALLANPRRTFIQLRRLLKLAPDTRFNLEDEKRSDLKGDETAAILGGDKYFGDSWRHLPIDEQRAIVARLIEDEDEQQLAHWLQSTFGFDAERALAIALAPLPDGTAALGETASRKILAALERDVVVYSTAAELAGYHHSDFRTGEIFDELPYYAAWLPQAVKPGTNDPDDDEATRYGRIANPTVHIAVGQLRRLVNGLIERFGAPKQIVIELARELKASRKQREEMDKRHTANKQRADRHRQILAELGQPETGENRLRLRLYDELEPLEHRCPYSGQQISLAMLFSHAVEIDHILPFSRSLDNRVDNRLLVLHDWNRRKGNATPYEAFGHGADWADIASRAEKLPSAKRRRFQPDAMDWFQRNEADFLDRHLVDTQYLSRLARQYLMAVCDPNQVWAIPGGLTALIRGKWRLDSLLGDNAKNRNDHRHHAIDAAVVGLTDRGLLNAMARASAQAADRGELEQITVELPWPHLKDELRAQLDRIIVSHKPEKGQPGDGRIGKFFKDTAYAIIGDPDKRGVPLVAHRVPLESLTSAEDLDGILAPNVRQALQQATAGKTGKDFTAALTAFREADGPLKGLRRVRIGERLGVIPIADKQGRVYKAYASDGNYAFDIWRLPAKGGKDGATGKWVVEVVSLFNAAQGKLVSAIKQQHPTARKIMSLRQNDLVAIETKEGRAIMRVVKFSTNGSLQLAAHQEAGNLKARDADKDDYFKYLNSSASGLQKLAARKVRVTADGKIYDPGPLDKAAATADVR

SEQ ID NO: 17297 - protein, 1051 aa, unidentified
  REGION 1..1051: note = Cas Enzyme sequence
LALDIGTNSIGWWIYELDQQNRPCRSLDAGVRIFSDGRNPKDQTSLASTRRLGRSQRKRRDRYLRRRAKLLRALIELGLLPSDETLRRALVNHDPYALRAAALDGALSLAEIGRALFHLNQRRGFKSNRKTDRADSERGVVRSGVNRLKEQMAAVAARSLGEFLYLRHQSGDWVRARKRPLPNDKGKLVPQYDIYPDRQMVEAEFDLIWDTQAAYHPAILTTAARRRLKDIIFFQRRLKPQEIGLCTFEHEARERRLYWADPLSQRRRVYEQANQLMIVPPGQAAIGLTKIQRDQVADALLANPRRTFIQLRRLLKLAPDHRFNLEDERRSDLKGDETAAVLGGDKYFGDQWCRLPLDAQRSIVSRLIEDEDEQQLAHWLQSTYGFDAERALAIALAPLPDGTAALGETASRKILAALERDVVVYSAAVQQAGYHHSDFRTGEILDELPYYGAWLPQAVKPGSNDPDDDDATRYGRVSNPTVHIALGQLRRLINGLMTRYGPPTQIVVELARELKASRKQREEMDKRLTANKQRADRHRQILTDLQQPETGENRLRLRLYDELEPLEHRCPYSGQQISLAMLFSHAIEIDHILPFSRSLDNRVDNRLLVLHDWNRRKGNATPYEAFGHGADWADIAARAEKLPSAKRRRFQPDAMEWFQKNEADFLDRHLVDTQYLSRLARQYLTAICDPNQVWAIPGGLTALIRGKWHLDSLLGDNAKNRNDHRHHAIDAAVVGLTDRGLLNAMARASAQAAERGELEQITVELPWPSLKDDMRAQLGRIIVSHKPEKGHPGDGRIGKFFKDTAYAIIGDPDKRGVPLVAHRVPLESLTTAEDLDAILAPEVRLALQRATAGKTGKDFTTALITLREAEGPLKGLRRVRIGERLSVIPVTDKQGRIYKAYASDGNYAFDIWRLPAKSGKDASVGKWVAEVVSLYNAAQGKLISAIKQQNPTAKKIMSLRQNDLVAIATREGRAIMRVVKFSTNGALQLAAHQEAGTLKARDADPDDYFKYLNSSASGLQKLAARKVRVTADGKIYDPGPLEKTAAQADDR

SEQ ID NO: 17298 - protein, 1034 aa, unidentified
  REGION 1..1034: note = Cas Enzyme sequence
MDLIYGFDIGTTSIGWSVIRLSRNDERGQILGMGARIFPEARDTEGTPLNQERRRARLTRRQYRRRRDRRRQLNELLSGAGLLPNFGGDDWQAMSRGTDPYTLRTEGLTRQLTPHELGRAIYHLAKRRHFKGKAIEDQEENREEDADEKKAKTARETTIAALRETGLTLGAYLSARPPKDRKRGVHALREHVRSEFEALLAVQSIYHPVLKDAAFAAALRESIFAQKPVFWRKNTLGQCRLMPEAPLASKASWASCQRRMLEQLNNLAIAGGNQRPLEPEERAAIRAVLEVQASMTWGGVRKTLAPLFKARGQSSQSIRFNLEEGGNPKLLGNPLEARLATIFGPVWEAHPHKQAIREAADTRLRAADYGEIGQRVVILPEADRKTRRSAAAESFIRDFGVTPEQAAELEALSFPAGWDAYSSEAVARLLPELEQGVRLGALLAGPEWSEWRHTNFPNRDKPTGEFVDRLPSPRDKEEARRMRNIRNPTVTRVLNELRKVVNNLLSVHGKPDLIRIELARDIGLSKREREEKSKGMRRLEAQRKKAVEDLQANGMSDPARRDIENWLLWQESGQRDPYSGAMISFDALFRNGEYEVEHIWPRSLSLDDSFRNLTLCRRDFNQRKGNKTPFDAFGADPDLWQAITARIAEMKAAKGGMSPGKARRFLATSIPEDFASRQLNDTGYAAREAIASLKRLWPDEGPQAPVRVQAVSGKVTAHLRRLWGLNNILAEDGEKTRADHRHHAIDALVVACTHPGMSQRLSRYWQMEDTPHTSDGGPKLDAPWPGIRQEAEPHVARIVVSHRVRKKLSGPLHKGSIYGDTKQDEMSGKNTYRVFTIRKPLEALSKSEMADIRDPVVKKIVGDWVTEHGGEPKKAYPPYPSLTKDGPEIRKARILLKQQLTLMGRATTGYADLGSNHHVAIYRKPGGQTEFEVVSLYEAVRRLRAKEPVVRRNRSGAEFVMSLSQGDTVMLPDGHEKGSLRVVQSIWASGVVVTLSHTDATGESVWRPSAGSLSALGVGKMSVDPIGRLRKAHD

SEQ ID NO: 17299 - protein, 1045 aa, unidentified
  REGION 1..1045: note = Cas Enzyme sequence
MPLIFGFDIGTTSIGFAAIEFDPAKGEGRILRMGSRIFPEARDPKGTPLNQTRRQKRLTRRQLRRRKDRRRRLNEALLTFGLLPRFGSPEWSEVMAGDPVALRAKALNEALSPHELGRAFYHLAKRRHFRGRDLEESEDGQAVVEGAEGEEAPDEKAARSGREATIQALRASGGTLGEYLASRPAGERQRGVHALRRHVEEEFKRLWESQARFHAELRNDTFRETVTGIVFSQRPVFWRLNTLGECRLDPGQPLAPKGSWISAQRRMLEKLNNLEIAGGNARPLDEAERHAILKSLQVQQAMSWAGVRKAIEPLFKARGESAKTVKFNLELGGDPKLLGNPVEARLAVIFGETWQSHPRKDEIRMAVHERLWSADYGRIGDQRVVIKRAAERATDRRSAATSFGTDFGATPQQVAELERMNFPTGWDAFSVSAIQKCLPELEEGVRFGALLASADYADWRRSHFPNRVQPTGEILDRLPSPANPEEQKRIAGLRNPTVVRTQNELRKVVNNLIDLFGKPDLIRVELAREVGKGKAEREEMLAANRRQEKRRKEAQKRLQENGIASPTRADIEKWLLWKECQERDPYTGDAISFDALFQQGAFEVEHIWPRSRSLDDSFGNKTLCRKDVNLAKGNRTPFEHFRGDPDVWAAVKVRLEGLVSTKGGEGFSPGKARRFLAEAIPDDFASRQLNDTGYAAREAVTFLKRLWPDVGPTAPVTVQPVTGRVTAHLRRLWGLNNLLADTGEKNREDHRHHAVDALVVACTHPGMTKALSDYWSRRDNPLSVAETPTLPPPWPTIRTDAGNVIAHILVSHRVRKKVSGGLHLETVYGDTGNDVETKSGVFREFVRRKKVENLTAAEYGTIRDPHIRSVLQEWLARQGGDPKKVNWNAFPRVSPGGPEIKSVRILIRQQLELMAPVSTGFADLGANHHIAVYQRPDGRGAFEVASLFEASRRLTRREPVVRRDRSDATFLFSLSPGDAVEVPVEHEKRGIWIVQGAWASGQIVLLHHQDAAGASVWRPTAGSLVNLKCRKVSIDPVGRRSVVSD

SEQ ID NO: 17300 - protein, 1072 aa, unidentified
  REGION 1..1072: note = Cas Enzyme sequence
MEVIMKLIFGFDLGTTSIGSAVIRYDANRDAGEILHLGTRIFPEARDSEGTPLNQQRRLARTMRRQVRRRRERRKLLNETLADAGLLPRFNSAEWSHVMALDPYTLRKEGLERALTPAELGRALYHLSKRRHFRGRDLEETETEVATESSEEKEAKSGREKTIQVLKQTGLTLGAHLASTPSGHRKRGIHANRDHVQDEFNRLVTFQARHHPALAQSNLKDQLNDAIFAQKPVFWRKNTLGECRLIPGAQLAPKASWPSIQKRMLEKLNNLAISGGNGRPLEPEERQAILDQLQTQGSMTWAGIKRVLEPLFKARGESAKSIRFNLEEGGDKGLSGNPLEMKLSGIFGDAWHNHPHKQAIRDAADTRLRASDYGDVGQRVVILREGERKKRRQRAAQSFAADFGASPSQVEELEKLSFPSGWDAYSYDALAVILPELEEGHRFGTLLNSPDTEWHDWRNRNFPNRHQATGEILDRLPSPKDKDESQRIRNIRNPTVIRVQNELRKVVNNLISVHGKPDLIRIEMTRDIGLSKAEREEKSKAMRNQEKLRKAASEGLKANGIAEPKRDDIEKWLLWKESGERDPYSGDHIGFAALFLQGEYEVEHIWPRSISLDDSFANKTLCRKDMNLQKGNRIPHDAFSHDPDLWAAMKDRVSAMLSTKGGTGMSRGKIRRFLAQSMPDEFTSRQLNDTGYAARQSIAFLKRLWPDVGPEGKVNVQPVNGKVTAHLRRLWGLNNILSDDGEKTRADHRHHAVDALVVACTDPGVSQRLSRYWQLKDTPATASQKPQLDPPWATIRQEADRAVQAIVVSHRVRKKVSGPLHSGSIYGDTQRVITVGNIDYRVVVERVSVSSLSLADLLSDNLERNRYQIADHGVRKAIEAHLDRNGVDVENYKTLTKIKPSGDDLKKLEQILASPIPFGDKGTVIRKVRVLTRKQLHLMMPVHNGLSPEDSNHHFALYQGMDGKLTELPVSLNTALVRNKRGEPIIKKTLADGSRLLFSISKGDIIEFDDERARYWVVRMLGSNGQVRIVPHNEARPDKAAIKYEPFLKGLVEKNVKKHSVDPIGRIRPAND

SEQ ID NO: 17301 - protein, 1059 aa, unidentified
  REGION 1..1059: note = Cas Enzyme sequence
MEVIMKLIFGFDLGTTSIGSAVIRYDANRDAGEILHLGTRIFPEARDSKGTPLNQQRRLARTMRRQVRRRRERRKLLNETLAEAGLLPRFNSAEWSHVMALDPYTLRKEGLERALTPAELGRALYHLSKRRHFRQKDLEEGDDATVIINKNEAKKEKEATNARQRLVTALKENETTLGAYLAGIDNDQRKRGHHAERKNVIDEFNRLIAAQKVHHMPLQDKSLVDRIEDTIFAQKPVFWRKKTLGRCHFFPDLEPSQKASWLSCQRRMLEKLNNLEISGGNRRPLDTEERQAILDQLQTKHKMSWSKIRDALKPLYKVRGISEKALRFNLEEGGSKHIEGNHVEAELAETFSASWANHPYKDAIRKATSERLRNADFGEIGEQRVIILQEKHRKARRKTQAATFARDFGATGEQVAKLEELSFPNGWEAYSTKALEILLPELEKGIKLGTLLASADYHDWRNAHFPNRERPTGEILDRLPSPRSRKNLSQAAQDHALEETIRLRSIRNPTVIRVQNELRKVVNNLISVHGKPDLIRIEMTRDIGLSKAEREEKKDRMEANQEKRAKVIESLKAKGIKETNDNIEKWLLWKECGEIDPYSGDPIDLGELFSSNDFEVEHIWPLSISLDNSFGNKTLCRRDLNQLKSKRLPFEAFGHLEPQWNEIKLRVEKMSDPKKGSGMSSRKAKRFLASAIPEDFTSRQLNDTGYAARQSIAFLKRLWPDVGPEGKVNVQPVNGKVTAHLRKLWDLNNILSDNGEKTRADHRHHAIDALVVACTDPGVTQKLSRYWQLKDSLAISAQEPRLDPPWATIRQEADRAVQAIVVSHRVRKKVSGPLHKGTIYGDTGQDEHNGKIAYRMFTVRKNLAELSKSELADIRDEAVKRIVNEWVAERGGVPKKAFPPFPKVSADGPEIKKARIWIKQQLALMAPITTGYADLGNNHHIAIYQKPDGKAEFEVVSLFEASRRIKAKEPVVRREREGAKFVMSLAQGDTIHFAKTAGEKELFWRIQKIASKGQISLLLLADASRDEHSLFEPLVGGIIKRGAQKVSIDPIGRIRTAHD

SEQ ID NO: 17302 - protein, 1045 aa, unidentified
  REGION 1..1045: note = Cas Enzyme sequence
MEVIMKLIFGFDLGTTSIGSAVIRYDANRDAGEILHLGTRIFPEARDSEGTPLNQQRRLARTMRRQVRRRRERRKLLNETLADAGLLPRFNSAEWSHVMALDPYALRKEGLERALTPAELGRALYHLSKRRHFRGRDLEETETEVATESSEEKEAQSGREKTIQVLKQTGLTLGAHLASTPSGHRKRGIHANRDHVQDEFNRLVTFQARHHPALAQSNLKDQLNDAIFAQKPVFWRKNTLGECRLMPGAQLAPKASWPSIQKRMLEKLNNLAISGGNGRPLEAKERQAILDQLQTQGSMTWAGIKRVLEPLFKARGESAKSIRFNLEEGGDKGLSGNPLEMKLSGIFGDAWHNHPHKQAIRDAADTRLRASDYGDVGQRVVILREGERKKRRQRAAQSFAADFGASPSQVEELEKLSFPSGWDAYSYDALAVILPELEEGHRFGTLLNSPDTEWHDWRNRNFPNRHQATGEILDRLPSPKDKDESQRIRNIRNPTVIRVQNELRKVVNNLISVHGKPDLIRIEMTRDIGLSKAEREEKSKAMRNQEKLRKAASEGLKANGIAEPKRDDIEKWLLWKESGERDPYSGDHIGFAALFLQGEYEVEHIWPRSLSLDDSFANKTLCRKDMNLQKGNRIPHDAFSHDPDLWAAMKDRVSAMLSTKGGTGMSRGKIRRFLAQSMPDEFTSRQLNDTGYAARQSIAFLKRLWPDVGPEGKVNVQPVNGKVTAHLRRLWGLNNILSDDGEKTRADHRHHAIDALVVACTDPGVTQKLSRYWQLKDSLAISAQEPRLDPPWATIRQEADRTVQAIIVSHRVRKKVSGPLHKGTIYGDTGQDEHNGKIAYRMFTVRKDLAELSKSELADIRDEAVKRIVNEWVAERGGVPKKAFPPFPKVSADGPEIKKARIWIKQQLALMAPITTGYADLGNNHHIAIYRKPDGKAEFEVVSLFEASRRIKAKEPVVRREREGAKFVMSLAQGDTIHFAKTAGEKELFWRIQKIASKGQISLLLLADASRDEHSLFEPLVGGIIKRGAQKVSIDPIGRIRTAHD

SEQ ID NO: 17303 - protein, 1007 aa, unidentified
  REGION 1..1007: note = Cas Enzyme sequence
LNQQRRLARTMRRQVRRRRERRKLLNETLAEAGLLPRFNSAEWSHVMALDPYTLRKEGLERALTPAELGRALYHLSKRRHFRQKDLEEGDDATVIINKNEAKKEKEATNARQRLVTALKENETTLGAYLAGIDNDQRKRGHHAERKNVIDEFNRLIAAQKVHHMPLQDKSLVDRIEDTIFAQKPVFWRKKTLGRCHFFPDLEPSQKASWLSCQRRMLEKLNNLEISGGNRRPLDTEERQAILDQLQTKHKMSWSKIRDALKPLYKVRGISEKALRFNLEEGGSKHIEGNHVEAELAETFSASWANHPYKDAIRKATSERLRNADFGEIGEQRVIILQEKHRKARRKTQAATFARDFGATGEQVAKLEELSFPNGWEAYSTKALEILLPELEKGIKLGTLLASADYHDWRNAHFPNRERPTGEILDRLPSPRSRKNLSQAAQDHALEETIRLRSIRNPTVIRVQNELRKVVNNLISVHGKPDLIRIEMTRDIGLSKAEREEKKDRMEANQEKRAKVIESLKAKGIKETNDNIEKWLLWKECGEIDPYSGDPIDLGELFSSNDFEVEHIWPLSISLDNSFGNKTLCRRDLNQLKSKRLPFEAFGHLEPQWNEIKLRVEKMSDPKKGSGMSSRKAKRFLASAIPEDFTSRQLNDTGYAARQSIAFLKRLWPDVGPEGKVNVQPVNGKVTAHLRKLWDLNNILSDNGEKTRADHRHHAIDALVVACTDPGVTQKLSRYWQLKDSLAISAQEPRLDPPWATIRQEADRAVQAIVVSHRVRKKVSGPLHKGTIYGDTGQDEHNGKIAYRMFTVRKNLAELSKSELADIRDEAVKRIVNEWVAERGGVPKKAFPPFPKVSADGPEIKKARIWIKQQLALMAPITTGYADLGNNHHIAIYQKPDGKAEFEVVSLFEASRRIKAKEPVVRREREGAKFVMSLAQGDTIHFAKTAGEKELFWRIQKIASKGQISLLLLADASRDEHSLFEPLVGGIIKRGAQKVSIDPIGRIRTAHD

SEQ ID NO: 17304 - protein, 1003 aa, unidentified
  REGION 1..1003: note = Cas Enzyme sequence
MRTNFGFDLGTTSVGFAVVELDESGNPSRLARIGTRAFEETRAGKKLETKNKERRTARLMRRQIRRRRWRRIKLGRALAEAGLLPAFGSGDWRVVMALDPYRIRAAAPERALGPHEIGRALYHLAKRRGFRFPRPEETERRGDGEDAERQKEEGVTRQRIASLRAEMGTLSLGAHLAKSARKRGKELQIGRDMVEAEFEAIWQAQAGRSPDLLTPGLHRRLQELIFFQRPTFWRVKTLGQCRLVPGAQLCLKGSWVGQQFVMLKELNNLRVVHPETRPLEPHERLAAVAALQSSGTRTFGALRKAMKIRGATFNYEEGKAKHMRGNATEAALHAVFGRAWDVLPARERLRAEIAERLWHVNYRQLGNKRIEIRTWEQREAERANFVVEAQHDYDLTAEQAAALSELNLPVGWLRFSEAAVRRLVPHLEAGLGESDALDVEFAGHRDAAPGSDTRLPTSQQQMPDIRNPTVTRTLNELRKVVNNLLRQYGKPDAIRIELARDLKLPPSERLRMRRDNLERERVRDQAAAALRERNVKVSAENIDKWLLWEECGRNSPYTGDKIGFDALFNRGEFQVDHIWPRSRSFDNGLANKVLAEAEINRVKGDRTPFEYLRDTGGDWDEFRRRVSSLGLPAAKVRRLLNTDLEAALSDELAERQLRDTSYTAVAARQFLERLGVPVGTTNGRVTAHLSRQWGLYAAAFDRNTKDRTDLRHHAIDALAVALTTPGIVKRLSDHYGRELTGRAPQFAPPWPALWQETRAWAERMVVSHRVQRKVSGPLHAENSWRHIGADPEDPRYERYGVRKPIASIKGDKKKSRERIPDPVVAAYVERLKSGGKDAAGGESLGFPTPTRTRVHIKQQPALVVPLRPAHRVYADKSEYHHMALYGRNGRFEDFRLASTFEAARRVAAGQPAVSKQVDGPDGLPLPLIFSLARGDLLELAEAPDVPRFVLVQGVWDSGVIELSTHRSAQREIWRRPNARSLLENYGARKIAVDPIGRERYPRD

SEQ ID NO: 17305 - protein, 1051 aa, unidentified
  REGION 1..1051: note = Cas Enzyme sequence
MGSDIAYRIGLDVGANSIGWCVLALDKSGQPTNVIDLGTRILTASAEAGRDPQTGTSLSVDRRVARGMRRRRDRYLLRRSDLMSALVKHGLMPTDEAARKALEEVDPYEVRARALDEKVPIHHFGRALFHMHQRRGFKSNRKSDRANAEAGLIRQGIESLKEKMLSESARTVGEFLARRHAERRTVRARMVGTGKDAHFPIYLERILIEEEFSALWSAQSSEHPELSNAIREDLHAIMFRQRPLRPVKPGKCSLYPDTDHRAARALPVAQRFRILKELANLRLRHPGNAERPITIAERNILAEKLLGAAKLSFDQMRRALKLDSDVLFNLESERRKDLKGDETAAKLGAKKVMHKEWRDLDLANQTEIIEALLDEEDESRLTERLHAQVGDRPDVIESLTGALLPEGHMRFGIRALNELVAIMNEAVREFADPETGEIIERPIREDEAIAEMGLHHSDRRPDAQMDRLPYYGRVLTDSVVGTGDPAAPTEARYGRLPNPTVHIALNQLRQLVNSIIARYGPPTEIALEMARELKQSREEKAETEKRQTANQKANEKRRERLAELKQPDTGLNRLLLRLYDELPADDKLCVYSGRPIAVAQLFSSAVEIDHILPFSKTLDDGIGNKVLCFRDTNRSKRNRTPAEAFQGDTLVAMQERAARLLPAPKATRFASDAMSRFEDDGFQLPRRLIDTQYIARLAREYMTHVCPPNKVWATNGRLTAMLRGKWGLNSLLPDHNFAEVGHPKNRRDHRHHAIDAFVIAVTDRSLVQRLAHAAGRAELDQMERILADMPAPFPEFRAILDTRLKNTVVSHRPDRGVQGKLHEATAYGPASEAEKADGWTVVYRKPADALNKNEISRIRDPLLRTTCMRLEQDKGEEAVKTYLAAEGIRRVRLLKREDPSGLIQIGHGKDGRHMKAYAAGDNHHVDIVETPDGKWHGEGTSVFHANQPDHEPVWLKNLPGASLKIRLHKGDLIQVEHNGVRTIMRVYWLEPSNNRIRLAGNTEAGSLDKRHKDPDDPFRWFMAGYSTLKKSNARPVRVDVLGQVHSIEPRP

SEQ ID NO: 17306 - protein, 1123 aa, unidentified
  REGION 1..1123: note = Cas Enzyme sequence
MIACFIVFVKQQFSGSRVMQTITTLGLDLGTNSLGWCLIETTGEPGEREEGRIVDIGVRIFSQAEMAGRDPQSKTSLAVARREARGMRRRRDRYLRRRTRLLDLLTRHGLMPAGEAERQRLLRDTDDGKGGDLSGTVLALRARALDHALEPHELGRVLFQINQRRGFKSNRKADSNDPEQGKIAEAIGRLDAQMGESGARSFGEWLHLRRLDGQPVRARMTGDGKGYTFYPSRDVLEREFDLICRRQRAFHAGLLDEDLIAELREAIFFQRRLRPVLPGKCSYNPKEARLPKAHPLFQAFRLVKEVNELEIVGEDQQHRKLTPEQRDTLLLLLRTGLNKRGTLPFSKLRRALKLGKETRFNKESDNRPELEGDVVHFRLSRPGCFGNGWAGLPPARQAEIVERLRTEADRDALIGWLRVDCGLAAENAREVADTVLPQGFCRLGPTALAALLDEMTAGRDENGFVITEAAASIRVYGRTNSQVDPDRAALAELPKYQEVLERHIPPGTGGEARPEDPEWDEAMGRITNPTVHIALNQLRRVVNRLIAKHGRPNRIAIELGRELKLNEQKRLEVNKRIGENTRAARARSEQLANVHEQTDNGYNRLRLKLWEELNPQPLNRVCIYCGGTISASMLFNGETDIDHILPYSKTLDDSQGNKLLCCAPCNRTKGNRAPADVPQWTMRYDDILARATTLPRNKQWRFAEDAMSRIGDEEGFLARQVTDMQYMSRLALTYLAALYPAEQADVDGVFRRHSRVRALPGRMTEMLRRNWGLNDLLHDHNHAEVAKPKNRLDHRHHAIDAAVIACTSRALIQKLATAAGRAEADGAERVAREVAMPWPGFRDELRARVREVIVSHKPDHGTVSRAGDARGRGKTAGKLHNDTAYGFTGETDEKGNALVVRRVAPSHFRKPSDLKAIRGNAHGHSELRDRLEAATRGLEGKAFEAAVQRFVETDEKFAGLRHVRIVEPLRTIPIRDARGRPFKGYKGDSNHRYDVWRLADGKWKAEVVSTFDAHQPGWSSPLRAEHPAAKKVLSLQQGDCVALEGDDGHGIFRVVKFAESGQLTLCGHNEAGPLKSRDADKQDPFKYIYRSASSLLRDKARQVRVDEIGQVFDPGPRQATPSG

SEQ ID NO: 17307 - protein, 1052 aa, unidentified
  REGION 1..1052: note = Cas Enzyme sequence
MRRLGLDIGTNSIGWCLIEDDAQIVAIGSRIFSDGRDPQSGTSLAVDRRLARSARRRRDRYIGRRSAFLEALVAHGLMSSDADEAKLIAARDPYEFRARSLSEPLRPYEIGRALFHLNQRRGFKSNRKAERKGKDQEDGKIAAAAQDLDRAMADAGADTLGQFLHGLDTKRVRMNSESQAYDFYPQRRHYEHEFTRIWETQAAHHPALLTDTAKADLSRILFFQRPLRAPTVGVCTFVTTEERLPKAHPLFQERRLYEEVNQLEITTPGGAPRKLTLDERNTLILKLRSTGKAGFDGLARLLKLKDGQSFNKASQTRTHMAGDEVFAVMSDNKRFGKRWAHFDADRQWQIIHRLREEEDPERLQAFLTVECGLDDEQAAVVGRAPLPEGHGRLGETASRRILALLRDGHNEGAPLSYNQAVAACGWHHSDFRTGECLDRLPYYGELLTREIPPGSQQPNDPPEVRWGKITNPTVHIGLRQLEKLVNSVIDVHGRPDEIVVELARELKLNETEKEEHERRIRRDTTAAIARGQRLAAEGFADTGANRALLRIWEEANPANPLDRRCPYCGQLVSLRALFSGEVDVDHILPYSRTLDDGIANKVVAHRSCNRAKGNRTPFERWGSDGARWEIISAEVARMHRSKQWRFGPDAMERFEREGGFIARQLTDTHYLSRLAGRYLSALYPSKDEGSVYVIPGRMTAMLRRLWGLNSLLPDHNFVENEHSAAPKNRLDHRHHAIDAAVVAVTTRGLMQTIARAAGRAEDKDLDRLFEGLPQPWDGFREELGMSLAAITVSHKPDHGRKGRPAANRDMTAGRLHNDTAYGFTGAMSADGTKPIVVHRVPFNSLKPADLANPDRIADQALREQLQAAVGGLTGKDFEAALARFARHDAVFSGIRRVRVREPLNVIPIRDRGGRIYKGHKGDSNARFDVWRLPKGKWVTDIVSMFDAHQREERHRPHPAAKKILSLRQNDIVAVERDSGPRELLRVVKFSADGTIVLAPPNEGGALKARDAAPRDQDPFKYVYSSAGGLKKLKARQVRVDPLGRVFDPGPRE

SEQ ID NO: 17308 - protein, 1028 aa, unidentified
  REGION 1..1028: note = Cas Enzyme sequence
MRIWGFDVGTTSIGFAVIDYDSDRKAGRIERLGVRIFPEGVTEDKGEPRNAQRRAKRMMRRQLRRKRWRRRALHEILAEAGLLPTDDPKQWPAELAQADPYDLRDRGLSQKLSPHEVGRALFHILKRRGFQSARIAAVEPSDPAKEKEDEGIKAEISQIAAELQGRTLGQWLKSQSKRRGHHTARTMTQEEFERFWTAQVKYHPDLLTDNLRAALAETAFRQRPIFWRLKTLGTCLLEKDAPLCPKGAWIGQRFEMLQTLNNLRLAGGNARPLDEDERRLLLAALETSPSLSFPAARKLLKPVWQRNGTSLKTKFNFEVEGGKKALPGNALEAALIDAFGEAWNTHPKKDAIRAELQDRLWAIQYRKLGEKRVEIRDGNSAEAERQRFIAFAQAEWNASRKTAETLSRIEPPAAWLRHSIKAIQKLLPHMEAGLTYAEARKLVYPEQFEKSDPIEKLPSDPRQFEDLRNPTVKRALTELRKVVNNLLATYGKPERIRIELARNVALTGKDKANYMRTLAERERQRKQAAKELKASLGREPTAGDIEKWLLWQECEKTCPYTFDSIGFADLFGNMPRYDIEHIWPRSLSLDDSFANKTLCRRDVNNKKGQRTPFELYASNHGIADLPDWEEVKIHLRNKVDAGHFPESKWKRFTREQPFAAADDRSDDRLIGDTAYIAREARAWLGQLMPRGIFDVEPRNGRIVSRLRKLWHLDRLLGEDGRKNRDDHRHHALDAAVTALFDTRAMQDIVRWYKAQEDRPEEKPPAIDLPWPAFRDDLRTALEAIVVSHRVRRKVNGPLHDETRLGDSGEPPIREGGKEYRFYVKRKALAQMSKGEIDAIRDERIRTLAQERLAAHDGDVKKAFATPLMLPGRAGKPDREVKKARVIVKSQPHLVTALNGGKAYAAASDNHHMAIYRSIDGKVSYRTVSRIEAARRTARKEPVVQRVLPDGAQLLFTLTPGTTLAFPNNNGRPIYRVVTSVWDSGQIVLVDHTEAGGTVWKRPNASSLVAMGAKKVSVDPIGRVRPARD

SEQ ID NO: 17309 - protein, 1035 aa, unidentified
  REGION 1..1035: note = Cas Enzyme sequence
LKRRGFQGSRKYGSAEEEGAELATAKPKPRKGGRRDGEETPALSEEQKKREKEEKEARAKREKLRAEIAAIAAREGKDRATLAAALLARRDPVCRAAAERPDEFHDPTRLRDAQQDRGMVQDEFGKLWAAQAVHHPHILTDALRAKLHHIGFSQRPTFFRARTIGKCFYAPQEDRALKGDWLTQRFETLAFVNNLRLARGKNPPLDAGQRDDALHYLEQQWTPAKDDKTKRARWDALRTAVGLPKEDRFTQERGEKDTLRGNATEYTLRAALGEAWRNMPEGSRQAIRDAIGSAVREAEYRPVRNGAILEIRDKECWRRQREALARRAESAWGLDADNAKALSEITLPDGYARHARSTMLRLMPHLEAGRPYSEAVELEFGSRRESGPHLRKLPGPNQSEVNKLPRNTEDEKFVHAQMSALLAAIRNPTVLRTLGELQKVVNALLRKYGRPDLIRLEFFRGLKQSREERAATDKRQAEREGARKNAADEIRKRGKPVTGDSIQRWLLWEEQGKRSPYSERHISCTQALDPGATEIDHIFPVSRSFDPGPGNQVLCFVDENRAKLNRTPYEWLASVDPERWKQLSEPNGLWRQMTKNAKWPGWDQEHQRPVGKYARCLKETLEDPNDPQFMNRHATDTAFIAKAARDYLGLLWGGGQEALNKVKPVQGRATSLLRRAWGLSLKRLLYGEIEAGDAPKARDDLRHHAVDALAIALCTDARIKALSEWWQQRELFPHRPKPEFRLPWPGLHAQAKERIEAIVVSHRVQARLSGRMHEEQPLGDTGLKDGDQRLFARRKPVIALSAAEIAGTKDSEIADKAVRDAILKHLAASGIVLVPTGRARRGEVQYTLSETNKQKIAKALAGEIRLPMTDQTKGHSGEPGPLVRRVRLHIKRNGVLLQLGRSKNAHAELGPGTTYRLALYRDGETVRHRQVTKREALARVRHTPALPAVPPEHPDGGRLIAAVGPGDVLMRKVPTGRELLLVRKTNAEGRIFHKPLTLAGQPDSEPSLGPADIADDDNGWRKVSVDPIGDIHTAK

SEQ ID NO: 17310 - protein, 1089 aa, unidentified
  REGION 1..1089: note = Cas Enzyme sequence
MQRIWGFDIGTTSVGFAVVDLEEEEGSGSIIHEGVRIFPEGRTEKDLDPRNQARRAARLLRRQVRRRRLRRKLLRQAFADAGLLPRCGEAGWDEFMNAGVDPYELRARGLHEKLEPREIGRALYHLCHRRGFLSARRAEERPSEKKARDKEEGPIKVEIQGLAAKLEGLCLGEFLYLAALQKPYRDHRLKAWNIHNAYLEGLGEGERRRGRHIGRPMVIDEFDRLWEAQSRFHPGLLTENLKEELQTILSYQRPIFWRLQTVGQCALEPGEPACPKGSWLGQQFLMLQQLNNLRLRFSGQPARWLDEEERKTLLEKLGRQATLEFGGVRSALKKLWKERGLGLKPEINFESGNEKRLLGNAVEAKLAQVFGDAWPAHPARERLRDELYDRTFAIYNRRVGNKRIELHRKDEFKDEIAPAKARFVEQAQKDFGITQEQAEELAAFDPPAGWLRFSAKAVRRLIPLLEEGFGLNETGGALDQAYPNWKAGDDRALNRLPSHPKAMPVLRNPSVNRALNEVRKVANNLLRAYGKPNLIRIELLRELKKTKKQRLDITSRYGKNRDIREAAKRDLEEKGVQPTPEAKDKWVLWKESGEYCPYTGRKICFDDLFRRGEFQIEHIFPLSRSLDNNLTNKTLCATDVNKDKGDRTPFEYFRGRPEVWEEIKDQLEGWVEARKFPKEKMEAFLREDYPPGQEELEERQKADSSYIAVEARKFLARLGVPVEVVNGQVTAQLRSHWGLDAILNPGNPRVKNRQDHRHHAVDALAVALTTRGFVKRLSDYYSHERRGEKPKFKPPWENTFWQDAAGKTEEIIVSHRVQRKISGPLHALTYYGDTGEDITQGGISYRKFVTRKEIKDLTESEVKGGKRSRIRDDTIRALVQEELAKRGGKPAEAFGGSHHLVLPPNEKKKQRKEAAGEPAIAPVIESVRLEVKQQSHLMVPVWPKLKSGLPPKTFADLGGNYCMAIYKLPDGSAYHHTITLPEATAQLNDKDKKHQPVARQVLENGGRLVMSLAPGDILEISRGQEREYMVVRYCNEKGRVFYKPHTMALDPTKMKPPQPEVSFGPDALLGPNIRKVSVDPIGRVRPAHD

SEQ ID NO: 17311 - protein, 902 aa, unidentified
  REGION 1..902: note = Cas Enzyme sequence
MAEAGARTLGEFLNGRTTRRVRMGGESQTYDFYPQRRHVEAEFAALWAAQAPHHPARLTETARADLHRILFFQRDLKDQEVGFCTFAGWNGVPEDERRLAKAHPHFQERRLYEEVNALKIVSPGAADRDLTPDQRDKLILKLKSARKSTFSALGKLIRLDDGERFNKESETRKDLLGDEVFAEMSDKKRFGPRWGFFDLDEQLKIIDRVQNEADPEALLDWLTTEYGLEEEIAVAVSRARLPEGYGRFGETATRRLIEALKAGVVTYDKAAQAAGFHHSDRRTGEVWDRLPYYGHILTSEIAPGKAEYGDENERRFGKITNPTVHIGLRQLEKLVNAIIAVHGRPDQIVVELARELKLNEEEKKKHEARIRRDTAAAIARGEKLAEEGIPDTGANRMALRMWEELNPANPLDRRCPYCGEGIGIRALFSGEADVDHIIPYSQSLDDSAGNKVVVHRHCNRAKGNKTPYEKWGHDDARWEIISAQVARMHRSKQWRFGPGARERLERDGGFIARQLTDTQYLSRATAKYLSSLYTPDEGRRVYALPGRMTAMLRRVWGLNSLLPDHNFVENAHSNAPKNRLDHRHHAIDGAVAAVTDAALMQRIATASSRAEELELERIFEDLAPPWPAFRDDLKERLARVTVSHKPDHGRRKRPDRTRDVTAGRLHNDTAYGLTGQMAADGKTPIVVHRVPFAGLKPGDIADPARIPDQALRDALFAATRDLTGKSYDQALVRFAEQHPVFRGIRRVRVREALNVIPIRDREGRPYKAYKGDSNARYDVWRTPDGKWIADIVSMFDAHRLDGGDRRPHPAAKKVLSLRQNDMLAVERDGEKQILRVVKFSSTGQITLAPQNEAGALKARDASPQDVDPFKYIYSSGSGLKKMRARQIRIDPLGRVFDPGPRE

SEQ ID NO: 17312 - protein, 1032 aa, unidentified
  REGION 1..1032: note = Cas Enzyme sequence
MSGSATVTLGLDIGSESLGWALVQWDGREGRIIRSGVRTFEAGMEGDIASGKAESRAASRRSYRSMRRQTDRRARRRQRLLNLLVRNRLLPPSISAPNGFAALDKTLLAQFRAGLLPLVASPDTLPVVFPYALRALALGTELPPHAIGRAIYHLAQRRGFVSNRKGGQADDEGVVKGGISELRESMDAAGARTLGEYLAALDPHDKQLRRRYTHRDMYTDEFEAIWEAQRGFGNPLLTPALRQDIRDTVFFQRPLRSAGGQVGTCVLEDGARRCLWLHPSAQDFRIYQTVNNLRVIEPNGNNRELEHEEWAELVGMLRDVRSIDCSKARTALGLKRGSKFSVEEGGEKKLLGNATRAAMLEVFGDRWDELSADDQEQACLDVHSMQKDDALERRGRGHWGLTPEQAKAFAQVRLPDGYCSLSLRAIERLLPSLRECVHYATAVKTVYDEFHFRTAIQDCLPPVLDALTELRNPAVARCLTEVRTVVNAILREHGLPDQIHVELARDLKSSNRQKQEAIRKNRENERARQTASKLLQDELGIASPSRDDILKVLLAEECGYICPYTGRAITLPKLFGSQPEFEIEHIVPFSRSLDDSFVNKTLCHIDANRRKGSRTPKEAFGQTPQFAEMRTRVKRFHGQLGREKLRRFESSGAKATDEFLNRKLNDTRMASRLAIKYLSCLYGGDVDAGGSRRIFAVAGGVTWYTRALFGMNSILGDGDRKTRDDHRHHAVDAVAIALSGPGVVKRVADLARRMESQQLFARFSVPEPESPWDGFLADLRDTVAGIVPSRRQSGRVRGALHEDTLYGATGTEGEVAVRKPLVAMSAREIPLIADHAAREAAEAKLRELGVSDPAKAFQSEANLPRLPGGQVIRRARIRFNRRTVPLGSGGGERHVVEGSNHHMEVVAVLDESGTVKRWEGQVVSLLECVHRQRAGLPVVCREHGSGKRFLFSLRKGDAILVEPEEGKQQLLIVRVLNASDGRIEAVPINDAREKSEIWKAGMWIRKSPGMLRKWKCQKMLVTPLGELRNAND

SEQ ID NO: 17313 - protein, 949 aa, unidentified
  REGION 1..949: note = Cas Enzyme sequence
VRNGLLPSGISAPDGFAALDKVLHQELRADLLPKVSSPETMPLVFPYALRALALDRELPPYAIGRAIYHLAQRRGFLSNRKGAQDDDEGVVKGGISELCEAMETSGARTFGEYLAGTDPHDKRVRNRYTHRDMYTSEFEAIWVAQCNLGNSLLTPALKSKIRDVVFFQRPLRSAGGQVGTCVLEPKARRCPWFHLSAQDFRIYQTVNSLRVIEPNGSSRELDHEEWEKLVAKLRDVRSLECSKARGELGLKRGVKFSIEEGGEKKLLGNATRAAMLEVFASRWDTLSEDDQEQACLDVHSMQKDDALERRGQEHWGLSPERAKAFAKIRLPDGYCSLSLRAVRKLLPALQEATAYATAVKTAYGEFQFRTAIQERLPPVLDTVTELRNPAVVRCLTEVRTVVNAVLRKFGLPDQIHVELARDLKSSNRQKQEDIRRNRDNEKHRSMAKGLLQEEVGIASPSRDDILKVALAEECGYICPYTGRAITLPTLFGPQPEFEIEHIVPFSRSLDDSFVNKTLCHIDANRRKGNRTPKEAFEHTPDYREMLTRVKHFHGRLGREKLRRFQISGMQKTNEEFLDRKLNDTRMASRMAIRYLSSLYGGDVDAKGRRRVFAVAGGVTWYTRALFGMNCILGDGGRKTRDDHRHHAVDAVAIALSGPEVVKRVADLAKTLESRQFFTRFSVQSPETPWDGFLDELRRTVAGIVPSRRQNGRVRGALHEDTLYGVTDVQGEVTVRKPLVSMSTREIAFIADRAAREAVAAKLTELGMAEPGKAFQEEGNLPRLPGGHIIRKARLRFNRRTVPIGSTGGERQVVEGANHHMEVVAVLDSDGNVKKWEGYVVSLLESVRRQRAGLPVVCREHGPGKRFVCSLSKGDVIRVEPEGEEPRLLIVRVIDGGNCRIEAVPVCDARKKDEIKKAKQYVLKAPNALRKWNCQKLLVTALGELRNAND

SEQ ID NO: 17314 - protein, 948 aa, unidentified
  REGION 1..948: note = Cas Enzyme sequence
LATTHTLSIDFGSKYIGVALVSHSPKVPNRVLYAAVILVQPKPLNAAIKPRAAIRRIRRTRKTHARRLRRLAQALDGIPGADEVLRFCRRRGYSHDADPKADGEELAYAVSRNEFFAALATEIDRVVPENHREYVLARCQEHLNAERRQTAEIRPARFENRHPTRCQWEGCAKNVARKVNATREQLSQTLFVWLKPAFDQTHKKRPLREAIQRRIDRLVGLARGYGKDPDQETKKVLSKQKRRCFAGILEAVDRFADEETAQQFSENWKKTYSRQFTEILTKKQGGRLRYCRRHSHQFVDLFLAGKQPPHGTEVHMPDLFGRSQQILFQRIWRLVAARILPLAGNRIDRVVVERVAFDILAGPFKQRTEVREDRAAEMYWHGPMYGFGSRREMLKEEFDGRCAYCGRRRSVGEIEHLLPKSRFPFDSYFNILPACRECNQAKGARTPSEVGMTVHQEAYAAFADYVSKKNPPHLYHTIKKGMLKLMTRGGSMATAQRQLGLLADNLVSITNTQKSPRPLARFLADRISRETDRPCQPDWLSGRHTALYREIVLPPEYDKKADKRQNGLVNHAVDAIVAGCKFPSAAALENPRWSHEQKDIHLWREKVLAAATELSGGLPKVEPIERIEFFENDLEHGYLHIDLSAFNWNRQRKSGFKQDPFGATAQGEPLKRKPADEVLANLLSDKDRNGQIESIAHPGLRRLLESRPEEAARLFVDWLQKTTRRGFARAKRGTHPSDKARYAPLEAFSSMPVEDFIRKKTVVGKAKSGSPAERETIPPTIGIRCINKGVRGKLTVTRLNGADGKVQRFAADPQYREWYVGYRDGDDGLPVRTEPMLFAVNQGFAVKRKQGRAWVPVTDDEASILNGVHLGARGDRKLFSSRWRSELESVFQEQGIVKWFRVTQGCYIEKTDGTGFQLRSFDDKKAWMKNGPFENIHRVYRSPLSARR

SEQ ID NO: 17315 - protein, 1040 aa, unidentified
  REGION 1..1040: note = Cas Enzyme sequence
MMSPDIQGSLTLGLDIGTNSVGWALIKKSGRKNSQIIDMGVHVFPESVTGDVAGGRYETKNATRREKRLARRQTDRRRRRRQRILKILQNAELLPNDKNLAKAIAKIDAAFLAQHGGAEISKELMAHIVPYALRRRALDHRLEKYQLGRAFYHLAQRRGFLSNRKIPQTDEDGVVKVGISELNHEMAEASARTLGEYFAGSNPEERRIRSRYTHRDMFKSEFDAIWNAQKSDHPKVLTDDLYKALSNAIFYQRRLKSQKHLIGECLFESGQKRCPWYRPEAQRFRLLQTVNNLRVVDATGLHRAVSKDERAALLKLLETSARVTCAQARKAMGITGKGVKLNVEMGKAKTLYGDKTTASLLAVFGKRWGEFSGSKKEQVILDLVSIEKHKALKKRGEKVWGLSGEALARFTELVLENDYAGLSRKAILKLLPHLESGLSYSEAVQKEYDAFRANGKVYDLLPPVDLEYSDLRNPIVGRSLTYVRRVVNSVASRYGKPERICIELARDIKQSKQEKQRRIKDIAERTRNREKIKEQLRGYGLADPGPDDVIKIQLAEECGWVCPYTGKPIGWEDLFGPQPEFDIEHIIPFAISLDNSFLNKTLCHHHENRHVKGRRSPYQAYAGDEEKYEAILTRIKTNFRGNCKNEKLRRFKLDDLSEFEDFSNRHLNDTRYASKLAVGYLALLYGGIVDVEHKRRVQAVSGPITVIVRRWYGMTGLLGSGEKTRNDHRHHAVDAVAIALTSASTIEALSSASTKMKNVSRLAFGETVEPWNGFLHELKTRLAFVRAVHHQGRKVRGRLHEDSIFSKQPNGMVHIRKPLETLTKDDIPKIADKAVRLAVKGKMNELEEDHPQKAFANPENFPKLKRKDGSDAHVIKRVRIERKQTTVSVGSGAAERAVVGGNNHHIEIVAALDEEGTEVKWEGHVVSMLEAYRRKQDCLRRKEHPDVIKKNYGPGKLYKFSLFCGDFIELDMPEGLREVFVIRAVPQSKQIMFVQCNDARLQKEIKAAKKWFSGYPDSLRKRNARKVHLTPFGEVRNAND

SEQ ID NO: 17316 - protein, 907 aa, unidentified
  REGION 1..907: note = Cas Enzyme sequence
LVPYLYRKKALDTKLEKFELGRTIFHLAQRRGYLSNRKQDLKDEETTGVVKAGIDALKSEMRKVGARTLGEYFCTVDPEKSRIRTRYTDRGMFQEEFRLICSAQRHLISPELEDELYKAIFFQRKLRSAKNLIGRCQIYPEERRCSYAKDEAQRFRIYSTLNHLRVAQKQQIRALTEAERAAAISVLEGFSGHLDRRGKITLAKLAKAVGLGKGEKFTLSDEEKDIHGNVLNAILYHVFGEKASSLTEKERALFFNDLNSIEKTEVLERRLRGFWQLPEDKAAEALKISLPDEYCAYSLRALHEMLPDLEAGIPLSQIRKLSYPTSTGVVYDRLPMLDGDEVDLDLRNPVVHRTLTELRAVVNAVIAKYGKPDRIRVELARDLKSSNKERERRTFEIRKREKARAEIAERIAREAQIEKPSRNDILKVMLADECNFTCPYTGKNFSMKELLYGKDIQIEHIIPYSRSFDDSFRNKTLCFSSANAKKNNRTPFEAFSGAEYEEILQRVGKFKWPFAEDKKDLFKCEKVDSEEFLARNLNDTRYASRLAVKYLGMLYGGVIDAAGKQRVFATTGGATAIVRRAWGANFLLGEGEKVRDDHRHHAIDALTIALTTPDIVKIIAGMPEELRRAKGKTPDDTIIDNAVFKQAKEMLDKAAVSHHIVNKLRGALHRETLYGKNRGGDMRHVRIGVDKLTVKDIPDIVDPVIKKLILERLEIDEDQISTITDKLLKKLVDTENPLFYRNKKGDVVNEIKAVRVKKHVTARTIGAGDGVREVANGANYLLAVFAVQDAQGNESSWEGEIVTLMDAVYRKQHDLPLFERERPGRKFKFTLKKGDIVKWNKDGVEQLCVIRGVSLPQFSCVPVCDARQQKELKNAKCWFTPTLSAAFAGKMTKYRMDILGELRRAND

SEQ ID NO: 17317 - protein, 1041 aa, unidentified
  REGION 1..1041: note = Cas Enzyme sequence
METPTRKPFVLGLDLGARSVGWAVVDLQEGEPAGLRAAGSRCFEAGVSGSIDEGRDEARGQQRRQARQVRRQLARRQLRRTQLLRTLVANGLLPPLEVFDSLAIHRYLAAFDQGLRSRHLSADDRVGHQVLFYRLRTRALDEVLELHDFGRVLYQFGQRRGFLSGRKRRMKEGEEEGLVRKSIAALAEEMQAAGARTLGEYLAGLDPFTQRLRARWTARSMYEQEFAALWASQARFHDALTDGLRKKLAEVFFFQRPLKSQKGRVGECDLVPGRKRAPLACREAQRFRILQAVNNLRVARPGESEVELSPDERKRLLEALTAKGDLTFARVRKVLGLPKETEINLERGGEKRLVGHRTDAKMAAAFGARWEALGEPERDRIVDEVLSMEDPEALGRKAEKVWGLDPAAAAVLRETTFEPGYAAFSRKALRQLLPAMEAGEAVETARRRLFPEAVAARPAIGSLPRVEEALPALRNPAVARALTELRKVVNAIVRKWGVPEVVRIELARDLRNSRERRYRMARENRERETSREKAREEIRRSTGIAAPSRSDIEKYLLAEECGWECPYTGRRIGMTELFGEHPAFDIEHIWPLSRSLDNSFLNKTLCFHEENREHKRNRTPMEAYGNDTARFEQILARVGQFRGSARFVKLARFAADEIPSDFTERQLQDTRYATRMAMRYLGTLYGGTVDADGRRRVQAGAGGLTAIVRNELGLNSILGDGGLKSRDDHRHHAVDALAIALLDPGLVQRLQRAAERAPSHRRRHFAPLDPPWEGFLPEVQRVVDEVVVSHRTGRKISGALHKETNYSREIRTLDENGGIRWVRRLRRPVHLLTARQVEKIADHAVREAVRRKLEEVGGKADRLEEDPPVLEQPDGRRIPIRRVRVEESVNPRRVGSEGRERHVETDANHHMAIFARLDADGAEVAWEAEVVSQLEAQRRLRSGEPVIRWETEPGRSFKFSLSPGDTIELELNGVRRLLHVRSVWMEGETGRIACVNLADARQIADLRRASSWFQPRLSGLRSGGCRKVEVSPLGEVFPAGG

SEQ ID NO: 17318 - protein, 1029 aa, unidentified
  REGION 1..1029: note = Cas Enzyme sequence
MKLEKGKARATILGLDMGPNSLGWAIIETDTNNNPKSLLNAGVRIFKAGLDDLETDGLGKSRNLARREARGRRRLLRRHRQRLIELGISLQKHGLMSNTFDFKDDDERHNFFLNLDKKIESPYSLRAKALDHKLELFELGRVLYHLCQKRGFLSNRKSAPKDEDSKKGVVKTSISNLEKDIAESGSRTLGEYLASLDKDKKRIRGFYTSRKMYENEFELIWNKQADYYPEILTNELKKQIQHSIFYQRPLKSQSHLIGECELEPGHKRAPICLLISQRFRYLQTVNNMRVLEDNGFKERELTGAEREKIINILEYKGKVTFATIRKELKLPKGTKLNLEAGDAKETRGNSTTEKMVSIFGLDQWKAFSDIQRDKIIEEWRSIVKDDTLKRRAIKLWGLSEEKATEFSRLNLEEGYIGFSKKAIAKLMPFLEKGISLQTAIQECYPERFKKELEPVSQLPPIDKSGLGELRNPIVGRSLTELRHLVNTIIKEYGKPDIIRIELARELRQTPKQREETIKKNRGNEKARKEAADLLLKEAGITEPKNSDIIKAQLWIECGQRCPYTGQQISAEALFGEHPQFDVEHIIPYERSLDDSFVNKTLCYADENRRVKHKKTPYEAYYGTPKWDEILSRVKAFNSRLAKEKYRRFCMTPEEVDALCEDFTARQLNDTRWTSKWAKRYLGLLYGGTNEMGIDNQGKLKVQAVTGQITAKLRYAWGLNDILGDDNTKSRDDHRHHAIDAITVALTTPGMVKELSLAAQRASNNIGRLAKDMVRPWDLFYRDVENKVKEIVVSHRLERRVRGALHQESYYGQNKDSKGKPYICIRKPIGALSENDVDNIVHATIRKIVRDKLREIGKPPKDAFKDESNWPKDSQGNRIRRVRIKVGGSEVFRLKHGFVKSDTNHHMAIFKDDKTGKWDCEVVSLYKAYQRLTNNQPIVRRDFGEGKTFVFSLAGGDIIELDDIGQNTRSLYVVRTVPQSKQIYFVPIHDARPLKYIGKTGLTALPSTLAERHCRKVIVTPLGEVRYAND

SEQ ID NO: 17319 - protein, 1058 aa, unidentified
  REGION 1..1058: note = Cas Enzyme sequence
MGNERERYTLGLDMGSASLGWAVVTSKKVIDAGVRVFDPGVDLTIFEKGQPGSSHNVARREARLHRRQLWRRARRQDNLFRALQRAGLLPNGEKRNDVDRGRVRHEVLETLDGQLREKWLPRLRESTTVTAPEQVIPYYLRAVALEERLEPFELGRAFYHLGQRRGFKSNRREPKKISGGEATEKQKKQDERSEIKQHIRQLESNLGERTLGQYFATLDPAEARIRGRWTSRAMYEKEFERIWTKQAEYYSELLTPQRKKEIYDLIFTQRPLKENEEAIGKCALEEGERRAPMATLAAQRFRLLQKVNDLRIVAGLSEERTLSNEERTALLERLETGGDITFAEIRKLPNFRKQKFNLEAGGEKKLPGNRTAKVMLCAFGERWHAMTPEQRGEVVEKWRRTDSPEELMQVGIQQYGLTEEAAQEWAESEPEDGYCSLSLKALHKVLPGMEKGRAFKTVEKEVYGERFSGAEAKSKLPPAEEVLARIPNPAVKRSLTELRKVVNAIIRRYGKPAEIRIELAREIKKNAKERESAWRDMREQQKRRDSARAAIQELGITNPSRDDIEKAMLWEESKVCPYCGQSISFQQLFDENGQAEVEHILPLSRFPDNSFGNKTIAHRSCNQEKGGRTPWEAFGHDDERWAQIIARVKAMGNRTKLEAFQIQSPEALAEFSERRLTDTRYTTKLAAEYLEQLYGGRDIVQPDGSKKRVIYASSGLATATLRKAWGLESILREAAGSANGENKGKPRTDHRHHAVDAIVIGLTSNRAIQQLSAAAAAGDNGRDRISSRTLQAPWPDFVESIRPTIEQMKVSHRPKHKLNGQLHDENSYGVRQNGKGTEVHFREPVQKAATHPERIVDPKVREAVEKKLEEVGGKADKLENNFPVMKTRDGRTVPIKRVRVRVRETKVLRLDRGYVLSASNHHVTIFEIKGKKGRIIWDSPEVVSRHEAMRRKSKRENIVQRTLPDEPDAKFLFSIATGDVVEMDDETRKGRNLFVVRSISEEKKGGINLEFVRHTDARQKDEIKKAGEWYKRSVGRLRELHCRKVHVDLLGRVKGGDA

SEQ ID NO: 17320 - protein, 959 aa, unidentified
  REGION 1..959: note = Cas Enzyme sequence
VATTFTVSIDFGSKYIGIALIMHSPAAPNRVLYAAVIVVEAKPLNASINPRTVARRIRRTGKTHRRRLRRLGLALGGIRGAEDVLRFCRRRGYAYDPGEEGDETELAHAVSRDEFFEALAAEVDRVVPERDRGYVLRRCGKHLNAERRGEAELRPARFENRHPSKCQWEGCTRNVPRKGNALREQLAQTLFVWLRPIFDEIGNKGPLRDAVERQIDRMVGLARGYANRPDADEKKALSKQKKRAFADMLDCVADHGDERTVKRFVDNWRKTYSRQLTAILTKKQGGRLRYCRRHSREYVDVFLAGKQPPHRTEVHITDLFGRSQQILFERIWRLVHARILPLANGQIDRVVVERVAFDVLAGPFKQRVKLSEDRAAEMYWHGPMLGFDSRPEMLKEEFDGRCAYCGRKRKLSEVEHILPRSRFPFDSYFNILPSCAECNRGKGARSLLEAGKTVDEKAFEAYSDYIGKKRPPHLFHTIKKGMLKLMTDGGSMATAERQLALLADNLVSITNTQKSPRPLARFLATEIEKLTGHDCKPQWLSGRHTALYREIILPEYDKKEEKENGGLVNHAVDAIVAGCKLPSAAALENPRWYTNQNDGPKQSDMLAWRKKVLSVAPELAGRLPRVEPIERLEFFENDLGDGYVKIDLSAFNWNQQRKSGHKLDPFGTTADGKPLKRKAADDVLKTLLIESKRDGQIAAIAHRGLRQLLERHRKQAARQFVCWLQKTTRKGLADGKRGTHPSDAARYAALEAFVNTPADKFLSNNSATGNETEDKSDEERETIPATIGIRCINAGVKGRLGVTRCNAHHEKGQLLVSHPQYREFYIGYAAGDDGTPDRSRPIVFSVNQAHAVMRRIGSRVEPVTDDPTSVLQGIPLGGWGDRKGFLAQWRAELHAVFEQHGIVRWFRVGQGCYIEKTDGTAFQLCNFDDQKEWMKNGPFKNIQRVYRSPLRGAVERANP

SEQ ID NO: 17321 - protein, 1016 aa, unidentified
  REGION 1..1016: note = Cas Enzyme sequence
MKTLESFLKQQNWLTRPFEDYDDPYYPWRVRASLATEMEKDPSVLGEKLSVAIRHIAGHRGWRNPYVSVKSLYTVTPDSPAFLEIKKNIQNATGKPLNADVTVGQAICAIELGKIKVKGENNKILTARLFQSDLANEIWKISQVQGLPETLTKQIIDHVFHQRTPKGSFYERIGSDPLAPSHKRALKATDAFQRYRIVTVLSNLRIHESDYRPLTPDELQKSFSFLIQAKAAKRPTWNDLANLLGIPRNKLRGTAVVTEDGEVSRNQPPIHETEAILSSTTIKPLKAFWKEATREEKDELIQALSNSGTPDVNSRVGNVVSEFISGLSDDEIAKLDTLHLPFGRAAYSEATLEKLTDEILSKGETLPAARSKCFTVPSDWVPPKPAIGEPVGNPAVDRVLKIVNRFLHAAEKKWGQPQSVNIEHVRKGFVSVKVTKEIDKENKKRAEKNQATRIEMAEKLGLDGAIRDSAVRRFQVLQRQNCQCLYCGAPIDFKTLEMDHIVPRAGIGSTNKRENLVAVCPSCNRSKNNLPFATWAKNNPNPQITVKAAVERTDFWQCDPDMNKKSFKKFTKHVQDRLKRTDADEEIDARSIESVAWMANELRARIAQYFNDKNSDKKTKVRVFRGSITSEARKASGIERRIEYINGPGKSRLDRRHHAVDALVVALMSSFVAETLTIRRNLKDAQRATESEETWRDFKGVDASHIKQFNNWSNNMKVLVRLLQQALDQDEIPVTKNLRLRFGNGRVHEDTGQALIKLPLSSEISSQMVKRSATEAQWVALTRHPDFDAKDGLKENSEREIRIHGQILSSDDDVAFFPKDAAMMLVPQGAVELGNAIHHARVYKYAKGKKESFGILRVYTVDLLKHQHEDLFKAKIKPQSVSMRYGDPAVVRAIQAGEAQYLGWLVTDDELYIPNIEALATGQLKTLLDEYGPIRHWTVDGFPSPQKLRLRPRLLSKEGLSEESHSDIRKLLDSPGWRVSSNVVFGKGEVRVIRRTQLGWPRTQSASHLPITWEVK

SEQ ID NO: 17322 - protein, 1147 aa, unidentified
  REGION 1..1147: note = Cas Enzyme sequence
MTNSSENIPSIRYRVGIDVGLRSIGFCAIEVDDEDHPIQILNSVVHVHDAGTGGPGETDSLRKRSGIAARARRRGRAQKKRLKRLDALLEDFGWGVVSNEMLESHAPWHVRKRLLNEYITDEVERRQCLSIAAAHIARHRGWRNPYSKVDTLMLEHEPSDRMRGLKNRVEEQTGLCFSDQATQGELIATLLEHDKDVTVRGFVRKGGKATKELGVLQGKYMQYDLVAELRQICVKQKVSDEVFTQLVSTIFYSKEPQADKKNQRKRVGIDELQLAVDPQAVELRAERAHPAFQKFKIVATLSNMRIHEDGVGERALRPDELRAVTAYLLDESGVGIPTWEEVAGQLGVPRHRLRGASKASLETGGGLRYPPFDETTARVAESEIDWLVDWWMQADDESRGHMIDEISNGCGSETNDIEDEEVIELISGATAEDTAKLELLAKKLPSGRAAYSLKTLREVTSSILETGDDLSRVIERLYGVEPGWAPTPAPIEDPVGNPSVDRVVKQVARWLKFAEKRWGIPQAVNIEHTREGLKSASLLEEEKENRIKYEERREERLKKMYAQLGISGPFRRSEQTRYEILYLQDCACLYCGCKIGFETFEIDHIIPRVDASSDSRRENLAAVCHNCNIAKGGMPFGQWMKLNDCPNGVSLEEAIKRVKRWDKNRVGLTEKAMRKRKGEVIGRLKAEKPYEEFDGRSMESVAWMAIELKKRIEGHFNSDRANGNVVKVNAYSGRLTACARRAARVDKRVRLIRLKGDNGHHKNRFDRRNHAMDALVIALMTPAIARTIAVREDRREAQQLTHAFESWKNYLGSEERMQERWGSWIGDVEYACDRLNELIDANKIPVTENLRLRNSGKLHADQPESLRKARRGSKRPRPRRYVLGDALPAEIINRVTDPGLWTALVRVPEFDDQLGLPADPARSLSLRGSRISADFPINYFPTDSPALAVQGGYVGLEFHHARLYRIMGPKEKVTYALLRVCAIDLCGIDRSNLFSVELKESSISMRTADPKLKEAMKEGNATQIGWLVLGDEIQIDPSKFPKQSIGKFLDECGPISSWRVSALNTPSKITLKPRLLSNEPLLKDRNGGRKTDLVASECVEKIMKKTGWVVEINALLKSGSIRVIRRNALGEVRTSPKSGLPISLDLR

SEQ ID NO: 17323 - protein, 1128 aa, unidentified
  REGION 1..1128: note = Cas Enzyme sequence
MIDSSENVPGIRYRVGIDVGLKSIGFCAVEVDRNDQPVRMLNSMVFIHDAGVDPNENKAAKSRKLTAGVARRTRRLYRTRHQRLVNLDRVLSKEFGWPLPDLTSFKDPREPWHVRARLLDGYIPDEGKRKEALSIALRHIARHRGWRNPYAKVETLLQPSEPSDFLKGLNERISTALRTTFSAEATPGQLIDAYLAHPDYVGRAGTPKLRGPQGILAGKLHQSDNAQEIRRICDVQRIEPAERDRLIRVVFEAKSPKGSAKERGLVGYDELPGQGRHVRAEKAHPAFQLFRMVSVLANLRIREGREERPLTPDELQGLVDFINEVSLKQEITWQDLADNLGIERSDLRGTAKASFDGSPVLRNPPTDVTTEKIMACKVKWLKEWWKEADDEQRGYMVDAFSNSGGSEDGTDVNDEVAELLEQATEDDQLEFEKISLPQGRAAYSLDSLRRLTDRMLRDGVDLHTARRLEFNVGDDWKPAVEPIGAPTGNPAVDRVLKQVSRWLHAATERWGEPTVINIEHARDGLGSERVARELMRENEKRRKANASAVAEMAAKLKLSGKVHRSDQIRYFALQRQNCQCLYCGAPITYTTAEMDHILPRADGSSTNDRSNLAAVCRTCNHMKGKIPFAVWASSDKANQGVSLTGALERVNMWQRDNGMSPRQLKQLQREVCARLKSKKPDQEFDGRSMESVAWMAVELRTRIEGFYRSRDEESVPSVGVYRGQLTAEARKASGFESRVNLIGGRGKTRFDRRHHAMDALVIALMNPSVSRTLALRLNMRDAQRLTGVEETWKHFYGKPGEASKRFESWRESMLRGVELFNIALSDNAIPFVENIRLRVGSSVIHDATVRSFCPPKTPDGKQTITKGRGEQHALGSAMPVELIDRAETPALWTALTRCPDFDPKKGLPENPQRTISVNGTRVGPTELVNFFGSSAACLKVRGGYVELGSSIHHARIYRIDGKKNTYAMVRVFQVDLLRLKDRDLFTTPLKPSTISMRTAEPKIRKALADGTATQIGWLVEGDELRLESDKYTGGFVGDVLASYPQMTSWRVAGFPDPAKLRLRPYLLAGEGLDGEASKAMKDLLEGQGWRPSVNVVFSPGSAVLVRRNCLGQERRNSGGTLPNSSELR

SEQ ID NO: 17324 - protein, 1138 aa, unidentified
  REGION 1..1138: note = Cas Enzyme sequence
MIDSSENVPGIRYRVGIDVGLKSIGFCAVKVDRNDQPVRMLNSMVFIHDAGVDPNENKAAKSRKLTAGVARRTRRLYRTRHQRLVNLDRVLSKKFGWPLPDLTSFKDPREPWHVRAGLLEGYIADEEKRKEALAIALRHIARHRGWRNPYAKVETLLQPSEPSDFLKGLNDRISEKLGRAFPADATPGQLVDAYLAHPDYVGRAGTPKLRGPQGILAGKLHQSDNAQEIRRICDVQRIEPAERDRLIRVVFEAKSPKGSAKERGLVGYDELPGQGRHVRAEKAHPAFQLFRMVSVLANLRIREGREERPLTPDELQGLVDFIDQVSLKQEVTWQDLADNLGIERSDLRGTAKASFDGSPVLRNPPTDVTTEKIMACKVKWLKEWWKEADDEQRGYMVDAFSNSGGSEDGTDVNDEVAELLEQATEDDQLEFEKISLPQGRAAYSLDSLRRLTDRMLRDGVDLHTARRLEFNVGDDWKPAVEPIGAPTGNPAVDRVLKQVSRWLHAATERWGEPTVINIEHARDGLGSERVARELMRENEKRRKANASAVAEMAAKLKLSGKVHRSDQIRYFALQRQNCQCLYCGAPITYTTAEMDHIVPRADGSSTNDRSNLAAVCRTCNHMKGKIPFAVWASSDKANQGVSLTGALERVNMWQRDNGMSPRQLKQLQREVCARLKSKKPDQEFDGRSMESVAWMAVELRTRIEGFYRSRDEESVPSVGVYRGQLTAEARKASGFESRVNLIGGRGKTRFDRRHHAMDALVIALMNPSVSRTLALRLNMRDAQRLTGVEETWKHFYGKPGEASKRFESWRESMLRGVELFNIALSDNAIPFVENIRLRVGSSVIHDATVRSFCPPKTPDGKQTITKGRGEQHALGSAMPVELIDRAETPALWTALTRCPDFDPKKGLPENPQRTISVNGTRVGPTELVNFFGSSAACLKVRGGYVELGSSIHHARIYRIDGKKNTYAMVRVFQVDLLRLKDRDLFTTPLKPSTISMRTAEPKIRKALADGTATQIGWLVEGDELVIDTSKYSNGFVGEVLARYPEATSWRVAGFMNGTQLRLKPLLLSKEGFVDEKQAERLSVEPTSEAIKKTADSPGWLPAANVLFGSGQVRVIRRNCLGEERYRSSASLPVSMMLE

SEQ ID NO: 17325 - protein, 1138 aa, unidentified
  REGION 1..1138: note = Cas Enzyme sequence
MTTSSENIPSIRYRVGIDVGLKSIGFCAVEVDRNDQPVKLLNSMVFIHDAGVDPNEKKAAKTRKLTAGVGRRTRRLYRTRHQRLVNLDRVLSKEFGWPLPDLTAFKNPREPWHVRSRLLEGYIADDDQRKAALSIALRHMARHRGWRNPYAKVETLLQPTEPSDFLKGLNERISTSLGRSFPADATPGQLVDAYLAHPDYAKKAGTPKLRGPEGVLAGKLHQSDNAEEIRRICEVQQIDPADRDRLIRAVFQAKSPKGSAKERGLVGHDELPGQGKHVRAEKAHPAFQKFRIVSVLANLRVREGRAERPLTPEELQGLTDFLLVAGLKQEVTWQDLADNLGIERSDLRGTAKASFDGSPVLRNPPTDVTTEKILACKVKWLKEWWKDVDDEQRGYFVDAFSNSGGSEDSSDVNDEVAELLEQATEDDQLEFEKISLPQGRAAYSLDSLRRLTERMLRDGVDLHTARRLEFNVGDDWKPAVEPIAAPTGNPAVDRVLKQVSRWLHTATERWGEPTVINIEHARDGLGSQRVARELMRENDRRRSANAAAVAEMAAQLKLSGRVRRSDQIRYFALQRQNSQCLYCGTEITFTTAEMDHIVPRADGSSTNDRSNLAAVCRTCNHKKGAIPFAAWASSDQANRGVSLKGALERVKFWVRDNGMSPKQFKQLQREVSARLKSRKPDEEFDGRSMESVAWMAVELRTRIEGFYRTRDEESVPSVGVYRGQLTAEARKASGFESRVNLIGGRGKTRFDRRHHAMDALVIALMNPSVSRTLALRVNMRDAQRIAGLEETWKNFYGKPGEASQRFESWRESMLRGVELFNIALSDNAIPFVENIRLRVGSSVIHDATVHSFCPPKTPDGEQIITKGYGEQRRLGDVLPVELIDRAETPALWTALTRCPDFDPKKGLPENPNRTITVNGTRVGPMELLNFFGSSAACLKVRGGYVELGSSIHHARIYRIDGKKIAYAMVRIFQVDLLRLKDQDLFTTPLKPSTISMRTAEPKIRQALADGTATQIGWLVEGDELQIDTSKYSGGFIGEVLERYPEATSWRVAGMPSSSKLRIKPLLLSKEGFVDEKQAERLGLEATSEAVRKTVDTPGWWPAVNVIFGYGTVRVVRRNCLGEERWRSSASLPVSMMLE

SEQ ID NO: 17326 - protein, 1128 aa, unidentified
  REGION 1..1128: note = Cas Enzyme sequence
MSTSSENIPGIRYRVGIDVGLKSIGFCAVEVDRHDQPIKLLNSMVFVHDAGVDPNENKAAKSRKLTAGVARRTRRLYRTRHQRLVNLDRVLSKEFGWPLPDLTAFKDPREPWHVRARLLEGYIADEYQRSAALSIALRHMARHRGWRNPYAKVESLLQPAEPSDFLKGLNDRISKSLGKVFPADATPGQLVDAYLAHPDYVRKAGTPKLRGPQGILAGKLHQSDNAEEIRRICEVQQIDPADCDRLIRAVFRAKSPKGSAKERGLVGHDELPGQGKHVRAEKAHPAFQRFRIVSVLANLRIREGRAERPLTPEELQGLTDFLLIAGLKQEVTWQDLANNLGIERSDLRGTAKASFDGSPVLRNPPTDVTTEKILACKVKWLKEWWKDADDEQRGYFVDAFSNSGGSEDSADVNDEVVELLEQATEDDQLEFEKISLPQGRAAYSLDSLRRLTDRMLRDGVDLHTARRLEFNVGDDWKPAVEPIGAPTGNPAVDRVLKQVSRWLHATTERWGEPTVINIEHARDGLGSERVARELMRENDRRRSANAAAVAEMAAQLKLSGRVRRSDQIRYFALQRQNNECLYCGTGITFTTAEMDHIVPRADGSSTNDRSNLAAVCRTCNHKKGAIPFGAWASSDQANAGVSLRGALERVKFWVRDNGMSPKQFKQLQREVSARLKSRKPDEEFDGRSMESVAWMAVELRTRIEGFYRTRDEESVPSVGVYRGQLTAEARKASGFESRVNLIGGRGKTRFDRRHHAMDALVIALMNPSVSRTLALRVNMRDAQRLAGLKETWKNFYGKPGEASQRFESWRESMLRGVELFNIALSDNAIPFVENIRLRVGSSVIHDATVHSFCPPKTPDGEQIITKGYGEQHRLGDALPVELIDRADTPALWTALTCCPEFDPKKGLPENPNRTISVNGTRVGPTELLNFFGSSAACLKVRGGYVELGSSIHHARIYRIDGKKTAYAMVRVFQVDLLRLKDQDLFTTPLKPSTISMRTAEPKIRQALADGTAIQIGWLVEGDELQIDTSKYSGGFIGEVLERYPEATSWRVAGFPHPAKLRLRPYLLSAEGLDKEASKEMTDLLDGQGWRPAVNVVFSPGTVQITRRNALGELRSSEFSSLPITRVMR

SEQ ID NO: 17327 - protein, 1095 aa, unidentified
  REGION 1..1095: note = Cas Enzyme sequence
MVFIHDAGVDPNENKAAKSRKLTAGVARRTRRLYRTRHQRLVNLDRVLSKEFGWPLPDLTAFTDPREPWHVRSRLLEGYIADDDKRKAALSIALRHMARHRGWRNPYAKVESLLQPAEPSDFLEGLNGRISEFLGRSFPADATPGQLVDAYLAHPDYVKKAGTPKLRGPKGILAGKLHQRDNAEEIRRICEVQQIDPADRDRLIRAVFQAKSPKGSAKERGLVGYDELPGQGKHVRAEKAHPAFQKFRIVSVLANLRIREGREERPLTPEELQGLTDFLLIAGLKQEVTWQDLADNLGIERSDLRGTAKASFDGSPVLRNPPTDVTTEKILACKVKWLKEWWKDADDEQRGYFVDAFSNSGGSEDSSDVNDEVAELLEQATEDDQLEFEKISLPQGRAAYSLDSLRRLTDRMLRDGVDLHTARRLEFNVGDDWKPAVEPIAAPTGNPAVDRVLKQVSRWLHTATERWGEPTVINIEHARDGLGSERVARELMRENDRRRSANAAAVAEMAAQLKLSGKVRRSDQIRYFALQRQNNECLYCGTGITFTTAEMDHIVPRADGSSTNDRSNLAAVCRTCNHKKGAIPFAAWASSDQANTGVSLKGALERVKFWVRDNGMSPKQFKQLQREVSARLKSRKPDEEFDGRSMESVAWMAVELRTRIEGFYRTRGEESVPSVGVYRGQLTAEARKASGFESRVNLIGGRGKTRFDRRHHAMDALVIALMNPSVSRTLALRVNMRDAQRIAGLEETWKNFFGKPGEASNRFESWRESMLCGVELFNIALSDNAIPFVENIRLRVGSSVIHDATVHSFCPPKTPDGEQIITKGYGEQHRLGDALPVELIDRAETPALWTALTRCPDFDPKKGLPENPNRTISVNGTRVGPMELLNFFGSSAACLKVRGGYVELGSSIHHARIYRIDGKKTAYAMVRVFQVDLMRMKDRDVFTTPLKPSTISMRTADKKIRKALVEGAATQIGWLVEGDELQIDPSKFSGGFVGELLTQYPETKSWRVAGFMNGTQLRLKPLVLSKEGFVDEKQAARLGVEPTSEAIQKTVDSPGWLPAANVLFGSGGVLVVRRNCLGEERWQSSGSLPVTMMLE

SEQ ID NO: 17328 - protein, 1128 aa, unidentified
  REGION 1..1128: note = Cas Enzyme sequence
MVTSSENIPGIRYRVGIDVGLRSIGFCAIEVDRDDQPVKLLNSMVFIHDAGVDPNENKAAKSRKLTAGVARRTRRLYRTRHQRLVNLDRVLSKEFGWPLPDLMAFKDPREPWHVRSKLLEGYIADDDKRKAALSIALRHIARHRGWRNPYAKVESLLQPAEPSDFLKGLNERISESLGRSFPADATPGQLVDAYLAHPDYVKKAGTPKLRGPKGILAGKLHQSDNAEEIRRICEAQQIDPADRDRLIRAVFQAKSPKGSAKERGLVGYDELPGQGKHVRAEKAHPAFQKFRIVSVLANLRVREGRAERPLTPEELQGLTDFLLVAGLKQEVTWQDLADNLGIERSDLRGTAKASFDGSPVLRNPPTDVTTEKILACKVKWLKEWWKDADDEQRGYFVDAFSNSGGSEDSSDVNDEVAALLEQATEDDQLEFEKISLPQGRAAYSLDSLRRLTDRMLRDGVDLHTARRLEFNVGDDWKPAVEPIGAPTGNPAVDRVLKQVSRWLHAATERWGEPTVINIEHARDGLGSERVARELMRENDRRRSANAAAVAEMAAQLKLSGRVRRSDQIRYFALQRQNNECLYCGTEITFTTAEMDHIVPRADGSSTNDRSNLAAVCRTCNHKKGAVPFAAWASSDRANTGVSLKGALDRVKFWVRDNGMSPKQFKQLQREVSARLKSRKPDEEFDGRSMESVAWMAVELRTRIEGFYRTRDEESVPSVGVYRGQLTAEARKSSGFESRVNLIGGRGKTRFDRRHHAMDALVIALMNPSVSRTLALRVNMRDAQRIAGLEETWKNFYGKPGEASQRFESWRESMLRGVELFNIALSDNVIPFVENIRLRVGSSVIHDATVHSFCPPKTPDGEQIITKGYGEQHRLGDALPVELIDRAETPALWTALTRCPDFDPKKGLPENLNRTISVNGTRVGPTELLNFFGSSAACLKVRGGYVELGSSIHHARIYRIDGKKTAYAMVRVFQVDLLRLKDQDLFTTPLKPSTISMRTAEPKIRQALADGTATQIGWLVEGDELQIDTSKYSGGFIGEVLERYPEATSWRVAGFPHPAKLRLRPYLLSAEGLDKEASKDMTDLLDGQGWRPAVNVVFSPGTVQITRRNALGELRSSEYSSLPITRVMR

SEQ ID NO: 17329 - protein, 1138 aa, unidentified
  REGION 1..1138: note = Cas Enzyme sequence
MTTSSENIPSIRYRVGIDVGLKSIGFCAVEVDRNDQPVKLLNSMVFIHDAGVDPNENKAAKSRKLTAGVARRTRRLYRTRHQRLVNLDRVLSKEFGWPLPDLMAFKDPREPWHVRSRLLEGYIADDNERKAALSIALRHMARHRGWRNPYAKVETLLQPAEPSDFLKGLKKRISESLGRSFPADATPGQLVDAYLAHPDYAKKAGTPKLRGPEGILAGKLHQSDNAEEIRRICEVQQIDPADRDRLIRAVFQAKSPKGSAKERGLVGHDELPGQAKHVRAEKAHPAFQRFRIVSVLANLRIREGRAERSLTPEELQGLTDFLLLAGLKQEVTWQDLADNLGIERSDLRGTAKASFDGSPVLRNPPTDVTTEKILACKVKWLKEWWKDADDEQRGYFVDAFSNSGGSEDSSDVNDEVAELLEQATEDDQLEFEKISLPQGRAAYSLDSLRRLTDRMLRDGVDLHTARRLEFNVGDDWKPAVEPIGAPTGNPAVDRVLKQVSRWLHAATERWGEPTVINIEHARDGLGSERVARELMRENDRRRSANAAAVAEMAAQLKLSGRVRRSDQIRYFALQRQNNECLYCGTEITFTTAEMDHIVPRADGSSTNDRSNLAAVCRTCNHKKGAIPFAAWASSDQANAGVSLKGALDRVKFWVRDNGMSPKQFKQLQREVSARLKSRKPDEEFDGRSMESVAWMAVELRTRIEGFYRTRDEESVPSVGVYRGQLTAEARKASGFESRVNLIGGRGKTRFDRRHHAMDALVIALMNPSVSRTLALRVNMRDAQRLAGLEETWKNFYGKPGEASNRFESWRESMLRGVELFNIALSDNAIPFVENIRLRVGSSVIHDATVHSFCPPKTPDGEQIITKGYGEQHRLGDALPVELIDRAETPALWTALTRCPDFDPKKGLPENPNRTISVNGTRVGPMELLNFFGSSAACLKVRGGYVELGSSIHHARIYRIDGKKTAYAMVRVFQVDLLRLKDQDLFTTPLKPSTISMRTAEPKIRQALADGTATQIGWLVEGDELQIDTSKYSGGFIGEVLERYPEATSWRVAGMPSSSKLRIKPLLLSKEGFVDEKQAERLGLEATSEAVRKTVDTPGWWPAVNVIFGYGTVRVVRRNCLGEERWRSSASLPVSMMLE

SEQ ID NO: 17330 - protein, 1128 aa, unidentified
  REGION 1..1128: note = Cas Enzyme sequence
MIDSSANVQGVRYRVGIDVGLKSIGFCAVEVDQHDQPIQLLNSIVFIHDAGVDPNENKAAKSRKLTAGVARRTRRLYRTRHQRLVNLDRVLSKEFGWPLPDLVSFKDPREPWHVRARLLDGYIPDEGKRKEALSITLRHIARHRGWRNPYAKVETLLQPSEPSDFLKGLNDRISEKLGRAFPADATPGQLVDAYLAHPDYVGRAGTPKLRGPQGILAGKLHQSDNAQEIRRICDVQRIEPAERDRLIRVVFEAKSPKGSAKERGLVGYDELPGQGRHVRAEKAHPAFQLFRMVSVLANLRIREGREERPLTPDELQRLVDFIDQVSLKQEVTWQDLADYLGIERSDLRGTAKAAFDGSPVLRNPPTDVTTEKIMACKVKWLKEWWKEADDEQRGYFVDAFSNSGGSEDGTDVNDEVTELLEQATEEDQLEFEKISLPQGRAAYSLDSLRRLTDRMLRDGVDLHTARRLEFNVSDDWKPAVEPIGAPTGNPAVDRVLKQVSRWLHAATERWGEPTVINIEHARDGLGSEKVARELMRDNEKRRKANAAAVADMAQQLGLSGKVHRSDQIRYFALQRQNCQCLYCGAPITYATAEMDHIVPRADGSSTNDRSNLAAVCRTCNHMKGKIPFAVWASSDKANQGVSLTGALERVNMWQRDNGVSPKQLKQLQREVCARLKSKKPDQEFDGRSMESVAWMAVELRTRIEGFYRSRNEEFVPSVGVYRGQLTAEARKASGFENRVNLIGGRGKTRFDRRHHAMDALVIALMNPSVSRTLALRLNMRDAQRLTGVEETWKNFYGKPGEASQRFESWRESMLSGVELFNIALSDNAIPFVENIRLRVGSSVIHDATVRSFCPPKTPDGKQIITKGYGEQHSLGSAMPVELIDRAETPALWTALTRCSDFDPKKGLPENPQRTISVNGTRVGPTELVNFFGSSAACLKVRGGYVELGSSIHHARIYRIDGKKTTYAMVRVFQVDLLRFKDRDLFTTPLKPSTISMRTAEPKIRKALADGTATQIGWLVEGDELRLESDKYTGGFVGAVLASYPQVTSWRVAGFPDPAKLRLRPYLLAGEGLDGEASKAMKDLLEGQGWRPSVNVVFSPGSAVLVRRNCLGQERRNSGGTLPNSSELR

SEQ ID NO: 17331 - protein, 1138 aa, unidentified
  REGION 1..1138: note = Cas Enzyme sequence
MIDSSANIQGVRYRIGIDVGLKSVGFCAVEVDRCDQPIRLLNSMVFIHDAGVDPNENKAAKSRKLTAGVARRTRRLYRTRHQRLVNLDRVLSKEFGWPLPDFSSFKDPREPWHVRAGLLDGYIADDEKRKEALSIALRHMARHRGWRNPYAKVETLLQPSEPSDFLKGLNERIGTALRRSFPEDATPGQLIDAYLAHPDYVGRAGTPKLRGPEGILAGKLHQSDNAQEIRRICDVQQIEPADRDRLIRVVFEAKSPKGSAKERGLVGYDELPGQGKHVRAEKAHPAFQLFRMVSVLANLRIREGREERPLSPHELQGLVDFIDQVSLKQEVTWQDLADNLGIERSDLRGTAKASFDGSPVLRNPPTDVTTEKIMACKVKWLKEWWKDADDEQRGYMVDAFSNSGGSEDGTDVNDEVAELLEQATEEDQLEFEKISLPQGRASYSLDSLRRLTCRMLSEGVDLHTARRLEFKVGDDWKPAVEPIGAPTGNPAVDRVLKQVSRWLHAATERWGEPTVINIEHARDGLGSERVARELMRENERRRKVNAAAVADMAQKLNLSGRVHRSDQIRYFALQRQNCQCLYCGAPITFETAEMDHIVPRADGSSTNDRSNLAAVCRTCNHMKGKIPFAVWASSEKVNQGASLKGALERVRMWERDNGMSPKQFKQLQREVSARLKSRKPDEEFDGRSMESVAWMAVELRTRIEGFYRSRGEESVPSVGVYRGQLTAEARKASGFENRVNLIGGRGKTRFDRRHHAMDALVIALMNPSVSRTLALRLNMRDAQRLTGVEETWKNFYGKPGEASQRFESWRESMLRGVELFNIALSDNAIPFVENIRLRVGSSVIHDATVHSFCPPKTPDGKQIITKGYGEQHTLGSALPAELIDRAETPALWTALTRCPDFDPKKGLPENPQRTISVNGTRVGPTDLLNFFGSSAACLKVRGGYVELGSSIHHARIYRIDGKKTAYAMVRVFQVDLMRMKHQDVFTTPLKPSAISMRTAEPKIRQALANGTATQIGWLVEGDELRIDTSKYSGGFVGEVLARYPEVTSWRVAGFMTPAKLRIKPILLSKEGFVDEAQAALLRVEPTSEAIQKTVDSPGWLPAVNVLFGAGGVRVIRRNCLGEERYRSSTSLPISMTLE

SEQ ID NO: 17332 - protein, 1128 aa, unidentified
  REGION 1..1128: note = Cas Enzyme sequence
MIDSSANVQGVRYRVGIDVGLKSIGFCAVEVDQHDQPIRLLNSIVFIHDAGVDPNENKAAKSRKLTAGVARRTRRLYRTRHQRLVNLDRVLSKEFGWPLPDFASFKDPREPWHVRASLLEGYIADEEKRKEALSIALRHMARHRGWRNPYAKVETLLQPSEPSDFLKGLNNRISEELGRAFPADATPGQLVDAYLAHPDYVGRAGTPKLRGPKGILAGKLHQSDNAQEIRRICDVQRIEPTERDRLIRVVFEAKSPKGSAKERGLVGYDELPGQSRHVRAEKAHPAFQLFRMVSVLANLRIREGREERPLTPDELQRLVDFIDQVSLKQEVTWQDLADKLEIERSDLRGTAKASFDGSPVLRNPPTDVTTEKIMACKVKWLKEWWKEADDEQRGYFVDAFSNSGGSEDGTDVNDEVTELLEQATEEDQLEFEKISLPQGRAAYSLDSLRRLTDRMLRDGVDLHTARRLEFNVGDDWKPAVEPIGAPTGNPAVDRVLKQVSRWLHAATERWGEPTVINIEHARDGLGSERVARELMRENEKRRKANASAVAEMAAKLKLSGKVHRSDQIRYFALQRQNCQCLYCGAPITYTTAEMDHIVPRADGSSTNDRSNLAAVCRTCNHMKGKIPFAVWASSDKVNQGVSLTGALERVKMWERDNGMSPKQFKQLQREVSARLESRKPDQEFDGRSMESVAWMAVELRTRIEGFYRSRNEEFVPSVGVYRGQLTAEARKASGFENRVNLIGGRGKTRFDRRHHAMDALVIALMNPSVSRTLALRLNMRDAQRLTGVEETWKNFYGKPGEASQRFESWRESMLSGVELFNIALSDNAIPFVENIRLRVGSSVIHDATVRSFCPPKTPDGKQIITKGYGEQHSLGSAMPVELIDRAETPALWTALTRCPDFDPKKGLPENPQRTISVNGTRVGPTELVNFFGSSAACLKVRGGYVELGSSIHHARIYRIDGKKTTYAMVRVFQVDLLRLKDRDLFTTPLKLSTISLRTAEPKIRKALADGTATQIGWLVEGDELRLESDKYTGGFVGDVLASYPQVTSWRVAGFPDPAKLRLRPYLLAGEGLDGEASKAMKDLLEGQGWRPSINVVFSPGSAVLVRRNCLGQERRNSGGTLPNSSELR

SEQ ID NO: 17333 - protein, 1069 aa, unidentified
  REGION 1..1069: note = Cas Enzyme sequence
ARRTRRLYRTRHQRLVNLDRVLSKEFGWPLPDFSSFKDPREPWHVRAGLLDGYIADDEKRKEALSIALRHMARHRGWRNPYAKVETLLQPSDPSDFLKGLNERIGTALRRSFPEDATPGQLIDAYLAHPDYVGRAGTPKLRGPEGILAGKLHQSDNAQEIRRICDVQQIGPADRDRLIRVVFEAKSPKGSAKERGLVGYDELPGQGKHVRAEKAHPAFQLFRMVSVLANLRIREGREERPLSPDELQGLVDFIDQVSLKQEVTWQDLADNLGIERSDLRGTAKASFDGSPVLRNPPTDVTTEKIMACKVKWLKEWWKDADDEQRGYFVDAFSNSGGSEDGTDVNDEVAELLEQATEEDQLEFEKISLPQGRASYSLDSLRRLTCRMLSEGVDLHTARRLEFKVGDDWKPAVEPIGAPTGNPAVDRVLKQVSRWLHAATERWGEPTVINIEHARDGLGSERVARELMRENERRRKANASAVAEMAAKLKLSGKVHRSDQIRYFALQRQNCQCLYCGVPITYTTAEMDHIVPRADGSSTNDRSNLAAVCRTCNHMKGKIPFAVWASSDKANQGVSVTGALERVNMWQRDNGMLPKQFKQLQREVSARLKSRKPDEDFDGRSMESVAWMAVELRARIEGFYRSRDEESVPSVGVYRGQLTAEARKASGFESRVNLIGGRGKTRFDRRHHAMDALVIALMNPSVSRTLALRLNMRDAQRLTGVEETWKNFYGKPGEASQRFESWRESMLRGVELFNIALSDNAIPFVENIRLRVGSSVIHDATVHSFCPPKTPDGKQIITKGYGEQHALGSALPVELIDRAETPALWTALTRCPDFDSKKGLPENPQRTISVNGTRVGPKDLLNFFGSSAACLKVRGGYVELGSSIHHARIYRIDGKKTAYAMVRVFQVDLMRMKHQDVFTTPLKPSAISMRTAEPKIRKALADGTATQIGWLVEGDELAIDTSKYSGGFVGEVLARYPEVTSWRVAGFMTPAKLRIKPILLSKEGFVDEAQAALLRVEPTSEAIQKTVDSPGWLPAVNVLFGAGGVRVIRRNCLGEERYRSSTSLPISMTLE

SEQ ID NO: 17334 - protein, 1128 aa, unidentified
  REGION 1..1128: note = Cas Enzyme sequence
MIDSSANVQGVRYRVGIDVGLKSIGFCAVEVDQHDQPIRLLNSIVFIHDAGVDPNENKAAKSRKLTAGVARRTRRLYRTRHQRLVNLDRVLSKEFGWPLPDFASFKDPREPWHVRASLLEGYIADEEKRKEALSIALRHMARHRGWRNPYAKVETLLQPSEPSDFLKGLNNRISEELGRAFPADATPGQLVDAYLAHPDYVGRAGTPKLRGPKGILAGKLHQSDNAQEIRRICDVQRIEPTERDRLIRVVFEAKSPKGSAKERGLVGYDELPGQSRHVRAEKAHPAFQLFRMVSVLANLRIREGREERPLTPDELQRLVDFIDQVSLKQEVTWQDLADKLEIERSDLRGTAKASFDGSPVLRNPPTDVTTEKIMACKVKWLKEWWKEADDEQRGYFVDAFSNSGGSEDGTDVNDEVTELLEQATEEDQLEFEKISLPQGRAAYSLDSLRRLTDRMLRDGVDLHTARRLEFNVGDDWKPAVEPIGAPTGNPAVDRVLKQVSRWLHAATERWGEPTVINIEHARDGLGSEKVARELMRENEKRRKANASAVAEMAAKLKLSGKVHRSDQIRYFALQRQNCQCLYCGAPITYTTAEMDHIVPRADGSSTNDRSNLAAVCRTCNHMKGKIPFAVWASSDKVNQGVSLTGALERVKMWERDNGMSPKQFKQLQREVSARLESRKPDQEFDGRSMESVAWMAVELRTRIEGFYRSRNEEFVPSVGVYRGQLTAEARKASGFENRVNLIGGRGKTRFDRRHHAMDALVIALMNPSVSRTLALRLNMRDAQRLTGVEETWKNFYGKPGEASQRFESWRESMLSGVELFNIALSDNAIPFVENIRLRVGSSVIHDATVRSFCPPKTPDGKQIITKGYGEQHSLGSAMPVELIDRAETPALWTALTRCPDFDPKKGLPENPQRTISVNGTRVGPTELVNFFGSSAACLKVRGGYVELGSSIHHARIYRIDGKKTTYAMVRVFQVDLLRLKDRDLFTTPLKLSTISLRTAEPKIRKALADGTATQIGWLVEGDELRLESDKYTGGFVGDVLASYPQVTSWRVAGFPDPAKLRLRPYLLAGEGLDGEASKAMKDLLEGQGWRPSINVVFSPGSAVLVRRNCLGQERRNSGGTLPNSSELR

SEQ ID NO: 17335 - protein, 1138 aa, unidentified
  REGION 1..1138: note = Cas Enzyme sequence
MIDSSANVQGVRYRVGIDVGLKSVGFCAVEVDQHDQPIRLLNSMVFIHDAGVDPNENKAAKSRKLTAGVARRTRRLYRTRHQRLVNLDRLLSKEFGWPLPDLTSFKDPREPWHVRAGLLEGYIADEEKRKEALSIALRHIARHRGWRNPYAKVETLLQPSEPSDFLKGLNNRISEELGRAFPADATPGQLVDAYLAHPDYVGRAGTPKLRGPKGILAGKLHQSDNAQEIRRICDVQKIAPAERDRLIRVVFEAKSPKGSAKERGLVGYDELPGQGKHVRAEKAHPAFQKFRIVSVLANLRIREGRKERPLTPDELEDLVDFINQVSLKQEITWQDLADKLKIERSDLRGTAKASFDGSPVLRNPPTDVTTEKIMACKVKWLKEWWKEADDEQRGYMVDAFSNSGGSEDGTDVNDAVAELLEQATEDDQLEFEKISLPQGRAAYSLDSLRRLTARMLSEGVDLHTARRLEFKVSDDWKPAVEPIGAPTGNPAVDRVLKQVSRWLHAATERWGEPTVINIEHARDGLGSERVARELMRENEKRRKANASAVAEMAAKLKLSGKVHRSDQIRYFALQRQNCQCLYCGAPITYTTAEMDHIVPRADGSSTNDRSNLAAVCRTCNHMKGKIPFAVWASSDKANQGVSLTGALERVNMWQRDNGVSSKQFKQLQREVRARLKSKKPDQEFDGRSMESVAWMAVELRTRIEGFYRSRGEESVPSVGVYRGQLTAEARKASGFENRVNLIGGRGKTRFDRRHHAMDALVIALMNPSVSRTLALRLNMRDAQRLTGVEETWKNFYGKPGEASQRFESWRESMLSGVELFNIALSDNAIPFVENIRLRVGSSVIHDATVRSFCPPKTPDGKQIITKGYGEQHSLGSAMPVELIDRAETPALWTALTRCPDFDPKKGLPENPQRTISVNGTRVGPTELVNFFGSSAACLKVRGGYVELGSSIHHARIYRIDGKKTTYAMVRVFQVDLLRLKDRDLFTTPLKPSTISMRTAEPKIRKALADGTATQIGWLVEGDELVIDTSKYSNGFVGEALARYPEATSWRVAGFMNGTQLRLKPLLLSKEGFVDEKQAERLSVEPTSEAIKKTADSPGWLPATNVLFGSGQVRVIRRNCLGEERYHSSASLPVSMTLE

SEQ ID NO: 17336 - protein, 1128 aa, unidentified
  REGION 1..1128: note = Cas Enzyme sequence
MIDSSANVQGVRYRVGIDVGLKSIGFCAVEVDQHDQPIRLLNSIVFIHDAGVDPNENKAAKSRKLTAGVARRTRRLYRTRHQRLVNLDRVLSKEFGWPLPDFASFKDPREPWHVRASLLEGYIADEEKRKEALSIALRHMARHRGWRNPYAKVETLLQPSEPSDFLKGLNNRISEELGRAFPADATPGQLVDAYLAHPDYVGRAGTPKLRGPKGILAGKLHQSDNAQEIRRICDVQRIEPTERDRLIRVVFEAKSPKGSAKERGLVGYDELPGQSRHVRAEKAHPAFQLFRMVSVLANLRIREGREERPLTPDELQRLVDFIDQVSLKQEVTWQDLADKLEIERSDLRGTAKASFDGSPVLRNPPTDVTTEKIMACKVKWLKEWWKEADDEQRGYFVDAFSNSGGSEDGTDVNDEVTELLEQATEEDQLEFEKISLPQGRAAYSLDSLRRLTDRMLRDGVDLHTARRLEFNVGDDWKPAVEPIGAPTGNPAVDRVLKQVSRWLHAATERWGEPTVINIEHARDGLGSERVARELMRENEKRRKANASAVAEMAAKLKLSGKVHRSDQIRYFALQRQNCQCLYCGAPITYTTAEMDHIVPRADGSSTNDRSNLAAVCRTCNHMKGKIPFVVWASSDKANQGVSLTGALERVNMWQRDNGVSPKHFKQLQREVSARLESRKPDQEFDGRSMESVAWMAVELRTRIEGFYRSRNEEFVPSVGVYRGQLTAEARKASGFENRVNLIGGRGKTRFDRRHHAMDALVIALMNPSVSRTLALRLNMRDAQRLTGVEETWKNFYGKPGEASQRFESWRESMLSGVELFNIALSDNAIPFVENIRLRVGSSVIHDATVRSFCPPKTPDGKQIITRGYGEQHSLGSAMPVELIDRAETPALWTALTRCPDFDPKKGLPENPQRTISVNGTRVGPTELVNFFGSSAACLKVRGGYVELGSSIHHARIYRIDGKKTTYAMVRVFQVDLLRLKDRDLFTTPLKLSTISLRTAEPKIRKALADGTATQIGWLVEGDELRLESDKYTGGFVGDVLASYPQVTSWRVAGFPDPAKLRLRPYLLAGEGLDGEASKAMKDLLEGQGWRPSINVVFSPGSAVLVRRNCLGQERRNSGGTLPNSSELR

SEQ ID NO: 17337 - protein, 1132 aa, unidentified
  REGION 1..1132: note = Cas Enzyme sequence
MITSSENVPGIRYRVGIDVGLKSIGFCAVEVDRNDQPVRMLNSMVFIHDAGVDPNENKAAKSRKLTAGVARRTRRLYRTRHQRLVNLDRVLSKEFGWPLPDLTSFEDPREPWHVRAGLLEGYIADDEKRKEALSIALRHIARHRGWRNPYAKVETLLQPSEPSDFLKGLNERISTALRTTFPAEATPGQLIDAYLAHPDYVGRAGTPKLRGPQGILAGKLHQSDNAQEIRRICGVQRIEPAERDRLIRVVFEAKSPKGSAKERGLVGYDELPGQGRHVRAEKAHPAFQLFRMVSVLANLRIREGREERPLTPDELQGLVDFINQVSLKQEITWQDLADNLGIERSDLRGTAKASFDGSPVLRNPPTDVTTEKIMACKVKWLKEWWKEADDEQRGYMVDAFSNSGGSEDGTDVNDEVAELLEQATEDDQLEFEKISLPQGRAAYSLDSLRRLTARMLSEGVDLHTARRLEFKVSDDWKPAVEPIGAPTGNPAVDRVLKQVSRWLHAATERWGEPTVINIEHARDGLGSERVARELMRENEKRRKANASAVAEMAAKLKLSGKVHRSDQIRYFALQRQNCQCLYCGTPITYTTAEMDHIVPRADGSSTNDRSNLAAVCRTCNHMKGKIPFAVWASSDKANQGVSLTGALERVNMWQRDNGVSPKQFKQLQREVRARLKSKKPDQEFDGRSMESVAWMAVELRTRIEGFYRSRGEESVPSVGVYRGQLTAEARKASGFESRVNLIGGRGKTRFDRRHHAMDALVIALMNPSVSRTLALRLNMRDAQRLTGVEETWKHFYGKPGEASKRFESWRESMLRGVELFNIALSDNAIPFVENIRLRVGSSVIHDATVRSFCPPKTPDGKQIFTKGYGEQHALGSAMPVELIDRAETPALWTALTRCPDFDPKKGLPENPQRTISVNGTRVGPTELVNFFEFSNEGIKACLKVRGGYVDLSGAIHHARIYRIAGKKTAYAMVRVFQVDLLHLKDQDVFTTPLKPSTISMRCADPKLRRALESGFATQIGWLVRGDELVVETDVYREGKIAQIMERYPELKHWKVAGFPEAKKIKMRPYLLSKEGLDDDEQGPIRTVLDVKGWITTIHKLLGAGGVRVIRRNCLGEERYHSSASLPVSMTLE

SEQ ID NO: 17338 - protein, 1148 aa, unidentified
  REGION 1..1148: note = Cas Enzyme sequence
MTNSLENIPGIRYRVGIDVGLRSIGFCAVEVDDEDHPIQILNSVVHVHDAGTGGPGETDSLRKRSGIAARARRRGRAQKKRLKRLDALLEDLGWGVVSNELLESHAPWHVRKRLLNEYITDDVERRQCLSTAAAHIARHRGWRNPYSKVDTLMLEHEPSDRMRGLKNRVEEQTGLCFSDQATQGELIATLLEHDKDVTVRGFVRKGGKATKELGVLQGKYMQYDLVAELRQICVKQKVSDEVFKQLVSTIFYSKEPQSDKKNQRKRVGIDELQLAVDPQAVELRAERAHPAFQKFKIVATLANMRIQEDGVGERALRPDELHAVTAYLLDESGVGIPAWEEVAGQLGVPRHRLRGASKASLETGGGLRYPPFDETTARVAESEIDWLVDWWMQADDESRGHMIDEISNGCGSETNDIEDEEVIELISSATAEDAAKLELLAKKLPSGRAAYSLKTLREVTSSILETGDDLSRVIERLYGVEPGWAPTPAPIEDPVGNPSVDRVVKQVARWLKFAEKRWGIPQAVNIEHTREGLKSASLLEEEKENRIKYEERREERLKKMYAQLGISGPFRRSEQTRYEILYLQDCACLYCGCKIGFETFEIDHIIPRVDASSDSRRENLAAVCHSCNSAKGGMPFGQWAKLGDCPSGVSLKDALKRVGRWDKDRAGLTDKAMRKRKAEVKSRLKTETPYEEFDGRSMESVAWMAIELKRRIEGYFNSDRSKVCAAVQVNAYSGRLTACARRAAHVDKRVRLIRLKGDNDHHKNRFDRRNHAMDALVIALMTPAIARTIAVREDRREAQQLTHAFLSWKNFLGSEERMQERWESWIGDVEYACDRLNELIDANKIPVTENLRLRNSGKLHADQPESLKKARKGSKRSRPQRYVLGDALPVDVINRVTDPGLWTALVRAPEFDAETGLPANPARSLSLRGSLISADFPVSYFPTDSPALAVQGGYVGLEFHHARLYRIMGPKEKVTYALLRVCAIDLCGIERSNLFAVELKESSISMRTADPKLKEAMKEGTATQIGWLVLGDEIQIDPSKFPKQSIGKFLDECGPISSWRVSALNTPSKITLKPRLLSNEPLLKERNGARKSDLVVSECVEKIMKKTGWVVEINALLKSGSIRVIRRNALGEVRTSAKSGLPISLNLR

SEQ ID NO: 17339 - protein, 1132 aa, unidentified
  REGION 1..1132: note = Cas Enzyme sequence
MIDSSENVPGIRYRVGIDVGLKSIGFCAVEVDRNDQPVRMLNSMVFIHDAGVDPNENKAAKSRKLTAGVARRTRRLYRTRHQRLVNLDRVLSKEFGWPLPDLTSFKDPREPWHVRARLLDGYIPDEGKRKEALSIALRHIARHRGWRNPYAKVETLLQPSEPSDFLKGLNERISTALRTTFSAEATPGQLIDAYLAHPDYVGRAGTPKLRGPQGILAGKLHQSDNAQEIRRICDVQRIEPAERDRLIRVVFEAKSPKGSAKERGLVGYDELPGQGRHVRAEKAHPAFQLFRMVSVLANLRIREGREERPLTPDELQGLVDFINEVSLKQEITWQDLADNLGIERSDLRGTAKASFDGSPVLRNPPTDVTTEKIMACKVKWLKEWWKEADDEQRGYMVDAFSNSGGSEDGTDVNDEVAELLEQATEDDQLEFEKISLPQGRAAYSLDSLRRLTDRMLRDGVDLHTARRLEFNVGDDWKPAVEPIGAPTGNPAVDRVLKQVSRWLHAATERWGEPTVINIEHARDGLGSERVARELMRENEKRRKANASAVAEMAAKLKLSGKVHRSDQIRYFALQRQNCQCLYCGAPITYTTAEMDHILPRADGSSTNDRSNLAAVCRTCNHMKGKIPFAVWASSDKANQGVSLTGALERVNMWQRDNGMSPRQLKQLQREVCARLKSKKPDQEFDGRSMESVAWMAVELRTRIEGFYRSRDEESVPSVGVYRGQLTAEARKASGFESRVNLIGGRGKTRFDRRHHAMDALVIALMNPSVSRTLALRLNMRDAQRLTGVEETWKHFYGKPGEASKRFESWRESMLRGVELFNIALSDNAIPFVENIRLRVGSSVIHDATVRSFCPPKTPDGKQTITKGRGEQHALGSAMPVELIDRAETPALWTALTRCPDFDPKKGLPENPQRTISVNGTRVGPTELVNFFEFSNEGIKACLKVRGGYVDLSGAIHHARIYRIAGKKTAYAMVRVFQVDLLHLKDQDVFTTPLKPSTISMRCADPKLRRALESGFATQIGWLVRGDELVVETDVYREGKIAQIMERYPELKHWKVAGFPEAKKIKMRPYLLSKEGLDDDEQGPIRTVLDVKGWITTIHKLLGAGGVRVIRRNCLGEERYHSSASLPVSMTLE

SEQ ID NO: 17340 - protein, 1138 aa, unidentified
  REGION 1..1138: note = Cas Enzyme sequence
MVASSENVPGIRYRVGIDVGLKSIGFCAVEVDRSDQPVRLLNSMVFIHDAGVDPNENKAAKSRKLTAGVARRTRRLYRTRHQRLVNLDRVLSKEFGWPLPDLTSFKDPREPWHVRAGLLEGYIADDAERKEALSIAVRHMARHRGWRNPYAKVETLLQPSEPSDFLEGLKERISKALRRAFPADATPGQLVDAYLAHPDYVKEPGTPKVRGPEGILAGKLHQSDNAEEIRRICDVQKIPPAERDRLIRVVFEAKSPKGSAKERGLVGYDELPGQGKHVRAEKAHPAFQKFRIVSVLANLRIREGREERALTPDELEGLVDFINQVSLKQEVTWQDLADNLGIERSDLRGTAKASFDGSPVLRNPPTDVTTEKIMACKVKWLKEWWKAANDEQRGYFVDAFSNSGGSADGTDVNDEVAELLEQATEEDQFEFEKISLPQGRAAYSLDSLRRLTDRMLRDGVDLHTARRLEFNVGDDWKPAVEPIGAPTGNPAVDRVLKQVSRWLHAATERWGEPTAINIEHARDGLGSERVARELMRENEKRRKANASAVADMAQKLNLSGKVRRSDQIRYFALQRQNCQCLYCGAPITFTTAEMDHIVPRADGSSTNDRSNLAAVCRTCNHMKGKIPFAAWASSDKANEGVSLEGALERVKMWERDNGMSPKQFKQLQREVSARLKSRKPDEEFDGRSMESVAWMAVELRTRIEGFYRSRNEEFVPSVGVYRGQLTAEARKASGFESRVNLIGGRGKTRFDRRHHAMDALVIALMNPSVSRTLALRVNMRDAQRLAGVEETWKNFYGKPGEASQRFESWRESMLRGVVLFNIALSENAIPFVENIRLRVGSSVIHDATVHSFCPPKTPDGEQIMTKGFGEQHSLGSALPVELIDRAETPALWTALTRCPDFNPKKGLPENPSRRISVNGTRVGPEDLLNFFGSSAACLKVRGGYVELGSSIHHARIYRIDGKKIAYAMVRVFQVDLMRMKHQDVFTTPLKPSAISMRTAEPKIRQALANGTATQIGWLVEGDELRIDTSKYRGGFIGEVLERYPEATSWRVAGFMNGTTLRLKPYVLSKEGFVDATQAEKTGEEVTSEAVRKVVDAPGWLPAVNVLFGAGAVRVVRRNCLGEERCLSSNSLPVSMMLE

SEQ ID NO: 17341 - protein, 1132 aa, unidentified
  REGION 1..1132: note = Cas Enzyme sequence
MTTSSENIPSIRYRVGIDVGLRSIGFCAIEVDRNDQPVKLLNSMVFIHDAGVDPNENKAAKSRKLTAGVARRTRRLYRTRHQRLVNLDRVLSKEFGWPLPDLMAFKDPREPWHVRSRLLEGYIADDNERKAALSIALRHMARHRGWRNPYAKVETLLQPAEPSDFLKGLKKRISESLGRSFPADATPGQLVDAYLAHPDYAKKAGTPKLRGPEGILAGKLHQSDNAEEIRRICEVQQIDPADRDRLIRAVFQAKSPKGSAKERGLVGHDELPGQAKHVRAEKAHPAFQRFRIVSVLANLRIREGRAERSLTPEELQGLTDFLLLAGLKQEVTWQDLADNLGIERSDLRGTARASFDGSPVLRNPPTDVTTEKIMACKVKWLKEWWKDADDEQRGYFVDAFSNSGGSEDSSDVNDEVAELLEQATEDDQLEFEKISLPQGRAAYSLDSLRRLTDRMLRDGVDLHTARRLEFNVGDDWKPAVEPIGAPTGNPAVDRVLKQVSRWLHAATERWGEPTVINIEHARDGLGSERVARELMRENDRRRSANAAAVAEMAAQLKLSGRVRRSDQIRYFALQRQNNECLYCGTEITFTTAEMDHIVPRADGSSTNDRSNLAAVCRTCNHKKGAVPFAAWASSDRANTGVSLKGALDRVKFWVRDNGMSPKQFKQLQREVSARLKSRKPDEEFDGRSMESVAWMAVELRTRIEGFYRTRDEESVPSVGVYRGQLTAEARKSSGFESRVNLIGGRGKTRFDRRHHAMDALVIALMNPSVSRTLALRVNMRDAQRIAGLEETWKNFYGKPGEASNCFESWRESMLRGVELFNIALSDNAIPFVENIRLRAGSSVIHDATVHSFCPPKTPDGEQIITKGYGEQHRLGDALPVELIDRAETPALWTALTRCPDFDPKKGLPENLNRTISVNGTRVGPMELLNFFEYSKEGIKACLKVRGGYVELGSSIHHARIYRIDGKKTAYAMVRVFQADLLRLKDRDLFTTPLKPSTISMRTAEPKIRQALANGTATQIGWLVRGDELLVDTSAYPDGKIGRVMTKHPEAIHWKVAGFPEPKKIKMRPYLLSKEGLSEDMEESIRTVVDTKGWITTIQKLLEAGEVKVIRRNCLGEERWRSSVSLPVSMILE

SEQ ID NO: 17342 - protein, 1087 aa, unidentified
  REGION 1..1087: note = Cas Enzyme sequence
MSAHHLRVGIDVGTHSVGLATLRVDDQGTPIELLSALSLIHDSGIGEDGKKTASTRKEISGVARRTRRLLRRRRKRLQQLDKVLLDLGFPIPDLGGQTDPYLVWRVRAQLVEETLPEELRGPAISMAVRHIARHRGWRNPYSKVESLLSPAEDSPFMEALRERIMKGPGVLLDDDITPGQAMAQVALTQRITMRGPDGILGKLHQSDNANEIRKICARQGISPDVCKQLLRAVFKAESPRGSAVSLVAPDPLPGQGSFRRAPKCDPEFQRFRIISIVANLRISEAGNRDRPLTADERRQVVTFLLEDPREDLSWVDVAEKLGISRQALRGTATLTADGERSAAQPPINVTDQIMRKTKISLLKTWWAKADAERQGAMVRYLYEGLEDSECAEVIADLPEEDQAKLDSLHLPAGRAAYSRESLTALSDHMLATTDDLHEARKQLFGVDDSWTPPAEPVGAPVGNPSVDRTLKVVARYLAAVENVWGKPEVIQVEHVRDGFASERAARERDRANNRRYEVNQRTIKDIQQSYGVEGHVRPGDVMRHHAITLQDSACLYCGGTIGYHTSQLDHIVPQAGTGSNNHRENLVAVCERCNRSKSNTPFAVWAQTCGIPDVGVKKAVERVRGWRNRPGGMTSGELKRLKKEVIARLQRTQEDPEIDARSMESVAWMANELRHRIAATYPDTDVMVYRGSVTAAARKAAGIDSRINLIGEKGRKDRIDRRHHAVDASVVALMERSVAKTLAERSSLRWAQRLTGQEETWKQYTGLTVGAREHFESWRSHMLRLTELFNERLAADEVHVVENLRLRLGSGNAHDDTIRKYDTPRLGNGLSVNQIDRASSPALWCALTREEDFDAENGLPAREDRLIRVHGQELTSNDRIELFSKKRGNDAKEKPFGAIAVRGGYAEIGSTIHHARIYRIEGKKPVYAMLRVFTHDLLSHRHGDLFSAVVPPQSISMRCAEPKLRQAIAEGNATYLGWVVVGDELEIDIDSFKTGQIADFLSEYPDTTRWRIRGFYNDRQLRLRPAYLAAEGLIDPSEAISKTLSIPGWLPAINQVATTHPRVIRRDALGRVRSSSRSGLPTSWTIE

SEQ ID NO: 17343 - protein, 1138 aa, unidentified
  REGION 1..1138: note = Cas Enzyme sequence
MITSSENVPGIRYRVGIDVGLKSVGFCAVEVDQRDQPIRLLNSMVFIHDAGVDPNENKAAKSRKLTAGVARRTRRLYRTRHQRLVNLDCVLSKEFGWPLPDFSSFKDPREPWHVRAGLLDGYIADDEKRKEALSIALRHIARHRGWRNPYAKVETLLQPSEPSDFLKGLNERIGTALRRSFPEDATPGQLIDAYLAHPNYVGRAGTPKLRGPEGILAGKLHQSDNAQEIRRICDVQQIEPEDRDRLIRVVFEAKSPKGSAKERGLVGYDELPGQGKHVRAEKAHPAFQLFRMVSVLANLRIREGREERPLSPHELQGLVDFIDQVSLKQEVTWQDLADNLGIERSDLRGTAKASFDGSPVLRNPPTDVTTEKIMACKVKWLKEWWKDADDEQRGYMVDAFSNSGGSEDGTDVNDEVAELLEQATEEDQLEFEKISLPQGRAAYSLDSLRRLTRRMLSEGVDLHTARRLEFKVGDDWKPAVEPIGAPTGNPAVDRVLKQVSRWLHAATGRWGEPTVINIEHARDGLGSERVARELMRENERRRKVNAAAVADMAQKLNLSGRVHRSDQIRYFALQRQNCQCLYCGVPITYTTAEMDHIVPRADGSSTNDRSNLAAVCRTCNHMKGKIPFAVWASSDKANQGVSVTGALERVNMWQRDNGMSPKQFKQLQREVSARLKSRKPDEEFDGRSMESVAWMAVELRTRIEGFYRSRDEESVPSVGVYRGQLTAEARKASGFESRVNLIGGRGKTRFDRRHHAMDALVIALMNPSVSRTLALRLNMRDAQRLTGVEETWKNFYGKPGEASQRFESWRESMLRGVELFNIALSDNAIPFVENIRLRVGSSVIHDATVHSFCPPKTPDGKQIITKGYGEQHALGSALPVELIDRAETPALWTALTRCPDFDSKKGLPENPQRTISVNGTRVGPKDLLNFFGSSAACLKVRGGYVELGSSIHHARIYRIDGKKTAYAMVRVFQVDLMRMKHQDVFTTPLKPSAISMRTAEPKIRKALADGTATQIGWLVEGDELAIDTSKYSGGFIGEVLARYPEVTSWRVAGFMTPAKLRIKPILLSKEGFVDEAQAALLRVEPTSEAIQKTVDSPGWLPAVNVLFGAGGVRVIRRNCLGEERYRSSTSLPISMTLE

SEQ ID NO: 17344 - protein, 1089 aa, unidentified
  REGION 1..1089: note = Cas Enzyme sequence
MPAHHLRVGIDVGTHSVGLATLRVDDQGTPIELLSALSLIHDSGIGEDGKKTASTRKEISGVARRARRLLRRRRRRLQQLDKVLLDLGFPIPDLGGQTDPYLVWRVRAQLVEETLPEELRGPAVSMAVRHIARHRGWRNPYSKVESLLSPAEDSPFMGALRERIMKETGELLDDDITPGQAMAQVALTHRITMRGPDGILGKLHQSDNANEIRRICARQGISPDVCKQLLRAVFKAESPRGSAVSRVAPDPLPGQGSFRRAPKCDPEFQRFRIISIVANLRISEACGKDRPLTADERRKVVAFLLKDPRDDLSWVDVAEKLGVSRQALRGTATLTADGERSAAQPPVDVTDQVMRKTKIRLLKTWWEKADAERRGAMVRYLYEGLEDSECAEVIADLPEEDEAKLDSLHLPAGRAAYSRESLTALSDHMLATTDDLHAARKQIFGVDDSWSPPAEPIGAPVGNPSVDRTLKIVARYLAAVENVWGTPEAIQVEHVRDGFASERAARERDWANNRRYEVNQRAVKEIQQSYGIEGHVRPGDVMRYHAISLQDCKCLYCGGTIDYHTSQLDHIVPQAGTGSNNHRENLVAVCERCNRSKSNTPFAVWAENCGIPEVGVEEAIDRVRAWRNRPTGMSARDLGRLKKEVIARLRRSQEDPEIDARSMESVAWMANELRHRIAAAYPNADVMVYRGSITAAARKATGVDSRINLIGEKGRKDRIDRRHHAVDASVVALMERSVAKTLAERSNLRWAQRLTGQQETWKQYMGLTVGAREHFETWRSRMLRLTELFNEHLAVDEVHVVENLRLRLGSGNAHDDTIRKYATPRLGDGLTANQVDRAYSPALWCALTREEDFDEKNGLPAREDRSIRVHGQEIRSDDHIQLFSKKKKTEDDSKEKPFGAIAMRGGYVEIGSTIHHARIYRIEGKKPAYAMLRVFTHDLLSQRHGDLFSAMIPPQSISMRCAEPKLRQAIASGSATYLGWVVVGDELKITIDTFTKNAIGRFLKDYPGTTRWRICGYDANNKLTLKPRILAAEGLENPSNDVSEIIEGKGWRVAINVLANVKPTVVRRDALGRPRRSSRFGLPISWTIE

SEQ ID NO: 17345 - protein, 1087 aa, unidentified
  REGION 1..1087: note = Cas Enzyme sequence
MPAHHLRVGIDVGTHSVGLATLRVDDQGTPIELLSALSLIHDSGIGEDGKKTASTRKEISGVARRARRLLRRRRKRLQQLDKVLLDLGFPIPDLGGQTDPYLVWRVRAQLVEETLPEELRGPAISMAVRHIARHRGWRNPYSKVESLLSPAEDSPFMEALRERIMTGPGEILDDDITPGQAMAQVALTHRITMRGPEGILGKLHQSDNANEIRKICDRQGISSDVCKQLLRAVFKAESPRGSAVSRVAPDPLPGQGSFRRAPKCDPEFQRFRIISIVANLRINEATGKDRPLKADERRHVVTFLLEDPRDDLTWVDVAEKLKVPRHALRGTATLTADGERSAAQPPLNVTDQIMRKTKINALKTWWAEADAERRGAMVRYLYEGLEDSECAEIIADLPEEDQAELDSLHLPAGRAAYSRESLTALSDHMLATTDDLHEARKQLFGVDDSWAPPAEPVGAPVGNPSVDRTLKAVARYLAAVENVWGKPEVIQVEHVRDGFASERAARERDRANNRRYDVNQRAIKEIQQSYGVEGHVRPGDVMRHHAITLQDSACLYCGGTIGYHTSQLDHIVPQAGTGSNNHRENLVAVCERCNRSKSNTPFAVWAQTCGIPDVRVKEAIGRVRAWRNRPGGMSPGDLKRLKKEVIARLQRTQEDPEIDARSMESVAWMANELRHRIAAAYPDADVMVYRGAITAAARKAAGIDSRINLIGEKGRKDRIDRRHHAVDASVVALMERSAAKTLAERSSLRWAQRLTGQEETWKQYTGATVGAREHFEMWRGHMLRLTELFNEHLAADEVHVVENLRLRLGSGNAHDDTIRKYDTPRLGDGLSVNQIDRASSPALWCALTREEDFDSKNGLPARDDRLIRVHGQKLTSNDRIELFSKKRGNDTKEKPFAAIAVRGGYAEIGSTIHHARIYRIEGKKPAYAMIRVFTHDLLSQRHGDLFSAVIPPQSISMRCAEPKLRQAIAAGNATYLGWVVVGDELAIDIDSFTSGQIANFLKEYPGTTRWRIRGFYNDRQLRLRPAYLSAEGLVDPSEAVSKTLSIPGWLPAINQVAATHPRVIRRDALGRVRKSSISELPTSWIIK

SEQ ID NO: 17346 - protein, 1087 aa, unidentified
  REGION 1..1087: note = Cas Enzyme sequence
MAAMRIRVGVDVGKHSVGCCAIAVDPAGAPVRILSALSLIHDAGIGEDGKEKATSRRELAGVARRARRLLRRRRKRLQQLDTLLVRLGYPIVDFAEQKDPYLVWRVRAQLVQEVFPEKTRRYAISMALRHIARHRGWRNPYARTESLLAPAPESDFMRAMRKRVMNTTGEVLDEGFTPGQAMAVVALNNRVAMRGPDGVLGKLHQTDNANEIRRICKTQGVSEQECRELILAVFASESPRGSSRSRVASDPLPGQGDFLRAPKCDPEFQRFRVISIVANLRIAGRDGAQRPLLPRERKKVVTFLLESMSEDLAWGDVAERLGVRRQNLRGTASMTADGERASAQPPVDVTNQVMGSCRIKPLRLWWADADAERRGAMVRYLYEGADDSECAEFLGSLSEEEQGKLDSIHLPAGRAAYSRESLALLSEQMLATDDDLHAARKHVFHVDDSWKPPAEPVGAPVGNPSVDRTVKAVARFLNGVADVWGTPEAIQIEHVRAGFSSERTARELDHDNNRRFRQNQTAVDDIKKAYGIQGEVRHSDVVRYTAVMVQDSVCVYCGGTIGYLTCQLDHIVPQAGPGSNNRRENLVAVCERCNRSKSNTPFATWAQDCGISGVSVEEAVARVRRWRNIQDGRAQSAQLRRLQKNVIARLRRTDEDPEIDARSMESVAWMANELHHRVQSAYPSAEVAVYRGSLTAGARRAAGIDSRVNLLGERGKKDRLDRRHHAVDAAVIALMNPSVAKTLAERSSQRWAQRLSGQEETWKSFTGATPGARDRFDSWRDHMLRLTELLNAALAEDRVCVTENLRLRLGSGNAHHEIVRPLARHRLGDGLTAVQVDRASSPALWCALTRQPDFTPRGGLPPSENRVIKVHGRRVTADDNITVFSQKPGDDAAEKPFAAIAVRGGFATIGLTIHHARLYRIEGRKPVYAMLRVFSHDLLPYRRDDLFSVPLALQTISVRCAWPKLRAALAEEAATYLGWVVVGDELEVPMESFTGGYIGGFRKEFPNITRWRIRGFESATVVKLRPNVLAAEGLTESVGDVAKIVGRGWRMSVNVLFSTHPTVVRRDALGRVRHSSAAGLPTTWTVR

SEQ ID NO: 17347 - protein, 1087 aa, unidentified
  REGION 1..1087: note = Cas Enzyme sequence
MAAMRIRVGVDVGTHSVGCCAIAVDPAGAPVRILSALSLIHDAGIGEDGKEKATSRRELAGVARRARRLLRRRRRRLQQLDALLVRLGYPIVDLAEQKDPYLVWRVRAQLVQEVFPEKTRRYAISMALRHIARHRGWRNPYARPESLLAPAPESDFMRAMRKRVMNTTGEILDEGFTPGQAMAVVALNNRVAMRGPDGVLGKLHQTDNANEIRRICKTQGVSEQECRELILAVFASESPRGSSRSRVASDPLPGQGDFLRAPKCDPEFQRFRVISIVANLRIAGRDGAQRPLLPRERQKVVTFLLESMSEDLAWGDVAERLGVRRQNLRGTASMTADGERASAQPPVDVTNQVMGDCRIKPLRLWWADADAERRSAMVRYLYEGADDSECAEFLGSLSEEEQGKLDSIHLPAGRAAYSRESLALLSEQMLATDDDLHAARKHVFHVDDSWKPPAEPVGAPVGNPSVDRTVKAVARFLNGVADVWGTPEAIQIEHVRAGFSSERTARELDQDNDRRFRQNQKAVDAIKKAYGIQGEVRHSDVVRYTAVMVQDSACVYCGGTIGYLTCQLDHIVPQAGPGSNNRRENLVAVCERCNRSKSNTPFATWAQDCDIPGVSVEEAVARVRRWRNIQDGRAQSAQLRRLQKNVIARLRRTDEDPEIDARSMESVAWMANELHHRVQSAYPSAEVAVYRGSLTAGARRAAGIDSRVNLLGERGKKDRLDRRHHAVDAAVIALMNPSVAKTLAERSSQRWAQRLSGQEETWKSFTGATPGARDRFDSWRDHMLRLTELLNAALAEDRVCVTENLRLRLGSGNAHDGIVRPLARHRLGDGLTAVQVDRASSPALWCALTRQPDFTPRGGLPPSESRVIKVHGRRVTADDNITVFSQKPGDDATEKPFAAIAVRGGFATIGLTIHHARLYRIEGRKPVYAMLRVFSHDLLPYRRDDLFSVPLALHTISVRCAWSKLRAALAEEAATYLGWVVVGDELEVPMESFTGGYISGFRKEFPNITRWRIRGLESATVVKLRPNVLAAEGITEAAGDVVKIVGKAWRPSVNVLFSTHPTVVRRDALGRVRHSSAAGLPTTWTVR

SEQ ID NO: 17348 - protein, 930 aa, unidentified
  REGION 1..930: note = Cas Enzyme sequence
MRAMRQRVMEKTGEVLDENITPGQAMARTALSTMVPMRGPNGVLGKLHQTDNANEIRRICEQQGISAEECKELILAVFASESPRGSASKRVASDPLPGQGAHKRAPKCDPEFQRFRIISVVANLRIAESEKAARPLSPDERRRVVDFLLESTSEDLAWTDIAKLLGIRRQNLRGTATTTADGERASAQPPTDATNRIMSSCSIKTLRSWWKRADADRRSAMVRYLYEGAEDSECATFLGNLPEKEQGKLDSLHLPAGRAAYSPNSLARLNDQMLRTADDLHDARKHVFGVDDTWRPPAESIGAPVGNPSVDRTVKAVARFLNAVDDVWGTPDTIQIEHVRDGFMSERTAREIDRENNRRFKQNQDTVAEIQKIYGIQGDVHRSDVMRYTAVTQQDCACVYCGDTITYLSCQLDHIIPQAGIGSNNHRENLVAVCERCNRSKSNIPFAVWAEKCGIPGVSVEKAIARVRKWRNTQSGRAQAARLKKLQKDVIARLRRTDEDPAIDARSMESVSWMANELHHRVKAAYPSADVAVYRGSITAGARRAAGIDSRVNLLGERGRKDRLDRRHHAVDAAVIAMMTPGIAKTLGERSNLRWAERLSGGVETWKSFTGATPGARESFEAWRNRMLRLTELLNLALAEDQIHVTENLRLRLGSGKAHGEVQPLKLHQLGNGLTPAQIDRASSPALWCALTREPDFDIRKGLPASETRIIRVHGRRLTADDSASFFSKKSDDSKEKPFAAISVRGGFAEIGSTIHHARIYRINGRKPVYAMLRVFTQDLLPYRNSDLFSAPVPLQSISVRCAEPKLKTAISAGTATYLGWVVTGDELEVPMESFTTGTIGEFRKDFPTITRWRIRGFFSATRFRLRPSTLAPEGLSDANDSVKKILTIPGWLISINGICSVHPTVARRDSLGRIRSSSSVNLPVSWTIL

SEQ ID NO: 17349 - protein, 1129 aa, unidentified
  REGION 1..1129: note = Cas Enzyme sequence
MSVKAPPRDPRNYRVGIDVGTNSVGLAAIEFNELGRPVSVLSAISQIHDGGVLEAKTATTRLAASGVARRVRRLRRRRVKRLIALDQKLAEWGWEPLADNGDPYLPWRARARLATERIADESDRNAHLATALRHIARHRGWRNPYVRVSALYGVAAPSRFLAGEAATEKKDAVQGFKQRVESRVGRTFSDGVTVAELAVAALEYDSNVALRHGKRGGRGQRVERDFSYIGGKLLQSDNANEIHAYARVQGLAEETMRELIDLVFAAESPRGSWVGKVGTDPIDKAPRAPKASDAFQRFRIVTTLANVRLTESGSPRRLTRDELLKAYEYLINRKPGDQPTWGDIGEVVGKTRKTMAGAASANFDGEERLPSRPPVHQSDHTVRNLRKIGALRDFWVAADGAHRDALVGLLVDNAKDESSPAGVAAWEVLDGLAEEELAELDKLELPAGRAAYSLTSLTKLTDCILEKGCDLHDARKLVFGVGDDWVPPAEPIGAPIGSPSVDRVLKIVSRFLSAAEVEWGAPQRITIEHVRDAFMSESAVRERDRDNQRRFKAKLEQRESIGKSVRPEGRVRDSDVRRFEAVQRQNGQCLYCGDTITFDTAEMDHIVPRKGPGSTNTRNNLAAVCLPCNRSKSSTPFAVWAERSGRPGVSVTDAVARTKFWQRDNGASPKAWTAFLKEVRDRLERTEEDPEIDARSMESVAWMANELRDRIAEHFRGTNSSAGMKQVFVYKGALTADARRVAGVEGRIPWIGGGGKTRLDRRHHAVDAAVQTLLDESIARTLAERISLRQAEYLRRDGVTTWKTYSGSGQAAQARFAEWRSSMEDLAALLERAFVEDRVVVTENLRLRLGNGRVHEDTISPLERRLVGDAFTRAEIDAASTPQLWTALTRDPEFDETDGLPTNPTRRLRLKGTWLSAQDEIEFFDKPRAALAVRGGWAMLGDSIHHARIYRWEERGKTKYGMLRVFAADLLKHRNEDLFNVTPDPSWISMRVAHPSIGRGNLEDKEYVGWLVSGDELLLTMDDLLTGHVANASAALGWGSLQRWTVTGFFSSRQISMVPTLAAAEGLPRYLELFPATLEYEKSLAWVFNRWVTACDPLFSKGLPVVIRRDALGRPRLESRAGLPTCWRA

SEQ ID NO: 17350 - protein, 910 aa, unidentified
  REGION 1..910: note = Cas Enzyme sequence
VGGKPKKGLLGGKLMQSDNANELRKIGEVQGLDTETVNELIDHIFAAESPKGKASKRAKKDDLPGQDQYVRAPRAHLAFQRFRIVAAVANLRIRETGSKHGRLLSKEEKTKTIEFLMSADGTDGVTWSDVAKELRIERESLCGRAKCGAEGERPSSFPPVNSSNISITRSKIEPLAKWWKEASDDERSALIIALSNADELTDEQPGAETVRQFLSSLDEQVLEKINKISLPRGRAAYSVNSLERLTRRMLEDSVDLFDARKLEFGVENNWSPKPDPIGEPVGNPAVDRVLKIVNRWLLAVTRKWGPPNIVNIEHVRAGFTSEIQAREYERENKKNRNRNLAILEELRDKLGTSDKIRREDITRFAALRRQNCQCAYCGEAITFSDCEMDHIVPRKGQGSTNTRNNLVATCERCNKSKSNMPFSVWAQNCDIPGVSVEAVIGRVRTWIKDPELSPKQYNNFKRDVIERFRKTAEDDAIDNRSIESVAWMATELADRIGSHFREAGADTQVKVYRGWLTSEARKASGFEGKVNLIGGRGKTRLDRRHHAMDAATIALMRQSVAQTLVERASIRESERLRRVVSSSWKDYRGADRDKQFSYGSWLNSMKVLAELFNRAIDADEIPVTQNLRLRLGNSEAHDATIRKFGDSKKCVGAPWKIEEIDRASTPQLWLALTRQADFDKKDGLPKNPLREIRVKNQWFNAEENVALFPTKSAAIAIRGGYAEIGNTIHHARLYKLPGKKPTYGMIRVFAIDLLRTQHSDLFSSPLLPESISLRTAETKVRRAVEDGTAMYIGWLVDGDEIVIDPETKAFDSNNIGEYLSEFPGTKRWRVDGFPDKERLRLRPLQLAGEGLPEDASAGIKEILGPKGKGWRVAINTLFKSPQLVVVRRTALGTVRKLSRGHLPLTTRLRG

SEQ ID NO: 17351 - protein, 1020 aa, unidentified
  REGION 1..1020: note = Cas Enzyme sequence
MARHRGWRNPYRQVDSLISDNPYSKQYGELKEKAKAYNDDATAAEEESTPAQLVVAMLDAGYAEAPRLRWRTGSKKPDAEGYLPVRLMQEDNANELKQIFRVQRVPADEWKPLFRSVFYAVSPKGSAEQRVGQDPLAPEQARALKASLAFQEYRIANVITNLRIKDASAELRKLTVDEKQSIYDQLVSPSSEDITWSDLCDFLGFKRSQLKGVGSLTEDGEERISSRPPRLTSVQRIYESDNKIRKPLVAWWKSASDNEHEAMIRLLSNTVDIDKVREDVAYASAIEFIDGLDDDALTKLDSVDLPSGRAAYSVETLQKLTRQMLTTDDDLHEARKTLFNVTDSWRPPADPIGEPLGNPSVDRVLKNVNRYLMNCQQRWGNPVSVNIEHVRSSFSSVAFARKDKREYEKNNEKRSIFRSSLSEQLRADEQMEKVRESDLRRLEAIQRQNGQCLYCGRTITFRTCEMDHIVPRKGVGSTNTRTNFAAVCAECNRMKSNTPFAIWARSEDAQTRGVSLAEAKKRVTMFTFNPKSYAPREVKAFKQAVIARLQQTEDDAAIDNRSIESVAWMADELHRRIDWYFNAKQYVNSASIDDAEAETMKTTVSVFQGRVTASARRAAGIEGKIHFIGQQSKTRLDRRHHAVDASVIAMMNTAAAQTLMERESLRESQRLIGLMPGERSWKEYPYEGTSRYESFHLWLDNMDVLLELLNDALDNDRIAVMQSQRYVLGNSIAHDATIHPLEKVPLGSAMSADLIRRASTPALWCALTRLPDYDEKEGLPEDSHREIRVHDTRYSADDEMGFFASQAAQIAVQEGSADIGSAIHHARVYRCWKTNAKGVRKYFYGMIRVFQTDLLRACHDDLFTVPLPPQSISMRYGEPRVVQALQSGNAQYLGSLVVGDEIEMDFSSLDVDGQIGEYLQFFSQFSGGNLAWKHWVVDGFFNQTQLRIRPRYLAAEGLAKAFSDDVVPDGVQKIVTKQGWLPPVNTASKTAVRIVRRNAFGEPRLSSAHHMPCSWQWRHE

SEQ ID NO: 17352 - protein, 1162 aa, unidentified
  REGION 1..1162: note = Cas Enzyme sequence
MRGKRYRIGIDVGLNSVGLAAVEVSDENSPVRLLNAQSVIHDGGVDPQKNKEAITRKNMSGVARRTRRMRRRKRERLHKLDMLLGKFGYPVIEPESLDKPFEEWHVRAELATRYIEDDELRRESISIALRHMARHRGWRNPYRQVDSLISDNPYSKQYGELKEKAKAYNDDATAAEEESTPAQLVVAMLDAGYAEAPRLRWRTGSKKPDAEGYLPVRLMQEDNANELKQIFRVQRVPADEWKPLFRSVFYAVSPKGSAEQRVGQDPLAPEQARALKASLAFQEYRIANVITNLRIKDASAELRKLTVDEKQSIYDQLVSPSSEDITWSDLCDFLGFKRSQLKGVGSLTEDGEERISSRPPRLTSVQRIYESDNKIRKPLVAWWKSASDNEHEAMIRLLSNTVDIDKVREDVAYASAIEFIDGLDDDALTKLDSVDLPSGRAAYSVETLQKLTRQMLTTDDDLHEARKTLFNVTDSWRPPADPIGEPLGNPSVDRVLKNVNRYLMNCQQRWGNPVSVNIEHVRSSFSSVAFARKDKREYEKNNEKRSIFRSSLSEQLRADEQMEKVRESDLRRLEAIQRQNGQCLYCGRTITFRTCEMDHIVPRKGVGSTNTRTNFAAVCAECNRMKSNTPFAIWARSEDAQTRGVSLAEAKKRVTMFTFNPKSYAPREVKAFKQAVIARLQQTEDDAAIDNRSIESVALMVGGLHPPVPSRLHTPPRRIDWYFNAKQYVNSASIDDAEAETMKTTVSVFQGRVTASARRAAGIEGKIHFIGQQSKTRLDRRHHAVDASVIAMMNTAAAQTLMERESLRESQRLIGLMPGERSWKEYPYEGTSRYESFHLWLDNMDVLLELLNDALDNDRIAVMQSQRYVLGNSIAHDATIHPLEKVPLGSAMSADLIRRASTPALWCALTRLPDYDEKEGLPEDSHREIRVHDTRYSADDEMGFFASQAAQIAVQEGSADIGSAIHHARVYRCWKTNAKGVRKYFYGMIRVFQTDLLRACHDDLFTVPLPPQSISMRYGEPRVVQALQSGNAQYLGSLVVGDEIEMDFSSLDVDGQIGEYLQFFSQFSGGNLAWKHWVVDGFFNQTQLRIRPRYLAAEGLAKAFSDDVVPDGVQKIVTKQGWLPPVNTASKTAVRIVRRNAFGEPRLSSAHHMPCSWQWRHE

SEQ ID NO: 17353 - protein, 1151 aa, unidentified; identical to SEQ ID NO: 16795
  REGION 1..1151: note = Cas Enzyme sequence

SEQ ID NO: 17354 - protein, 1151 aa, unidentified
  REGION 1..1151: note = Cas Enzyme sequence
MRGKRYRIGIDVGLNSVGLAAVEVSDENSPVRLLNAQSVIHDGGVDPQKNKEAITRKNMSGVARRTRRMRRRKRERFHKLDMLLGKFGYPVIEPESLDKPFEEWHVRAELATRYIEDDELRRESISIALRHMARHRGWRNPYRQVDSLISDNPYSKQYGELKEKAKAYNDDATAAEEESTPAQLVVAMLDAGYAEAPRLRWRTGSKKPDAEGYLPVRLMQEDNANELKQIFRVQRVPADEWKPLFRSVFYAVSPKGSAEQRVGQDPLAPEQARALKASLAFQEYRIANVITNLRIKDASAELRKLTVDEKQSIYDQLVSPSSEDITWSDLCDFLGFKRSQLKGVGSLTEDGEERISSRPPRLTSVQRIYESDNKIRKPLVAWWKSASDNEHEAMIRLLSNTVDIDKVREDVAYASAIEFIDGLDDDALTKLDSVDLPSGRAAYSVETLQKLTRQMLTTDDDLHEARKTLFNVTDSWRPPADPIGEPLGNPSVDRVLKNVNRYLMNCQQRWGNPVSVNIEHVRSSFSSVAFARKDKREYEKNNEKRSIFRSSLSEQLRADEQMEKVRESDLRRLEAIQRQNGQCLYCGRTITFRTCEMDHIVPRKGVGSTNTRTNFAAVCAECNRMKSNTPFAIWARSEDAQTRGVSLAEAKKRVTMFTFNPKSYAPREVKAFKQAVIARLQQTEDDAAIDNRSIESVAWMADELHRRIDWYFNAKQYVNSASIDDAEAETMKTTVSVFQGRVTASARRAAGIEGKIHFIGQQSKTRLDRRHHAVDASVIAMMNTAAAQTLMERESLRESQRLIGLMPGERSWKEYPYEGTSRYESFHLWLDNMDVLLELLNDALDNDRIAVMQSQRYVLGNSIAHDATIHPLEKVPLGSAMSADLIRRASTPALWCALTRLPDYDEKEGLPEDSHREIRVHDTRYSADDEMGFFASQAAQIAVQEGSADIGSAIHHARVYRCWKTNAKGVRKYFYGMIRVFQTDLLRACHDDLFTVPLPPQSISMRYGEPRVVQALQSGNAQYLGSLVVGDEIEMDFSSLDVDGQIGEYLQFFSQFSGGNLAWKHWVVDGFFNQTQLRIRPRYLAAEGLAKAFSDDVVPDGVQKIVTKQGWLPPVNTASKTAVRIVRRNAFGEPRLSSAHHMPCSWQWRHE

SEQ ID NO: 17355 - protein, 964 aa, unidentified
  REGION 1..964: note = Cas Enzyme sequence
MLDAGYAEAPRLRWRTGSKKPDAEGYLPVRLMQEDNANELKQIFRVQRVPADEWKPLFRSVFYAVSPKGSAEQRVGQDPLAPEQARALKASLAFQEYRIANVITNLRIKDASAELRKLTVDEKQSIYDQLVSPSSEDITWSDLCDFLGFKRSQLKGVGSLTEDGEERISSRPPRLTSVQRIYESDNKIRKPLVAWWKSASDNEHEAMIRLLSNTVDIDKVREDVAYASAIEFIDGLDDDALTKLDSVDLPSGRAAYSVETLQKLTRQMLTTDDDLHEARKTLFNVTDSWRPPADPIGEPLGNPSVDRVLKNVNRYLMNCQQRWGNPVSVNIEHVRSSFSSVAFARKDKREYEKNNEKRSIFRSSLSEQLRADEQMEKVRESDLRRLEAIQRQNGQCLYCGRTITFRTCEMDHIVPRKGVGSTNTRTNFAAVCAECNRMKSNTPFAIWARSEDAQTRGVSLAEAKKRVTMFTFNPKSYAPREVKAFKQAVIARLQQTEDDAAIDNRSIESVAWMADELHRRIDWYFNAKQYVNSASIDDAEAETMKTTVSVFQGRVTASARRAAGIEGKIHFIGQQSKTRLDRRHHAVDASVIAMMNTAAAQTLMERESLRESQRLIGLMPGERSWKEYPYEGTSRYESFHLWLDNMDVLLELLNDALDNDRIAVMQSQRYVLGNSIAHDATIHPLEKVPLGSAMSADLIRRASTPALWCALTRLPDYDEKEGLPEDSHREIRVHDTRYSADDEMGFFASQAAQIAVQEGSADIGSAIHHARVYRCWKTNAKGVRKYFYGMIRVFQTDLLRACHDDLFTVPLPPQSISMRYGEPRVVQALQSGNAQYLGSLVVGDEIEMDFSSLDVDGQIGEYLQFFSQFSGGNLAWKHWVVDGFFNQTQLRIRPRYLAAEGLAKAFSDDVVPDGVQKIVTKQGWLPPVNTASKTAVRIVRRNAFGEPRLSSAHHMPCSWQWRHE

SEQ ID NO: 17356 - protein, 1147 aa, unidentified
  REGION 1..1147: note = Cas Enzyme sequence
MRGKRYRIGIDVGLNSVGLAAVEVSDENSPVRLLNAQSVIHDGGVDPQKNKEAITRKNMSGVARRTRRMRRRKRERLHKLDMLLGKFGYPVIEPESLDKPFEEWHVRAELATRYIEDDELRRESISIALRHMARHRGWRNPYRQVDSLISDNPYSKQYGELKEKAKAYNDDATAAEEESTPAQLVVAMLDAGYAEAPRLRWRTGSKKPDAEGYLPVRLMQEDNANELKQIFRVQRVPADEWKPLFRSVFYAVSPKGSAEQRVGQDPLAPEQARALKASLAFQEYRIANVITNLRIKDASAELRKLTVDEKQSIYDQLVSPSSEDITWSDLCDFLGFKRSQLKGVGSLTEDGEERISSRPPRLTSVQRIYESDNKIRKPLVAWWKSASDNEHEAMIRLLSNTVDIDKVREDVAYASAIEFIDGLDDDALTKLDSVDLPSGRAAYSVETLQKLTRQMLTTDDDLHEARKTLFNVTDSWRPPADPIGEPLGNPSVDRVLKNVNRYLMNCQQRWGNPVSVNIEHVRSSFSSVAFARKDKREYEKNNEKRSIFRSSLSEQLRADEQMEKVRESDLRRLEAIQRQNGQCLYCGRTITFRTCEMDHIVPRKGVGSTNTRTNFAAVCAECNRMKSNTPFAIWARSEDAQTRGVSLAEAKKRVTMFTFNPKSYAPREVKAFKQAVIARLQQTEDDAAIDNRSIESVAWMADELHRRIDWYFNAKQYVNSASIDDAEAETMKTTVSVFQGRVTASARRAAGIEGKIHFIGQQSKTRLDRRHHAVDASVIAMMNTAAAQTLMERESLRESQRLIGLMPGERSWKEYPYEGTSRYESFHLWLDNMDVLLELLNDALDNDRIAVMQSQRYVLGNSIAHDATIHPLEKVPLGSAMSADLIRRASTPALWCALTRLPDYDEKEGLPEDSHREIRVHDTRYSADDEMGFFASQAAQEGSADIGSAIHHARVYRCWKTNAKGVRKYFYGMIRVFQTDLLRACHDDLFTVPLPPQSISMRYGEPRVVQALQSGNAQYLGSLVVGDEIEMDFSSLDVDGQIGEYLQFFSQFSGGNLAWKHWVVDGFFNQTQLRIRPRYLAAEGLAKAFSDDVVPDGVQKIVTKQGWLPPVNTASKTAVRIVRRNAFGEPRLSSAHHMPCSWQWRHE

SEQ ID NO: 17357 - protein, 1184 aa, unidentified
  REGION 1..1184: note = Cas Enzyme sequence
APTRPGHGYKHHKSSYRPVQDNDVHCSYGERCFMRGKRYRIGIDVGLNSVGLAAVEVSDENSPVRLLNAQSVIHDGGVDPQKNKEAITRKNMSGVARRTRRMRRRKRERLHKLDMLLGKFGYPVIEPESLDKPFEEWHVRAELATRYIEDDELRRESISIALRHMARHRGWRNPYRQVDSLISDNPYSKQYGELKEKAKAYNDDATAAEEESTPAQLVVAMLDAGYAEAPRLRWRTGSKKPDAEGYLPVRLMQEDNANELKQIFRVQRVPADEWKPLFRSVFYAVSPKGSAEQRVGQDPLAPEQARALKASLAFQEYRIANVITNLRIKDASAELRKLTVDEKQSIYDQLVSPSSEDITWSDLCDFLGFKRSQLKGVGSLTEDGEERISSRPPRLTSVQRIYESDNKIRKPLVAWWKSASDNEHEAMIRLLSNTVDIDKVREDVAYASAIEFIDGLDDDALTKLDSVDLPSGRAAYSVETLQKLTRQMLTTDDDLHEARKTLFNVTDSWRPPADPIGEPLGNPSVDRVLKNVNRYLMNCQQRWGNPVSVNIEHVRSSFSSVAFARKDKREYEKNNEKRSIFRSSLSEQLRADEQMEKVRESDLRRLEAIQRQNGQCLYCGRTITFRTCEMDHIVPRKGVGSTNTRTNFAAVCAECNRMKSNTPFAIWARSEDAQTRGVSLAEAKKRVTMFTFNPKSYAPREVKAFKQAVIARLQQTEDDAAIDNRSIESVAWMADELHRRIDWYFNAKQYVNSASIDDAEAETMKTTVSVFQGRVTASARRAAGIEGKIHFIGQQSKTRLDRRHHAVDASVIAMMNTAAAQTLMERESLRESQRLIGLMPGERSWKEYPYEGTSRYESFHLWLDNMDVLLELLNDALDNDRIAVMQSQRYVLGNSIAHDATIHPLEKVPLGSAMSADLIRRASTPALWCALTRLPDYDEKEGLPEDSHREIRVHDTRYSADDEMGFFASQAAQIAVQEGSADIGSAIHHARVYRCWKTNAKGVRKYFYGMIRVFQTDLLRACHDDLFTVPLPPQSISMRYGEPRVVQALQSGNAQYLGSLVVGDEIEMDFSSLDVDGQIGEYLQFFSQFSGGNLAWKHWVVDGFFNQTQLRIRPRYLAAEGLAKAFSDDVVPDGVQKIVTKQGWLPPVNTASKTAVRIVRRNAFGEPRLSSAHHMPCSWQWRHE

SEQ ID NO: 17358 - protein, 1010 aa, unidentified
  REGION 1..1010: note = Cas Enzyme sequence
MLSRQLLGASHLARPVSYSYNVQDNDVHCSYGERCFMRGKRYRIGIDVGLNSVGLAAVEVSDENSPVRLLNAQSVIHDGGVDPQKNKEAITRKNMSGVARRTRRMRRRKRERLHKLDMLLGKFGYPVIEPESLDKPFEEWHVRAELATRYIEDDELRRESISIALRHMARHRGWRNPYRQVDSLISDNPYSKQYGELKEKAKAYNDDATAAEEESTPAQLVVAMLDAGYAEAPRLRWRTGSKKPDAEGYLPVRLMQEDNANELKQIFRVQRVPADEWKPLFRSVFYAVSPKGSAEQRVGQDPLAPEQARALKASLAFQEYRIANVITNLRIKDASAELRKLTVDEKQSIYDQLVSPSSEDITWSDLCDFLGFKRSQLKGVGSLTEDGEERISSRPPRLTSVQRIYESDNKIRKPLVAWWKSASDNEHEAMIRLLSNTVDIDKVREDVAYASAIEFIDGLDDDALTKLDSVDLPSGRAAYSVETLQKLTRQMLTTDDDLHEARKTLFNVTDSWRPPADPIGEPLGNPSVDRVLKNVNRYLMNCQQRWGNPVSVNIEHVRSSFSSVAFARKDKREYEKNNEKRSIFRSSLSEQLRADEQMEKVRESDLRRLEAIQRQNGQCLYCGRTITFRTCEMDHIVPRKGVGSTNTRTNFAAVCAECNRMKSNTPFAIWARSEDAQTRGVSLAEAKKRVTMFTFNPKSYAPREVKAFKQAVIARLQQTEDDAAIDNRSIESVAWMADELHRRIDWYFNAKQYVNSASIDDAEAETMKTTVSVFQGRVTASARRAAGIEGKIHFIGQQSKTRLDRRHHAVDASVIAMMNTAAAQTLMERESLRESQRLIGLMPGERSWKEYPYEGTSRYESFHLWLDNMDVLLELLNDALDNDRIAVMQSQRYVLGNSIAHDATIHPLEKVPLGSAMSADLIRRASTPALWCALTRLPDYDEKEGLPEDSHREIRVHDTRYSADDEMGFFASQAAQIAVQEGSADIGSAIHHARVYRCWKTNAKGVRKYF

SEQ ID NO: 17359 - protein, 1018 aa, unidentified
  REGION 1..1018: note = Cas Enzyme sequence
MLSRQLLGASHLARPVSYSYNVQDNDVHCSYGERCFMRGKRYRIGIDVGLNSVGLAAVEVSDENSPVRLLNAQSVIHDGGVDPQKNKEAITRKNMSGVARRTRRMRRRKRERLHKLDMLLGKFGYPVIEPESLDKPFEEWHVRAELATRYIEDDELRRESISIALRHMARHRGWRNPYRQVDSLISDNPYSKQYGELKEKAKAYNDDATAAEEESTPAQLVVAMLDAGYAEAPRLRWRTGSKKPDAEGYLPVRLMQEDNANELKQIFRVQRVPADEWKPLFRSVFYAVSPKGSAEQRVGQDPLAPEQARALKASLAFQEYRIANVITNLRIKDASAELRKLTVDEKQSIYDQLVSPSSEDITWSDLCDFLGFKRSQLKGVGSLTEDGEERISSRPPRLTSVQRIYESDNKIRKPLVAWWKSASDNEHEAMIRLLSNTVDIDKVREDVAYASAIEFIDGLDDDALTKLDSVDLPSGRAAYSVETLQKLTRQMLTTDDDLHEARKTLFNVTDSWRPPADPIGEPLGNPSVDRVLKNVNRYLMNCQQRWGNPVSVNIEHVRSSFSSVAFARKDKREYEKNNEKRSIFRSSLSEQLRADEQMEKVRESDLRRLEAIQRQNGQCLYCGRTITFRTCEMDHIVPRKGVGSTNTRTNFAAVCAECNRMKSNTPFAIWARSEDAQTRGVSLAEAKKRVTMFTFNPKSYAPREVKAFKQAVIARLQQTEDDAAIDNRSIESVAWMADELHRRIDWYFNAKQYVNSASIDDAEAETMKTTVSVFQGRVTASARRAAGIEGKIHFIGQQSKTRLDRRHHAVDASVIAMMNTAAAQTLMERESLRESQRLIGLMPGERSWKEYPYEGTSRYESFHLWLDNMDVLLELLNDALDNDRIAVMQSQRYVLGNSIAHDATIHPLEKVPLGSAMSADLIRRASTPALWCALTRLPDYDEKEGLPEDSHREIRVHDTRYSADDEMGFFASQAAQIAVQEGSADIGSAIHHARVYRCWKTNAKGVRKYFGSVRPRLT

SEQ ID NO: 17360 - protein, 1010 aa, unidentified
  REGION 1..1010: note = Cas Enzyme sequence
MRGKRYRIGIDVGLNSVGLAAVEVSDENSPVRLLNAQSVIHDGGVDPQKNKEAITRKNMSGVARRTRRMRRRKRERLHKLDMLLGKFGYPVIEPESLDKPFEEWHVRAELATRYIEDDELRRESISIALRHMARHRGWRNPYRQVDSLISDNPYSKQYGELKEKAKAYNDDATAAEEESTPAQLVVAMLDAGYAEAPRLRWRTGSKKPDAEGYLPVRLMQEDNANELKQIFRVQRVPADEWKPLFRSVFYAVSPKGSAEQRVGQDPLAPEQARALKASLAFQEYRIANVITNLRIKDASAELRKLTVDEKQSIYDQLVSPSSEDITWSDLCDFLGFKRSQLKGVGSLTEDGEERISSRPPRLTSVQRIYESDNKIRKPLVAWWKSASDNEHEAMIRLLSNTVDIDKVREDVAYASAIEFIDGLDDDALTKLDSVDLPSGRAAYSVETLQKLTRQMLTTDDDLHEARKTLFNVTDSWRPPADPIGEPLGNPSVDRVLKNVNRYLMNCQQRWGNPVSVNIEHVRSSFSSVAFARKDKREYEKNNEKRSIFRSSLSEQLRADEQMEKVRESDLRRLEAIQRQNGQCLYCGRTITFRTCEMDHIVPRKGVGSTNTRTNFAAVCAECNRMKSNTPFAIWARSEDAQTRGVSLAEAKKRVTMFTFNPKSYAPREVKAFKQAVIARLQQTEDDAAIDNRSIESVAWMADELHRRIDWYFNAKQYVNSASIDDAEAETMKTTVSVFQGRVTASARRAAGIEGKIHFIGQQSKTRLDRRHHAVDASVIAMMNTAAAQTLMERESLRESQRLIGLMPGERSWKEYPYEGTSRYESFHLWLDNMDVLLELLNDALDNDRIAVMQSQRYVLGNSIAHDATIHPLEKVPLGSAMSADLIRRASTPALWCALTRLPDYDEKEGLPEDSHREIRVHDTRYSADDEMGFFASQAAQIAVQEGSADIGSAIHHARVYRCWKTNAKGVRKYFYGMIRVFQTDLLRACHDDLFTVPLPPAVYFDAVWRA

SEQ ID NO: 17361 - protein, 1160 aa, unidentified
  REGION 1..1160: note = Cas Enzyme sequence
MMCIVATVKGVLCGGKRYRIGIDVGLNSVGLAAVEVSDENSPVRLLNAQSVIHDGGVDPQKNKEAITRKNMSGVARRTRRRKRERLHKLDMLLGKFGYPVIEPESLDKPFEEWHVRAELATRYIEDDELRRESISIALRHMARHRGWRNPYRQVDSLISDNPYSKQYGELKEKAKAYNDDATAAEEESTPAQLVVAMLDAGYAEAPRLRWRTGSKKPDAEGYLPVRLMQEDNANELKQIFRVQRVPADEWKPLFRSVFYAVSPKGSAEQRVGQDPLAPEQARALKASLAFQEYRIANVITNLRIKDASAELRKLTVDEKQSIYDQLVSPSSEDITWSDLCDFLGFKRSQLKGVGSLTEDGEERISSRPPRLTSVQRIYESDNKIRKPLVAWWKSASDNEHEAMIRLLSNTVDIDKVREDVAYASAIEFIDGLDDDALTKLDSVDLPSGRAAYSVETLQKLTRQMLTTDDDLHEARKTLFNVTDSWRPPADPIGEPLGNPSVDRVLKNVNRYLMNCQQRWGNPVSVNIEHVRSSFSSVAFARKDKREYEKNNEKRSIFRSSLSEQLRADEQMEKVRESDLRRLEAIQRQNGQCLYCGRTITFRTCEMDHIVPRKGVGSTNTRTNFAAVCAECNRMKSNTPFAIWARSEDAQTRGVSLAEAKKRVTMFTFNPKSYAPREVKAFKQAVIARLQQTEDDAAIDNRSIESVAWMADELHRRIDWYFNAKQYVNSASIDDAEAETMKTTVSVFQGRVTASARRAAGIEGKIHFIGQQSKTRLDRRHHAVDASVIAMMNTAAAQTLMERESLRESQRLIGLMPGERSWKEYPYEGTSRYESFHLWLDNMDVLLELLNDALDNDRIAVMQSQRYVLGNSIAHDATIHPLEKVPLGSAMSADLIRRASTPALWCALTRLPDYDEKEGLPEDSHREIRVHDTRYSADDEMGFFASQAAQIAVQEGSADIGSAIHHARVYRCWKTNAKGVRKYFYGMIRVFQTDLLRACHDDLFTVPLPPQSISMRYGEPRVVQALQSGNAQYLGSLVVGDEIEMDFSSLDVDGQIGEYLQFFSQFSGGNLAWKHWVVDGFFNQTQLRIRPRYLAAEGLAKAFSDDVVPDGVQKIVTKQGWLPPVNTASKTAVRIVRRNAFGEPRLSSAHHMPCSWQWRHE

SEQ ID NO: 17362 - protein, 1151 aa, unidentified
  REGION 1..1151: note = Cas Enzyme sequence
MRGKRYRIGIDVGLNSVGLAAVEVSDENSPVRLLNAQSVIHDGGVDPQKNKEAITRKNMSGVARRTRRMRRRKRERLHKLDMLLGKFGYPVIEPESLDKPFEEWHVRAELATRYIEDDELRRESISIALRHMARHRGWRNPYRQVDSLISDNPYSKQYGELKEKAKAYNDDATAAEEESTPAQLVVAMLDAGYAEAPRLRWRTGSKKPDAEGYLPVRLMQEDNANELKQIFRVQRVPADEWKPLFRSVFYAVSPKGSAEQRVGQDPLAPEQARALKASLAFQEYRIANVITNLRIKDASAELRKLTVDEKQSIYDQLVSPSSEDITWSDLCDFLGFKRSQLKGVGSLTEDGEERISSRPPRLTSVQRIYESDNKIRKPLVAWWKSASDNEHEAMIRLLSNTVDIDKVREDVAYASAIEFIDGLDDDALTKLDSVDLPSGRAAYSVETLQKLTRQMLTTDDDLHEARKTLFNVTDSWRPPADPIGEPLGNPSVDRVLKNVNRYLMNCQQRWGNPVSVNIEHVRSSFSSVAFARKDKREYEKNNEKRSIFRSSLSEQLRADEQMEKVRESDLRRLEAIQRQNGQCLYCGRTITFRTCEMDHIVPRKGVGSTNTRTNFAAVCAECNRMKSNTPFAIWARSEDAQTRGVSLAEAKKRVTMFTFNPKSYAPREVKAFKQAVIARLQQTEDDAAIDNRSIESVAWMADELHRRIDWYFNAKQYVNSASIDDAEAETMKTTVSVFQGRVTASARRAAGIEGKIHFIGQQSKTRLDRRHHAVDASVIAMMNTAAAQTLMERESLRESQRLIGLMPGERSWKEYPYEGTSRYESFHLWLDNMDVLLELLNDALDNDRIAVMQSQRYVLGNSIAHDATIHPLEKVPLGSAMSADLIRRASTPALWCALTRLPDYDEKEGLPEDSHREIRVHDTRYSADDEMGFFASQAAQIAVQEGSADIGSAIHHARVCRCWKTNAKGVRKYFYGMIRVFQTDLLRACHDDLFTVPLPPQSISMRYGEPRVVQALQSGNAQYLGSLVVGDEIEMDFSSLDVDGQIGEYLQFFSQFSGGNLAWKHWVVDGFFNQTQLRIRPRYLAAEGLAKAFSDDVVPDGVQKIVTKQGWLPPVNTASKTAVRIVRRNAFGEPRLSSAHHMPCSWQWRHE

SEQ ID NO: 17363 - protein, 1151 aa, unidentified
  REGION 1..1151: note = Cas Enzyme sequence
MRGKRYRIGIDVGLNSVGLAAVEVSDENSPVRLLNAQSVIHDGGVDPQKNKEAITRKNMSGVARRTRRMRRRKRERLHKLDMLLGKFGYPVIEPESLDKPFEEWHVRAELATRYIEDDELRRESISIALRHMARHRGWRNPYRQVDSLISDNPYSKQYGELKEKAKAYNDDATAAEEESTPAQLVVAMLDAGYAEAPRLRWRTGSKKPDAEGYLPVRLMQEDNANELKQIFRVQRVPADEWKPLFRSVFYAVSPKGSAEQRVGQDPLAPEQARALKASLAFQEYRIANVITNLRIKDASAELRKLTVDEKQSIYDQLVSPSSEDITWSDLCDFLGFKRSQLKGVDSLTEDGEERISSRPPRLTSVQRIYESDNKIRKPLVAWWKSASDNEHEAMIRLLSNTVDIDKVREDVAYASAIEFIDGLDDDALTKLDSVDLPSGRAAYSVETLQKLTRQMLTTDDDLHEARKTLFNVTDSWRPPADPIGEPLGNPSVDRVLKNVNRYLMNCQQRWGNPVSVNIEHVRSSFSSVAFARKDKREYEKNNEKRSIFRSSLSEQLRADEQMEKVRESDLRRLEAIQRQNGQCLYCGRTITFRTCEMDHIVPRKGVGSTNTRTNFAAVCAECNRMKSNTPFAIWARSEDAQTRGVSLAEAKKRVTMFTFNPKSYAPREVKAFKQAVIARLQQTEDDAAIDNRSIESVAWMADELHRRIDWYFNAKQYVNSASIDDAEAETMKTTVSVFQGRVTASARRAAGIEGKIHFIGQQSKTRLDRRHHAVDASVIAMMNTAAAQTLMERESLRESQRLIGLMPGERSWKEYPYEGTSRYESFHLWLDNMDVLLELLNDALDNDRIAVMQSQRYVLGNSIAHDATIHPLEKVPLGSAMSADLIRRASTPALWCALTRLPDYDEKEGLPEDSHREIRVHDTRYSADDEMGFFASQAAQIAVQEGSADIGSAIHHARVYRCWKTNAKGVRKYFYGMIRVFQTDLLRACHDDLFTVPLPPQSISMLYGEPRVVQALQSGNAQYLGSLVVGDEIEMDFSSLDVDGQIGEYLQFFSQFSGGNLAWKHWVVDGFFNQTQLRIRPRYLAAEGLAKAFSDDVVPDGVQKIVTKQGWLPPVNTASKTAVRIVRRNAFGEPRLSSAHHMPCSWQWRHE

SEQ ID NO: 17364 - protein, 921 aa, unidentified
  REGION 1..921: note = Cas Enzyme sequence
MESPYQLRRRGISERLEPYEFGRALYHLAQRRGFLSNRRSAPKDEDEAGKVRQGILDLEREMASVGARTIGEYFASIEGGGTRIRDRYTGRHMYEQEFDALWNTQAGFAPDVLLPDLREKIREIIFYQRPLKSQKRFVGKCELEPKYRRASWEHLSAQRFRYLQTVNNLAVIDKSTGEVRALSSEEREAIIERLEATAEATYSSFRGRGGIPSLRGTVFNLERGGEKRIKGNRTAAQLAGVFGLERWRDLTEADREAVVEDVRSIVNDGALARRGQRKWGLAPEQAKRLTEIRLEPGHCAFSRQALDKLLPHLRQGAKLYDAIEAVPEYRERMNRLTEAVDELPSVLSALGDIRNPLVIRSLTELRRVVNAVVQRYGKPDFVRVELARDLRQTAKVRLELSKKMRQNEQARMRAAERIRKETGIQNPSRDDILKILLAEECSWRCPYTAEPFGIHDLLGRSPQFDIEHIIPFSRCLDDSFMNKTLCHADENRKVKHSRTPWEAYGRTERWEEIMGRVREFKGPGRWAKVRRFEMREAEHNAFINEFCSRQLNDTRYASKLAMRYLSMLYGGGRTQGVDAEGKRRIQASAGMITALVRHAHGLNGLLSRDDLKSRDDHRHHAVDAVAVALSDTRTVMRLTAAARRAEAYDKLFKDVEEPWPGFIGDIKAVIDRVIPSRRLSRRVRGALHQDTFYGARTVDGRAVVHIRKPLAALHKGDIDDIVDPVVRAAVRRRVEEAGGDVKKAFAADVEKPYLSGGGGIRIPIRRVRLAKNLVTFPVGSAHRRRHVTSDANHHITLFEVCAEGGGAVRWEGKVVSLFEATQRLRRGEPVVRRDDCNGGRFLFSLSCGDVIELDREGTGRALYVVRTVPQSKQIRFVPIHDARRLKEIPKSGMTAVPDSLRRRNCRKVVVTPLGEVRRAAD

SEQ ID NO: 17365 - protein, 921 aa, unidentified; identical to SEQ ID NO: 17364
  REGION 1..921: note = Cas Enzyme sequence

SEQ ID NO: 17366 - protein, 1039 aa, unidentified
  REGION 1..1039: note = Cas Enzyme sequence
MNKPINYKVGLDFGTSSLGWSAIQLDEKNNSPVSLLNVGVRIFNPGMKDLDTSNPTTSAQERRTARQSRRQTDRRARRKRKVFYFLKKKDMISTDETQATFTERVDRQTVAKYFEKGVSEDYFHHVVPYFLRAKALDKSLTIDELARVFYHFSQRRGFLSSRKDLKKNDELGKVKGAISELSKEMEDMGSRTLGEHFYKTNPMEKRIRTHYTSRQMYLNEFELIFKAQQAFHPVLLTDEFQNELFKALFFQRRLKSARHLVGTCELESKPGQKYNPKGCPKWHLEAQRFRIYQSVNNLKIIHSETGPRNLSENERQTILDHLEWNKELTFAGLKKMLKLEKGIKINLEEGGEKRILGNKTNHEMNEVFGDRWLSMSDEQKGYAIHDAVSIQKFDQLKKCGLNKWALNEDQAVQFSQVNLEDGYLRISLRAIRKLLPYMIQGQTYPEAVKAVYGEFHVRVPVTDYLPMIDNSFMELTNPVVKKCLVEARKAVNALIKEYGKPAEIHIELARDIKSSKAQRENAIKKNRDNEKERDKAAKYLQEQGILTPTRNDITKYQLAEECHWQDPYTGKIINHNSLFGENPEFDIEHIIPLSRSLDDSYANKTLCHVYENRHRKGNKTPYEAYSGSPETYEIVKMRVKKFSGKLADEKYRRFLLSDISEFEDFPDRLLNDTRYASRLAQLFLSSLYGGTSDSDGKKRIFCNSGSITAYLRQYFKINNVLGGNSKNRLDHRHHAVDAIVIALTTDGSIKMLSNYAKTNWVYGRPSIKQNKEPWPGFLDEVRASVLRLNVIHRKGNKVRGALHKETIYGKTGNDATVSERIPLEKLPDNDVPLIKDKLIREQVEKKMLETGKKIKDLFAKTEENEPNYPVIRSKDGDEVKVRAVHIEYKQKTLRIGKAGFERKVANKSNHHMEIVAVLDATGKETKWEGFVVTMLEAYRRKREKEPIIRRDFGPGRKFKFSLAEGALIEIMDNNEKKLFVVRTVPKSLQIMYVPINSAGQQKDLKATGNWLSKTPNTLFQAGGRKVILTNLGEVRYAND

SEQ ID NO: 17367 - protein, 1095 aa, unidentified
  REGION 1..1095: note = Cas Enzyme sequence
MSAHHLRVGIDVGTHSVGLATLRVDDHGTPIELLSALSHIHDSGVGKEGKKDHDTRKKLSGIARRARRLLHHRRTQLQQLDEVLRDLGFPIPTPGEFLDLNEQTDPYRVWRVRARLVEEKLPEELRGPAISMAVRHIARHRGWRNPYSKVESLLSPAEESPFMKALRERILATTGEVLDDGITPGQAMAQVALTHNISMRGPEGILGKLHQSDNANEIRKICARQGVSPDVCKQLLRAVFKAGSPRAPAVSRVAPDPLPGQGSFRRAPKCDPEFQRFRIISIVANLRISETKGENRPLTADERRHVVTFLTEDSQADLTWVDVAEKLGVHRRDLRGTAVHTDDGERSAARPPIDATDRIMRQTKISSLKTWWEEADSEQRGAMIRYLYEDPTDSECAEIIAELPEEDQAKLDSLHLPAGRAAYSRESLTALSDHMLATTDDLHEARKRLFGVDDSWAPPAEAINAPVGNPSVDRTLKIVGRYLSAVESMWGTPEVIHVEHVRDGFTSERMADERDKANRRRYNDNQEAMKKIQRDYGKEGYISRGDIVRLDALELQGCACLYCGTTIGYHTCQLDHIVPQAGPGSNNRRGNLVAVCERCNRSKSNTPFAVWAQKCGIPHVGVKEAIGRVRGWRKQTPNTSSEDLTRLKKEVIARLRRTQEDPEIDERSMESVAWMANELHHRIAAAYPETTVMVYRGSITAAARKAAGIDSRINLIGEKGRKDRIDRRHHAVDASVVALMEASVAKTLAERSSLRGEQRLTGKEQTWKQYTGSTVGAREHFEMWRGHMLHLTELFNERLAEDKVYVTQNIRLRLSDGNAHTVNPSKLVSHRLGDGLTVQQIDRACTPALWCALTREKDFDEKNGLPAREDRAIRVHGHEIKSSDYIQVFSKRKKTDSDRDETPFGAIAVRGGFVEIGPSIHHARIYRVEGKKPVYAMLRVFTHDLLSQRHGDLFSAVIPPQSISMRCAEPKLRKAITTGNATYLGWVVVGDELEINVDSFTKYAIGRFLEDFPNTTRWRICGYDTNSKLTLKPIVLAAEGLENPSSTVNEIVELKGWRVAINVLTKVHPTVVRRDALGRPRYSSRSNLPTSWTIE

SEQ ID NO: 17368 - protein, 979 aa, unidentified
  REGION 1..979: note = Cas Enzyme sequence
TYQLPGVPEELRGPAISMAVRHIARHRGWRNPYSKVESLLSPAEESPFMKALRKRIMTKTGEVLDDDITPGQAMAQVALTHKIYMRGPEGILGKLHQSDNANEIRKICARQGISSDVCKQLLRAVFEAESPRGSAVSRVAPDPLPGQGSFRRAPKCDPEFQRFRIISIVANLRISETKGENRPLTVDERREVVAFLMEDSQADLTWVDVAEKLGVHRRDLRGTAVLTDDGERSAARPPFDATDRIMRQTKIRSLKTWWEKANSEQRGAMIRYLYEDLTDPECAEVIAELPEEDQAKLDSLHLPAGRAAYSQESLTALSDHMLTTTDDLHEARKRLFGVDDSWTPPAEAINAPVGNPSVDRTLKIVGRYLAAVESMWGTPDLIHVEHVRDGFTSERMAEERDKADRRRYDDNQKAIQKIRQDYGKEGYISRGDIVRHDALELQGSACLYCGTTIDRHTCQLDHIVPQAGPGSNNRRGNLVAVCERCNRSKSNTPFAVWAQTCGIPDVGVKEAIGRVRGWRKQTPNTSSEDLTRLKKEVIARLRRTQEDPEIDERSMESVAWMANELHHRIAAAYPETTVMVYRGSITAAARKAAGIDSRINLIGEKGRKDRLDRRHHAVDASVVALMEPSVAKTLAERSSLRGEQRLTGKEQTWKQYTGSTVGAREHFEMWRGHMLHLTELFNERLAEDKVYVTQNIRLRLSDGNAHTVNPSKLVSHRLGDGLTVQQIDRACTPALWCALTREKDFDGKNGLPAREDRLIRVHGQELTSNDHIKLFSKKRGNDTKEKPFGAITVRGGFVEIGPSIHHARIYRIEGKKPVYAMLRVFTHDLLSQRHGDLFSAVIPPQSISMRCAEPKLRKAITTGNATYLGWVVVGDELEINVDSFTSGQIASFLEEYPRTTRWRIRGFFNETQIRLRPAYLASEGLIEPSEAVRKTLSIPGWLPTINKVAETHPRVIRRDALGRVRKSSRSGLPTSWIIK

SEQ ID NO: 17369 - protein, 1095 aa, unidentified
  REGION 1..1095: note = Cas Enzyme sequence
MSAHHLRVGIDVGTHSVGLATLRVDDHGTPIELLSALSYIHDSGVGKEGKKDHDTRKKLSGIARRARRLLHHRRTQLQQLDKVLLDLGFPIPKPGEFLDLNEQTDPYRVWRVRARLVEEKLPEELRGPAISMAVRHIARHRGWRNPYSKVESLLSPTEDSPFMEALRERILTATGEVLDDGITPGQAMAQVALTHDISMRGPEGILGKLHQSDNANEIRKICDRQGISSDVCKQLLRAVFKAESPRGSAVARVAPDPLPGQGSFRRAPKCDPEFQRFRIISIVANLRISETKGENRPLTVNERRQVVAFLMEDSQADLTWVDVAEELGVHRRDLRGTAVLTDDGERSAARPPIDATDRTMRQTKISSLKTWWEEADSEQRSAMIRYLYEEPADSECAEVIAELPEEDQAKIDSLHLPAGRAAYSRESLTALSDHMLATTDDLHEARKQLFGVDDSWSPPVEAINAPVGNPSVDRTLKIVGRYLSAVESMWGTPEVIHVEHVRDGFTSERMADERDKANRRRYNDNQKAMEKIQHDYGKEGYISRGDIVRLDALELQGCACLYCGGTIGYHTCQLDHIVPQAGPGSNNRRGNLVAVCERCNRSKSNTPFAVWAQKCGIPHVGVKEAIGRVRGWRKQTPNTSSEDLTRLKKEVIARLRRTQEDPEIDERSMESVAWMANELHHRIAVAYPETTVMVYRGSITAAARKAAGIDSRINLIGEKGRKDRIDRRHHAVDASVVALMEPSVAKTLAERSSLRGEQRLTGKAQTWKQYTGSTVGAREHFEMWRGHMLHLTELFNERLAEDKVYVAQNIRLRLSDGNAHTVNPSKLVSHRLGDGLTVQQIDRACTPALWCALTREKDFDEKNGLPAREDRAIRVHGHEIKSSDFIQVFSKRKKTDSDRDETPFGAITVRGGFVEIGPSIHHARIYRIEDKKPVYAMLRVFTHDLLSQRHGDLFSAVIPPQSISMRCAEPKLRKAIATDNATYLGWVVVGDELEINVDSFTKYAIGRFLENFPNTTRWRICGYDTNSKLTLKPIVLAAEGLENPSSAVNEIVELKGWRVAINVLTKVHPTVVRRDALGRPRYSSRSNLPISWTIE

SEQ ID NO: 17370 - protein, 1101 aa, unidentified
  REGION 1..1101: note = Cas Enzyme sequence
MWYASLMSAHHLRVGIDVGTHSVGLATLRVDEQGTPIELLSALSHIHDSGVGKEGREKHKTRKKVSGVARRAQRLLRNRRKRLQQLDEVLLDLGFPIPTPGEFLDPNEPADPYRVWRVRARLVEEQLPEELRAPAISMAVRHIARHRGWRNPYSKVESLLLPADESPFMKALRERIMTKTGEVLDDGITPGQAMTQVALTHAVKMRGPEGILGKLHQSDNANEIRKICDRQGISSDVCKQLLRAVFKADSPRGSAVSRVAPDPLPGQGSFRRAPKCDPEFQRFRIISIVANLRISEATGKNRPLTVDERRQVVAFLMKDSQADLTWVDVAEKLDVHRRDLRGTAVLTDDGERSAARPPIDATDRIMRQTKISSLKTWWEAADSERRGAMIRYLYEEPADLECAEIIAELPEKDQAKLDSLHLPAGRAAYSRESLTALSDHMLATTDDLHEARKQLFGVDDSWLPPVEAINAPVGNPSVDRTLKIVGRYLSAVESMWGTPEVIHVEHVRDGFTSERMADERDKANRSRYNDNQKAIEKIQHDYGKEGYISRGDIVRFHALKLQGSACLYCGTTIGYHTCQLDHIVPQAGPGSNNRRGNLVAVCERCNHSKSNTPFAVWAQKCGIPHVGVKEAISRVNGWVEHNHSTSSGDLTRLKKEVIARLRRTQKDPEIDERSMESVAWMANELHHRIAAAYPETTVMVYRGSITAAARKAAGIESRINLIGEKGRKDRIDRRHHAVDASVVALMEPSVAKTLAERSSLRGEQRLTGQEQTWKQYTGLTVGAQERFEMWRSRMLHLTELFNERLAEDKVYVTQNIRLRLSDGNAHTVNPSKLVSHRLGDGLTVQQIDRACTPALWCALTREKDFDEKNGLPAREDRVIRVHGHEIKSSDYIQVFSKRKKTDSDRDEDPFGAITVRGGFVEIGSSIHHARIYRIEDKKPSYAMLRVFTHDLLSKRHSDLFSVDIPPQSISMRCATTELRQAISEGRATYLGWIIAGDELHVPVETFTTHKIGSFLKDYPDTTHWRICGYDSETMLILKPRVLSAEGLNNSSNIAKYVIKDKGWRIAINKLVKVHPTVVRRDALGRPRYSSKSNLPISWTIE

SEQ ID NO: 17371 - protein, 1095 aa, unidentified
  REGION 1..1095: note = Cas Enzyme sequence
MSAHHLRVGIDVGTHSVGLATLRVDEQGTPIELLSALSHIHDSGVGKEGREKHKTRKKVSGVARRAQRLLRSRRKRLQQLDEALLDLGFPIPTPGEFLDPNEPADPYRVWRMRARLVEEQLPEELRAPAISMAVRHIARHRGWRNPYSKVESLLLPADESPFMKALRERIMTKTGEVLDDGITPGQAMTQVALTHAVKMRGPEGILGKLHQSDNANEIRKICARQGVSPDVCKQLLRAVFKADSPRGSAVSRVAPDPLPGQGSFRRAPKCDPEFQRFRIISIVANLRISEATGKNRPLTVDERRQVVAFLMKDSQADLTWVDVAEKLDVHRRDLRGTAVLTDDGERSAARPPIDATDRIMRQTKISSLKTWWEEADSERRGAMIRYLYEESADLECAEIIAELPEEDQAKLDSLHLPAGRAAYSRESLTALSDHMLATTDDLHEARKQLFGVDDSWLPPVEAINAPVGNPSVDRTLKIVGRYLSAVESMWGTPEVIHVEHVRDGFTSERMANERDKANRSRYNDNQKAIEKIQHDYGKEGYISRGDIVRFHALKLQGSACLYCGTTIDYHTCQLDHIVPQAGPGSNNRRGNLVAVCERCNHSKSNTPFAVWAQKCGIPHVGVKEAISRVNGWVEHNHSTSSGDLARLKKEVIARLRRTQKDPEIDERSMESVAWMANELHHRIAAAYPETTVMVYRGSITAAARKAAGIESRINLIGEKGRKDRIDRRHHAVDASVVALMEPSVAKTLAERSSLRGEQRLTGQEQTWKQYTGLTVGAQERFEMWRSRMLHLTELFNERLAEDKVYVTQNIRLRLSDGNAHTVNPSKLVSHRLGDGLTVQQIDRACTPALWCALTREKDFDEKNGLPAREDRAIRVHGHEIKSSDCIQVFSKRKKTDSDRDEGPFGAITVRGGFVEIGSSIHHARIYRIEDKKPSYAMLRVFTHDLLSKRHSDLFSVDIPPQSISMRCATTELRQAISEGRATYLGWIIAGDELHIPVETFTTHKIGSFLKDYPDTTRWRICGYDSETMLILKPRVLSAEGLNNSSNIAKYVIKDKGWRIAINKLAKVHPTVVRRDALGRPRYSSRSNLPVSWTIM

SEQ ID NO: 17372 - protein, 1096 aa, unidentified
  REGION 1..1096: note = Cas Enzyme sequence
MTTADVRVSADKKHYLVGIDVGSYSVGLSAVEVDEDRNPVGLLSAVSYIHDAGVDPTARKEAATRRAVSGVARRTRRLYRRKRKRLVNLDRFIEECGWPVVDNEAFDDPLLPWRARMALAEGFIEDDKQRALYLSIAMRHIARHRGWRNPYTKVQSLHSPQEHSDAFKAIREDVEKELGRPLPENATVAQVIGQLMVAGRRLRGEGGVISARLQQVDHALEINTICAKQRIPDDLRKQLMDMVFAAESPKGAASGRVGKDPLSGRCRAGKASDAFQRYRIAALTANLRIRQGGGKRRLTQVEMALVNDLLVNAKGAKQPTWVDVAEVLGIDRGQLLGTATMLDDGERAGATPPVHTTNLMMASVRIAPLKNWWLEADQPARDAMIKALSLAEADDFDSEEGAQVQALFSSLTDEEHEKLDGLHLPAGRAAYSEDTLRKLTEHILAHGSDLYEARRAVFGVSEDWAPPAPDIAEPTGNPAVDRVLKIVNRWLSAAEAEWGAPLSVNIEHGRDAFVSELKSREIDRDIQRRTRRNYDLLKTMQEELGIDSKPSRADLWRYQSVQRQNGQCAYCGSPITYSNCEMDHIVPRAGQGSTNKRENLVATCARCNRSKLNIPFAVWAERSTIPGVSVKEAIDRTKMWLPDSGMRAADFRSFVKQVQDRFRRTTLDEPIDNRSAESVSWMANELRARIAQHFSSGDDQADTKVRVFRGEITARARAASGIQRDLNMIGGKGKQRLDRRHHAVDASVIALMQATVAQVLVERNDMKHEQALRRQAPQWKEYEGADEGTRFQFRQWKRRMHSLLRILNQALDEDRIVVMSNLRLRLGNSQVHEAQIGKLAAKKVGDAFSVVEIDRASSEALWCALTRDPDYDPKEGLPENPERTLRVHGTHLSANDEVHIFPVGAAAIAIRGGYAELGASFHHARIYRINGKKPSYGMVRIYSVDLQKFRQQDLFSVELKPQTVSMRYADPKVRKAIAEDNAEYLGWLVPDDELLLDASSFTGQVAEAQTILGPIKRWRLDGLFGPSQLRLRPLQLAAEGLASDSEDYLKKTLDMPGWRPVVNKLLSVGRVTVVRRDALGRPRLESVANLPVTKSF

SEQ ID NO: 17373 - protein, 1116 aa, unidentified
  REGION 1..1116: note = Cas Enzyme sequence
MLRRGLLTQVPAFYYLKGVAMTTADVRVSADKKHYLVGIDVGSYSVGLSAVEVDEDRNPVGLLSAVSYIHDAGVDPTARKEAATRRAVSGVARRTRRLYRRKRKRLVNLDRFIEKCGWPVVDNEAFDDPLLPWRARMALAEGFIEDDKQRALYLSIAIRHIARHRGWRNPYTKVQSLHSPQEHSDAFKAIREDVEKELGRPLPENATVAQVIGQLMVAGRRLRGEGGVISARLQQVDHALEINTICAKQRIPDDLRKQLMDMVFAAESPKGAASGRVGKDPLSGRCRAGKASDAFQRYRIAALTANLRIRQGGDKRRLTQVEMTLVNDLLVNAKGAKQPTWVDVAEVLGIDRGQLLGTATMLDDGERAGATPPVHATNLMMASVRIAPLKNWWLEADQPARDAMIKALSLAEADDFDSQEGAQVQALFSSLTDEEHEKLDGLHLPAGRAAYSEDTLRKLTEHILAHGSDLYEARRAVFGVSEDWAPPAPDIAEPTGNPAVDRVLKIVNRWLSAAEAEWGAPLSVNIEHGRDAFVSELKSREIDRDIQRRTRRNYDLLKTMQEELGIDSKPSRADLWRYQSVQRQNGQCAYCGSSITYSNCEMDHIVPRAGQGSTNKRENLVATCARCNRSKLNIPFAVWAERSTIPGVSVKEAIDRTKMWLPDSGMRAADFRSFVKQVQDRFRRTTLDEPIDNRSAESVSWMANELRARIAQHFSSGDDQADTKVRVFRGEITARARAASGIQRDLNMIGGKGKQRLDRRHHAVDASVIALMQATVAQVLVERNDLKHEQALRRQAPQWKEYEGADEGTRFQFRQWKRRMHSLLRILNQALDEDRIVVMSNLRLRLGNSQVHEAQIGKLAAKKVGDAFSVVEIDRASSEALWCALTRDPDYDPKEGLPENPERTLRVHGTHLSADDQVYIFPVGAAAIAIRGGYAELGASFHHARIYRINGKKPSYGMVRVYSVDLQKFRQQDLFSVELKPQTVSMRYADPKVRKAIVEGNAEYLGWLVSDDELLLDASSFTGQVADTQAALGPIKRWRLDGLFSPSRLRLRPLQLAAEGLASDSEDYLKKTLDMQGWLPAVNKLLSVGRVTVVRRNALGRPRLESVANLPVTKSF

SEQ ID NO: 17374 - protein, 1107 aa, unidentified
  REGION 1..1107: note = Cas Enzyme sequence
MLQTGVRTACVGFFNLIGVVMAASPTKYVVGIDVGSFSVGMAAIKVDDDGMPQEILSAVSHIHDSGLDPDNIKSAITRLAVSGVARRTRRLFRRRRRRLIRLDAFIQSKGWGLPKNDESDDPYLPWRVRAELASRPIPTEEELGAKLSIAIRHIARHRGWRNPYSRVSSLMADVPPSDAFEAIQEEFSKILGRSLADDTTLGQMVAACNLTNTKLRGEGGAISARLQQSDLAREIRKICSMQEIDENTVREIIEYVFVAESPKGANAARAGKDPLQPGEPRALKATDAFQQYRIAALIGNLRIREGRERRELSLDERRLVFDYLVHLKPKVEPDWSAVADTLKIDRGDLLGTATTTDDGERAGARPPVHETNRRILTCSVKPLVKWWQEAGDAERRAMLMALGNGSVEDYDSAEGAKVQAFFTDLSDEDMEKLDKLQLPVGRAAYSEDTLTKLTKAMLSGGIDLYTARRQVFGISEDWAPPAPEIGEPVGNPAVDRVLKVVARWLRAAENAWGVPESINIEHVRAGFMSESKSRELDRDNERRAKRNLELFTQMQQKFGQDIEPSRADLWRYQSVQRQNGQCCYCGTTITYQNCEMDHIVPRAGRGSTNTRDNLVAVCHDCNLSKGNIPFAVWAAKSTKPGVSVAEAQERLRHWVCDPGLKTPQFKRFVKSVNDRLSRKTIDEELDARSIESVAWMANELRGRIAHKYQDAKVRVFRGQLTAEARKASGISKKIAFIDGPGKSRLDRRHHAVDAAVIAFMSAKVAETLAIRGNLKFDQELRKDAPQWKEFTGSTDAHKIIWSKWHSRMTALSGLLQTALDEDRIVVMSNLRLRLGNGTAHEATIGKLKKLKVGDPISAVDVDRASTEALWCALTRHPDFDSKEGLPVDSDRTIRVQGRHLSADDAIEVFPIGAGSIAVRGGYAELGSSFHHARIYKIVGGKKPVFSMMRVYTVDLLKYENEDLFAVELKPQTMTIRQCEPKLRKALAAGQAEYLGWLVVDDELLLDTTKFNTGQVANTQAELGKISRWRVDGFYDSTKLRLRPLQMSAEGINEEMSADVKKILDTPGWRPSVNKLFDLGKVTVIRRDALGRVRLSSNAHLPITWAVG

SEQ ID NO: 17375 - protein, 1107 aa, unidentified
  REGION 1..1107: note = Cas Enzyme sequence
MLQTGVRTACVGFFNLIGVVMAASPTKYVVGIDVGNFSVGMAAIKVDDDGMPQEILSAVSHIHDSGLDPDNIKSAITRLAVSGVARRTRRLFRRRRRRLIRLDTFIQSKGWGLPQNDESDDPYLPWRVRAELASRPIPTEEELGAKLSIAIRHIARHRGWRNPYSRVSSLMADVPPSDAFKAIQEEFSKILGRSLADDMTLGQMVAACNLTNTKLRGEGGAISARLQQSDLAREIRKICSMQEIDENTVREIIEYVFVAESPKGANAARAGKDPLQPGEPRALKATDAFQQYRIAALIGNLRIREGRERRELSLDERRLVFDYLVHLKPKVEPDWSAVADTLKIDRGDLLGTATTTDDGERAGARPPVHETNRRILTCSVKPLVKWWQEAGDAERRAMLMALGNGSVEDYDSAEGAKVQAFFTDLSDEDMEKLDKLQLPVGRAAYSEDTLTKLTKAMLSGGIDLYTARRQVFGISEDWAPPAPEIGEPVGNPAVDRVLKVVARWLRAAENAWGVPESINIEHVRAGFMSESKSRELDRDNERRAKRNLELFTQMQQKFGQDIEPSRADLWRYQSVQRQNGQCCYCGTTITYQNCEMDHIVPRAGRGSTNTRDNLVAVCHDCNLSKGNIPFAVWAAKSTKPGVSVAEAQERLRHWVCDPGLKTPQFKRFVKSVNDRLSRKTIDEELDARSIESVAWMANELRGRIAHKYQDIKVRVFRGQLTAEARNASGISKKIAFIDGPGKSRLDRRHHAVDAAVIALMSAKVAETLAIRSNLKFDQELRKDAPQWKEFSGSTDAHKIIWSKWRSRMTALAGLLQTALDEDRIVVMSNLRLRLGNGTAHEATIGKLKKLKVGDPISAVDVDRASTEALWCALTRHPDFDSNEGLPADPDRTIRVQGRHLSADDAIEVFPIGAGSIAVRGGYAELGSSFHHARIYKIVGGKKPVFSMMRVYTVDLLKYENEDLFAVELKPQTMTIRQCEPKLRKALAAGQAEYLGWLVVDDELLLDTTKFNTGQVANTQAELGKISRWRVDGFYDSTKLRLRPLQMSAEGINEEMSVDVKKILDTPGWRPSVNKLFDLGKVTVIRRDALGRVRLSSNAHLPITWAVG

SEQ ID NO: 17376 - protein, 1096 aa, unidentified
  REGION 1..1096: note = Cas Enzyme sequence
VAREKKRYRVGIDVGLYSVGFAAIEVDEDDRPLSLLNAMSVIHDSGVDPLQRKTAKTRMAESGLARRTRRLVRRRRKRLKALDRFIKSQGWPIVNLEEEDAWLPWQTRADLVTLEISDPDELGAMLSVALRHMARHRGWRNPWISVKQLRAISEPSEFLEAFQGRVSALLASPVPVSATPAELVIAARTGPNFKLRGEAGLIGGKLHQSDNLNELRAIAERQGLDESLFLAMTEAVFAAQSPKGAAAARVGHDPLPGRRHLPRAAKATLAFQRFRIAGVIGNLRIIEDDGERKLTVAERAIVMELLDTTLETPGWKEVAEALGIARSWLGGTATPGDDGERVSTRPPVNRTSQIMTAECKIKTLRSWWAEASDREQDSLVQALSNAGELKEDSADDLAAAAVVEGLAETELGKLDDLHLPTGRASYSVVSLLDLTKRILESEDDLHYARKHCFGVDDTWTPPVEPIGERIGNPAVDRVLAAANRWLLAAEREWGAPSSINIEHVRGAFESEAKTRERIRGDEQRFARHQAVVAEFQRRHGVQGDVRRSDVRRFQAIQRQNGQCLYCGEMVTYYTAEMDHIVPRAGEGSTNTRDNLVAVCRPCNQEKSNLPFAVWAGTTRRPGVSVAAAVERVNHFLEEDGLRGPDRRRFLDGVKRRLRATEGDEAIDARSFESLGWMANQLHLRVANHFRDSGTTVSVFQGRVTALARKVAGFEEQIALITKPGDERGKSRFDRRHHAVDAAVTAMMRPSVAKTLIERDSLRSTSHNLRRQNDWREYRGQETGDRVLFGQWEVGMRLLLDLMNWALREDRVPVTESLRLRLGSSAAHGDRIRKLVRVPLCSELSAETINRASSPALWCALTREPDYSPEDGLPENPDRSIRLRNRVLCPEDKVTFFNCAAAAIEVRGGYAEIGDTIHHARVYRVTTARRPFYAMIRVFHCDLVQHRKEDLFNTALPPQCISMRTAEPRLVEALTEGRAEYVGWIVEGDELEIDTSSMTSGIVGEFLRLVPGVTRWRLAGFDAASKLRLRPRLLSAEGLTQSDPDPMRKIVDMPSWRPSVDVVFGKCRASVVRRDALGRPRACPTQHVPDSWSAPSG

SEQ ID NO: 17377 - protein, 1087 aa, unidentified
  REGION 1..1087: note = Cas Enzyme sequence
MAASSTRYVVGIDVGNFSVGMAAIKVDDDGMPQEILSAVSHIHDSGLDPDNIKSAITRLAVSGVARRTRRLFRRRRRRLIRLDAFIQSKGWGLPQNDESDDPYLPWRVRAELASRPIPTEEELGAKLSIAIRHIARHRGWRNPYSRVSSLMADVPPSDAFKAIQEEFSKILGRSLADDTTLGQMVAACNLTNTKLRGEGGAISARLQQSDLAREIRKICSMQEIDENTVREIIEYVFVAESPKGANAARAGKDPLQPGEPRALKATDAFQQYRIAALIGNLRIREGRERRELSLDERRLVFDYLVHLKPKVEPDWSAVADTLKIDRGDLLGTATTTDDGERAGARPPVHETNRRILTCSVKPLVKWWQEAGDAERRAMLMALGNGSVEDYDSAEGAKVQAFFTDLSDEDMEKLDKLQLPVGRAAYSEDTLTKLTKAMLSGGIDLYTARRQVFGISEDWAPPAPEIGEPVGNPAVDRVLKVVARWLRAAENAWGVPESINIEHVRAGFMSESKSRELDRDNERRAKRNLELFTQMQQKFGQDIEPSRADLWRYQSVQRQNGQCCYCGTTITYQNCEMDHIVPRAGRGSTNTRDNLVAVCHDCNLSKGNIPFAVWAAKSTKPGVSVAEAQERLRHWVCDPGLKTPQFKRFVKSVNDRLSRKTIDEELDARSIESVAWMANELRGRIAHKYQDIKVRVFRGQLTAEARNASGISKKIAFIDGPGKSRLDRRHHAVDAAVIALMSAKVAETLAIRSNLKFDQELRKDAPQWKEFSGSTDAHKIIWSKWRSRMTALAGLLQTALDEDRIVVMSNLRLRLGNGTAHEATIGKLKKLKVGDPISAVDVDRASTEALWCALTRHPDFDSNEGLPADPDRTIRVQGRHLSADDAIEVFPIGAGSIAVRGGYAELGSSFHHARIYKIVGGKKPVFSMMRVYTVDLLKYENEDLFAVELKPQTMTIRQCEPKLRKALAAGQAEYLGWLVVDDELLLDTTEISTNQLTSVQSVFGKISRWRVDGFYDVSRLRLRPIQMSAEGISDEMPAELKKILDTPGWRPSVNKLFDLGKVTVIRRDALGRVRLSSNAHLPITWAVG

SEQ ID NO: 17378 - protein, 1095 aa, unidentified
  REGION 1..1095: note = Cas Enzyme sequence
MKLMSETPVFARSLGSDWVLGIDLGSASLGWAAISLDSLGMASGLKVAGVRLFDPAVSGDIEKGQDESNAVVRRTARLIRRQLRRRAARQSELFKLLQKHRLLPAYAGAETNGARQRHEVLNDFDKGLAKKLASDVDGRLAGADLPLYLLRKMALDAELTPFELGRVFYHLSQRRGYKSNRKEQAAKKDDAGKVKKDEDLGEVKRDIEILEKEIQLSGSRTLGEYFASFDPHTQKVRRRWTGRAMYEYEFGEIWKKQAGFHPDLLTEGLHREVKRLLFYQRPIKAQAHLIGGCELEEGERRASWATLEAQQFRLLQKLNDLEIILPGQTAGIRLDAEQRAVVLGLLETAADVTFDRIRKALKLDKNVGFNLQRGGESKLKGSLTNVHMFEVFGERWLAMTDEEKKQVVEDWRTIDKEESLIRRAIEYWKLDLGAARLLAKRTAPSGYCMYSRKAIRKLLPYMQEGLRFQEAVTVAFPDFQRLAGGIEHDRIPSVREVLKTLRNPAIERALTELRKVVNALIREHGKPAEIRIELARDLKKPRVERAKATTQNRDREKERDAVRKELKEVFGEGFRPSRADLEKALLYKECAGECPYTGKRFPFSSLFGENSPWQVDHIIPFSRMPDDSFQNKVLCWVEANQYKGNRTPFETYTEPGEYEAILSRVRNWKKPNVGKLKRFELRTTDEIEGFSSRQLNDTRYASKLACELVGTLYGGRDVMTEAGKRQAVFASSGMVTATLRRAWGLEAILRETAGSANGETKGKPRSDHRHHAIDAITIALSKPKMIAQLSRANERDPYWNRDGRRRFPKIEAPWLDFVPSIRPHIEGMLVSHRPEHRLTGALHKGTNYSRPETNGKFVHIRRPVNGLTASEIESIVDPAVQRAVMEKAALFGGTLQGWTPNAAKDDWPRLATKSGKQVPIKKVRVRKALKVFPVGDAPHRTRFVDHGADSIHHIAIFVTKDGRGRDKWISEIVRIFEANQRYQAWKKTGGPIAPLVYGSHSEDAAAEFLFFLMKKDTLELEVGGKRAVYLVTSFENDGRINLIPINASGKREDQKESKMVLRESLSSLSKRVPQKVHIDSIGRKWPVRDKTGDRP

SEQ ID NO: 17379 - protein, 1080 aa, unidentified
  REGION 1..1080: note = Cas Enzyme sequence
MGETNTQTGSYILGIDLGSASLGWAAISLDGAGMATGLLRSGVRLFNPAVTGDIEKGQDESNAVARRTARLIRRQLRRRAARQSELFQLLQRYTLLPPYKGAEADASQQRHSILNALDQELTAKWVKPGNAGAQAAIELPLYLLRKTALDAALEPFELGRVFYHLSQRRGYRSNRKDQASDKGTPGKAKKADDLGAVQGGIKELEDAIRSSGTRTLGEYFTSLDPHSQKVRGRWTARRMYEEEFAAIWAKQVTFHPALLTEELHYKIKHLLFYQRPIKAQSHLIGDCELEPGERRAAWATLEAQQFRVLQKVNDLEIILPGNVTGIPLTPEQRQTVLNLLESSSEATFKKIRKALGLGENIGFNLQRGGETKLKGNLTNSHMADVFAERWLEMSEEDKKQVVEDWRTIEREESLIRRATEHWKLDETGAKWLASRPAPSGYCSISRKAIRKLLPLMMEGKRFKEAENEIWGSRFSGGQVYDRIPPVRQALKSLRNPAVERALTELRKVVNALIRELGKPTEVRIELARDLKKPRHERAKAVSQNRDREKQRSAAKVKMLQEIGPGFEHPSRADVEKALLWEECQGECPYTGKRFPLSSLFGENPPLQVEHIIPFSRIPDDSFQNKTLCYHEENQIKGNRTPFEAYKDAEQFETILNRVRNWRTPNPGKQRRFELRTLEELEGFSSRQLNDTRYASKLACELVGTLFGGRDIPTESGSRQVVFASSGMVTATLRKGWGLEAILREAAPSANGQNRGKPRTDHRHHAIDAITIALSAPRMIAALSRNNAQDPYWPRNGRTAPKLQSPWNGFVDSIRPHFEQMLVSHRPEHRLTGALHDETNYGRPHKEGGKDVVHIRKQVVGMSAGDIENIVDPAVRESVREKAASFGGDLKKWTPKEGSEDWPLLRTKTGKEIPIKRVRIKKSLGVETIAKGDRARHVALSSNHHVAIFALLDERGGERRWEPMIVSLFEAMERKRKGQPLIQTRYPVVGEFIFKFSLMGGDTVLLHKDCDHKNNHCNPSVWRLRTIGSNGQLSLVRINDARLKAEIQKAKEWWSPTQDALRKLDAVKVVIDSLGRIHQSG

SEQ ID NO: 17380 - protein, 1080 aa, unidentified
  REGION 1..1080: note = Cas Enzyme sequence
MGETNTQTGSYILGIDLGSASLGWAAISLDGAGMATGLLRSGVRLFNPAVTGDIEKGQDESKAVARRTARLIRRQLRRRAARQSELFQLLQRYTLLPPYKGAEADASQQRHSILNALDQELTAKWVKPGNAGAQAAIELPLYLLRKTALDAALEPFELGRVFYHLSQRRGYRSNRKDQASDKGTPGKAKKADDLGAVQGGIKELEDAIRSSGTRTLGEYFTSLDPHSQKVRGRWTARRMYEEEFAAIWAKQVTFHPALLTEELHYKIKHLLFYQRPIKAQSHLIGDCELEPGERRAAWATLEAQQFRVLQKVNDLEIILPGNVTGIPLTPEQRQTVLNLLESSSEATFKKIRKALGLGENIGFNLQRGGETKLKGNLTNSHMADVFAERWLEMSEEDKKQVVEDWRTIEREESLIRRATEHWKLDETGAKWLASRPAPSGYCSISRKAIRKLLPLMMEGKRFKEAENEIWGSRFSGGQVYDRIPPVRQALKSLRNPAVERALTELRKVVNALIRELGKPTEVRIELARDLKKPRHERAKAVSQNRDREKQRSAAKVKMLQEIGPGFEHPSRADVEKALLWEECQGECPYTGKRFPLSSLFGENPPLQVEHIIPFSRIPDDSFQNKTLCYHEENQIKGNRTPFEAYKDAEQFETILNRVRNWRTPNPGKQRRFELRTLEELEGFSSRQLNDTRYASKLACELVGTLFGGRDIPTESGSRQVVFASSGMVTATLRKGWGLEAILREAAPSANGQNRGKPRTDHRHHAIDAITIALSAPRMIAALSRNNAQDPYWPRNGRTAPKLQSPWNGFVDSIRPHFEQMLVSHRPEHRLTGALHDETNYGRPHKEGGKDVVHIRKQVVGMSAGDIENIVDPAVRESVREKAASFGGDLKKWTPKEGSEDWPLLRTKTGKEIPIKRVRIKKSLGVETIAKGDRARHVALSSNHHVAIFALLDERGGERRWEPMIVSLFEAMERKRKGQPLIQTRYPVVGEFIFKFSLMGGDTVLLHKDCDHKNNHCNPSVWRLRTIGSNGQLSLVRINDARLKAEIQKAKEWWSPTQDALRKLDAVKVVIDSLGRIHQSG

SEQ ID NO: 17381 - protein, 950 aa, unidentified
  REGION 1..950: note = Cas Enzyme sequence
LDCALTSDLCRTVEADSLRAVKESLPYFLRKSALDRKLSAFELGRALYHLIQRRGFKSNRKEGKKSKDDELGKVKAGISELAAQMSSAGVRTLGEYFAGLNSHERRIRGRWTARSMYEQEFERIWQAQRPYWRDVLDDDFKSKVGWLLFFQRPIAAQEHLIGCCELEPEERRAPWAFLEAQRFRVLQKVNDLEVIEFGKINERSLTQEEKAAVFAKLENEGDQSFAELRKLLGLKKSTFNLERGGEKRLRGNRTNAFMRSIFGVFWDEMPEEEKHKAVTLWYRAESEEKLASRVHELWALDENSASKFAETRPEDGYCSLSLKALRRLLPEMEKGVSYGRIRPVLYPELRQEPKDLLPVVREAVPSLRNPAVERALTEVRKVVNAIVRQYGKPYEIRIEMARELRKSRKEREESTRQIRSRQREREEAKAKILKECGIQNPSRSDIEKALLFEECGGICPYTGRTIEFSSLFGDSQFDIEHIIPLSRCPDDSFLNKTLCYHHENRSVKGGRTPWEAYGTDDERWAQILERVKRFSNPAKLRRFELRSEEELREFTERQMNDTRYTTRLAVDLLSTLYGGRDIPRGDGTNRKVIHATTGMVTATLRRSWGVEAILREAVPSYNGESKGKPRTDHRHHAVDAIVIALTSQSMVQQMSVAAANAPSWQSARRSFQSVESPWPNFVDSLRPQIVNMVVSHRPEHKMSGEFHDETNYGRPRIEGKKSVVHIRKPVTSLKEKDIASIVDPVVRRAVEEKFAALSGDLSRCEAANEWPACPASNGRDIPIRKVRVRKVLNVSAIGKGNRKRFVMPSSNHHVEVFAKLDVHGKETRWESIVVSLMDAAERKHGAERIVAHSYQDAEDFVFKFSLMGGDIVQLHKDCSHAAGKCSPSLFRLRTIAANGQLSLIGITDARMKDDIKKAKEWWSPMSDALRKLDCRKVQLDLLGGIHAAND

SEQ ID NO: 17382 - protein, 1077 aa, unidentified
  REGION 1..1077: note = Cas Enzyme sequence
MPISAGSSQKYTLGLDLGSASLGWALVALDDEDEPIGLLRTGVRIFEPGVDGTTMEIEQGKDQSKAVDRRTERLHRRQLRRRAARQRELFHLLQAHSLLPPFEGLSNQSENEKFTSSGARHAILNAFDQQLQTKWDNANSDRAAMYAQLPLYFLRAAGLDEKLEPYEFGRVLYHLIQRRGFKSNRRETAKNVEKDKELGAVKAGISQLEQEMKAANARTLGEYFSTLDPHQQKVRRLWTARAMYEHEFNLLWQTQATHHPELLTAEFRAQIATLLFFQRRIAAQGHLIGKCELEPDKRRAPWASLEAQRFRILQKVNDLKLIEPGNPDAQPLTPEERASVYTLLDQEGDQTFAAIRKHLGMPKTIQFNLERGDEKKLRGNRTNVTMTQVFGDRWALFSEEDQKRIVEEWRTSESEDSLMRRGIEHWGLSEASAKLWAEKHPEDGYCALSRKAISRLMPLMISGMSFKEAETKLYGDRFSGNEVFDAVPVVRESLKTLRNPAVERSLTELRKVVNAIIREYGKPYEIRIELARDLKKPRQERVTATKNNRKRQSEREAVKAKILKECGLEYPSRADIEKAMLHEECGGICPYTGRAIPFSGLFRDSQFDVEHIIPISRYPDDSFQNKTLCYHEENRNRKRNRTPFEAYPANDWKIMLERVKKFNNPGKLKRFMLRTEDELKEFSSRQMNDTRYASVLAGRLLGTLYGGRDVATGTGARQAIFASSGFVTATLRRAWGLESILREAVPSTNGQNKGKPRTDHRHHAIDAITIALTKQSVIHAMSSAASADINPQHSARSFRSLPAPWVDFVASIRPQIENMVVSHRPEHKISGELHDATNYGQPYTLNGKPTVHIRKPVEGLSAKDIENIVDDEVRRAVAQKAESLAGDLSKCATSNDWPFIQAKDGRHIPIKRARIKKVLKVTPIASGPRERFVAESSNHHVAIFAQMDATGREKRWDSIPVSLLEATERKRRKLPIIQKSYPDEKNFVFKFSLMGGDMIEIHRNCNHAENACVPSIYRVRTIATNGQLSLVRVNDARMILDIKEAKEWWSPRANTLKQMECRKVVIDLMGRIHPAND

SEQ ID NO: 17383 - protein, 1080 aa, unidentified
  REGION 1..1080: note = Cas Enzyme sequence
MSESGSLAQDYVLGIDLGSASLGWAVVGLDETGMAAGLLRAGVRLFDPAVTGDIEKGQDESNAVARRAARLIRRQLRRRAARQSELFRLLQVHGLLPGYEGAEADASQQRHAILNTLDLELAAKWARPGTAGAKAAIELPLYLLRKTALDSVLDPFKLGRVFYHLSQRRGYRSNRKEQRDGKKASGKAKKADDSGAVEGGIKELEDAMRSAGARTLGEYFASLDPHAQKVRGRWTGRKMYEEEFAAIWTKQATFHPALLTEELHHQIKHLLFYQRPIKAQAHLIGGCELEPGERRAAWATLEAQQFRILQKVNDLEVILPGNVTGVPLTREQRQTVLDLLENSAEVTFKKIRKALGLAENIGFNLQRGGETRLKGNLTNTLMVEAFAERWPDMSDADKKQVVEDWRTIEQEESLIRRTIEHWKLDEAGAEWLASRPAPSGYCSISRKAIRKLLPLMMEGKRFKEVEKEVYGNRLTGGQVYDRIPPVRQALKTLRNPAVERALTELRKVVNALVREYGKPTEVRIELARDLKKPRHERAKAIGQNRDREKQRNAAKGKMLQELGPGFEHPSRADVEKALLWEECQGECPYTGKRFPFSSLFGENPPLQVEHIIPFSRIPDDSFQNKTLCYHEENQRKGNRTPFEAYTDPLEYEAILNRVRNWRTPNPGKQRRFELRTLEELAGFSERQLNDTRYASKLACELVGTLYGGRDIQTETGSRQVVFASSGMVTATLRKGWGLEAILRDAAPSANGQNRGKPRTDHRHHAIDAITIALSRPKMIAALSRNNAQDPYWPRNGRTAPKIQSPWKDFVDSIRPNFEQMLVSHRPEHRLTGALHDETNYGRPRNEGGKDVVHIRKQVVGLSAGDIENIVDPVVREAVEAKAAQLGGDLKKWTPSEGSEDWPLLKTKTGRQVPIKRVRIKKSLGVETIGKEERTRYVALSSNHHVAIFALLDEQGREKRWESEIVSLLTAMERRRQHLPVIQTRLAAVPEAAFKFSLMWGDTLLLHKDCEHAKNICKPSFWRVRSIWEQGTLTLVRINDARQLNEIRGAKDWLLPSPDTLRKLDAVKVVIDSLGRIHQAG

SEQ ID NO: 17384 - protein, 1080 aa, unidentified
  REGION 1..1080: note = Cas Enzyme sequence
MTEVSQKNSTYVLGIDLGSASLGWAAIALDQNGMPTALLRAGVRLFDPAVTGDIQKGQDESNAVARRTARLVRRQLRRRAARQSELFRLLQGYGLLPPYEGAEADASQQRHAVLNALDAKLAATWLKQVTSGVRTAIELPLYLLRKTSLDSPLEPFELGRVLYHLSQRRGYRSNRKDQLNDKKPSVKSKKTDELGAVREGIKELEDAIRSAGARTLGEYFASLDPHLQKVRGRWTGRKMYEDEFAAIWEKQTEFYPALLTEELHHKIEHLLFYQRPIKAQSHLIGDCELEPRERRAAWATLEAQRFRVLQKVNDLEIILPGNVAGIALTSEQRRTVLDLLENTPEATFKKIRKALGLAENVGFNLQRGGETKLKGNLTNSHMAQVFADRWPAMSEADKKQAVEDWRTIENEESLIRRAIDYWKLDETGAEWLAERQAPNGYCSISRKAINKLLPLMIEGKRFKEAEKETYGSRLTGGQVYDRIPPVREALKSLRNPAVERSLTELRKVVNALIREHGKPVEVRIELARDLKKPRHERAKTISYNRDREKQRTTAKEKMLKEIGSGFEHPSRADVEKALLWEECQGECPYTGRRFPFASLFGENPPLQVEHIIPFSRIPEDSFQNKTLCYHEENQKKGNRTPFEAYTDHAEYEAILNRVRNWRTPNPGKQRRFELRTLEELEGFSERQLNDTRYASKLACELVGTLYGGRDIQTESGSNQLVYASSGMVTATLRKGWGLEAILREAAPSANGQNRGKPRTDHRHHAIDAITIALSRPKLIAALSRYNSEAPYWPRDGRSAPRIQSPWKDFVASIRPHFEQMLVSHRPEHRLTGALHDETNYGRPRKQGGKDVVHIRKQVVGLSSGDIENIVDPAVREVVHEKAAQFGGDLKKWTPKEGNEDWPLLRTKTGKDIPIKRVRIKKALGVEAIGKRERTRYVALSSNHHVAIFALLDDRGREKRWASEIVSLLAAMERKRQHQPVIQTKLVAVPEAAFKFSLMWGDTILLHKDCNHERSICKPSFWRVRSIWESGTLTLVQIKDARLLSEIRAAKDWLLPSPDTLRKLDATKVVIDSLGRIHQAG

SEQ ID NO: 17385 - protein, 985 aa, unidentified
  REGION 1..985: note = Cas Enzyme sequence
PGYEGAEADASQQRHAILNTLDLELAAKWARPGTAGAKAAIELPLYLLRKTALDSVLDPFKLGRVFYHLSQRRGYRSNRKEQRDGKKASGKAKKADDLGAVEGGIKELEDAMRSAGARTLGEYFASLDPHAQKVRGRWTGRKMYEEEFAAIWTKQATFHPALLTEELHHQIKHLLFYQRPIKAQAHLIGGCELEPGERRAAWATLEAQQFRILQKVNDLEVILPGNVTGVPLTREQRQTVLDLLENSAEVTFKKIRKALGLAENIGFNLQRGGETRLKGNLTNTLMVEAFAERWPDMSDADKKQVVEDWRTIEQEESLIRRTIEHWKLDEAGAEWLASRPAPSGYCSISRKAIRKLLPLMMEGKRFKEVEKEVYGNRLTGGQVYDRIPPVRQALKTLRNPAVERALTELRKVVNALVREYGKPTEVRIELARDLKKPRHERAKAIGQNRDREKQRNAAKGRMLQELGPGFEHPSRADVEKALLWEECQGECPYTGKRFPFSSLFGENPPLQVEHIIPFSRIPDDSFQNKTLCYHEENQRKGNRTPFEAYTDPLEYEAILNRVRNWRTPNPGKQRRFELRTLEELAGFSERQLNDTRYASKLACELVGTLYGGRDIQTETGSRQVVFASSGMVTATLRKGWGLEAILRDAAPSANGQNRGKPRTDHRHHAIDAITIALSRPKMIAALSRNNAQDPYWPRNGRTAPKIQSPWKDFVDSIRPNFEQMLVSHRPEHRLTGALHDETNYGRPRNEGGKDVVHIRKQVVGLSAGDIENIVDPVVREAVEAKAAQLGGDLKKWTPSEGSEDWPLLKTKTGRQVPIKRVRIKKSLGVETIGKEERTRYVALSSNHHVAIFALLDEQGREKRWESEIVSLLTAMERRRQHLPVIQTRLAAVPEAAFKFSLMWGDTLLLHKDCEHAKNICKPSFWRVRSIWEQGTLTLVRINDARQLNEIRGAKDWLLPSPDTLRKLDAVKVVIDSLGRIHQAGA

SEQ ID NO: 17386 - protein, 1095 aa, unidentified
  REGION 1..1095: note = Cas Enzyme sequence
MNETGSSKQSYVLGIDLGSASLGWAAIALDSTGMAAGVLRTGVRIFDPAVSGDYEKGQDESNAVARRAARLIRRQLRRRTARQSELFRLLQWSGLLPKYDGAKADASQQRHSILNALDRELSAKWAKPGSLETQAAVELPLYLLRKTALDVALEPFELGRVFYHLSQRRGYYSNRKEQAGKKDVAGKGKKDDDLGAVEGGIKDLLDEMRSAGARTLGEYFASLDPHTQKVRRRWTGRKMYEDEFAAIWASQSAFHPILLTEDLHHQIKHLLFYQRPIKAQAHLIGGCELEPGERRAAWATLEAQQFRVLQKVNDLEIILPGQVTGIPLTPEQRQTVLNLLENSAEATFKKIRKALGLGENIGFNLQRGEEKKLKGNLTNAHMAAVFAERWPEMPEEDKRQVVEDWRTISQDESLIRRAVEHWKLDEPGAKWLAGKSAPSGYCMISRKAIRKLLPLMMAGKRFKEAEKEVYGDRLTGGEVYDRIPPVRDALKTLRNPAVERALTELRKVVNALVREHGKPAEVRIELARDLKKPRHERAKAISYSRDREKERDAMRKRIAAEFGENFRPSREDVEKALLFEECGGRCPYSDDKSFPFSSLFGENSPWQVDHIIPFSRIPDDSFQNKVLCYHEENQYKANRTPFEAYGGTEKYEEILNRVRNWKKPNLGKLRRFELRTTEDLEGFSSRQLNDTRYASKLACELLGSLYGGRDIKTETGSRQVVFASSGMITATLRKAWGLEAILREAAPSANGQNKGKPRTDHRHHAIDAITIALSRPKMIATLSRANERDPYWPKTGRRFPLIDAPWKNFVDSIRPHFEQMLVSHRPEHRLTGALHDETNYGRPRKEDGKDIVHIRKPVAGKNKGEGLSAADIENIVDPAVRDAVREKAAQFGGDLKNWSPNAAQDDWPLLKTKTNKYIPIKRVRMRKAVKVFPVGDAAYRTRYVAPGADSIHHIAVFVTKDRRGRDKWISDIVSIFEFKQRWVEWKKSGLPVIPLVYNTHSEDKDAEFIFYLMKKDTLEIEVDGKRRVYLVTSFESDGRINLIPTHASGKREDQKDTKIVLRESLSSLSERVPQKVQIDSLGRKRPVRDQVGPRP

SEQ ID NO: 17387 - protein, 1096 aa, unidentified
  REGION 1..1096: note = Cas Enzyme sequence
MSEIGVSTQPYVLGLDLGSASLGWALVGIDAMERPSSLIRAGVRIFEPGVDGSALDIQQGKDQSKAVDRREARLRRRQLRRRVARQRELFGVLQGAGLLPTGDTQGTGIGSEQRHRILNNLDVTLSNRHRNGTDQEIFAQMPLYALRKKALYEPLALDELGRVFFHLSQRRGFQSNRKDVKKKTKDSEDQGQVKSAIHELEQAIEAAGAQTLGEYLAGLDPHEQKVRRQWTGRKMFEKEFQMIWDKQKEYHTDLLTPELHDRIWNLLFFQRPVAAQKHLVGKCELEPDKRRAPWAALLAQQFRLLQKVNDLRLIEEDGNELPLNEDGRAAVFDLLENHGTQSFAKIKQHLGLPKTAQFNLERGAGKSPQLKGNLTAQSMRKVFGERWKEFSAGKQNQIIENWRNSEKDEELKREAMEHLGLDEAGANALVNEKAPGDYCSLSLVALGKILPLMRAGKSFKEAETEIYGNRFSGAAVHSLIPVLRPNRKHFRNGTPPPQDPLMASIANGLRNPAVERSITEMRKVVNAIVREYGKPCEIRIELARELKKPRSKRLDETARNRKREAENKALAERMHNECGTPQNPSRNDLEKAKLWVEQQGECPYTGRSLPFSRLFDDNNGFDVDHILPRSRHPDDSYQNKVLCWGDTNRMVKRNQTPYEAFAEQDPENWHQILARVARWKNPGKSRKFEIRSTDELADFSSRQLNDTRYTSLLAARLLSTLYGGRDLAENGRKRQIIFASTGAVTATLRRNWGFEQILRNMIPPEPTESTGKPRTDHRHHAIDAIVIALTRNDVIQSMARASALEPWQPGTRSWRHVPQPWRTPDFFCSVEEQVREMLTSHRPEHKVSGELHQGSNYARPYMYKGKSIVHSRTLVSELKVEQIEADDVIVDRAVRDILRAKLKEIGGTLKGSDNVKAFEKPENTPYILTPAGKRIPIRKVRIRETKNPLLVGAGSNERYVASGGIHHVDLFVTRDEKRRETWDSKVIQTTEMYDRFPKHDRRPGRPHTESKNFSRLRQNDDVRWSRLFGQFFRVLKWKSHSVSGRGGGNVKIGFIDFQGLWEGRKTVVSFSGLSINRHFHGLLPWRVMPPVVPAVG

SEQ ID NO: 17388 - protein, 1070 aa, unidentified
  REGION 1..1070: note = Cas Enzyme sequence
MAERSSEKPKYILGIDLGSASLGWGLIRLDNDGNPTEVIRAGVRIFEPAVSGDIEKGQDESNAVARRGARVIRRQLRRRAARQSELFTLLQDKGLLPQYAGQQRDSSEQRHQILNQLDGELAAKWTECELGSGFIEIPLYLLRKSALYEPLERFELGRIFYHLSQRRGYKSNRREGGKPKADEDQGKVLSGISDLEQAIRESGAQTLGEYFAGLDPHAQKIRRQWTGRSMYEDEFSKIWAVQSAHLPTLLTKDLQREIRRLLFYQRPIKAQSNLIGKCDLEPEERRASWATLEAQRFRVLQKVNDLEIVFPGNLNGVPLTPEQRLSVYTILDEKGDQKFDSIRKHLGLDKNIGFNLQRGGEKTLKGNNVQKLMLEAFGSRWLSTPEEEKQLIVDEWRSIDSPESLQRRFTTHWKLDAEKAAKLADVTPPSGYCQLSRKAIRRLLPLMCEGKRFMAARQEVPAYVPKQETPLDRIPPVHDVLKNLRNPAVERALTEVRKVVNALVREYGKPAEVRIELARDLKKPRQERAKATDSNRRRQKEREAMKQRILRESGLDRPSRDDVEKALLWEECGGICPYTGKSIDFASLFGQHPQFDVEHIIPFSRLPDNSFQNKTLCYNEENRNKGKKTPFEAYPDPEDYSAILVRVNAWKVPNLGKQRRFELRTLEELEGFSSRQLNDTRYASLLACDLIATLYGGRVVPTNCGPKQIVFASSGTVTATLRKGLGLEAILREAVGSSNGQNLGKPRTDHRHHAIDAITIALTRQSMIQAMSRSASLEPNWATSSRSPRIVPAPWSNFVDSVRPHIQGLLVSHRPEHRLTGALHDETNYSKPRKLNGKDIVHIRKPVSGLSANDIESIVDPAIREAVRTKASEFGGDLKRCNPKEGVEDWPQLVTRTGKSVPIKRVRIRKTLDVETIAKGQRTRHVALSNNHHVAIFARIDENGKERRWEPLIVSLYEAMERKRKGLPIVQKSYPEAGNYIFKFSLMGGDTLLLHRECNHEKDICKASVWRLRTIGSNGQLSIVKITDARLKTEIQKAKEWWSPTSDTLRKLEAAKMVIDSLGRLHGAND

SEQ ID NO: 17389 - protein, 1108 aa, unidentified
  REGION 1..1108: note = Cas Enzyme sequence
MSEIGVSTQPYVLGLDLGSASLGWALVGIDAMERPSSLIRAGVRIFEPGVDGSALDIQQGKDQSKAVDRREARLRRRQLRRRVARQRELFGVLQGAGLLPTGDTQGTGIGSEQRHRILNNLDVTLSNRHRNGADQEIFAQMPLYALRKKALYEPLALDELGRVFFHLSQRRGFQSNRKDVKKKTKDSEDQGQVKSAIHELEQAIEAAGAQTLGEYLAGLDPHEQKVRRQWTGRKMFEKEFQMIWDKQKEYHTDLLTPELHDRIWNLLFFQRPVAAQKHLVGKCELEPDKRRAPWAALLAQQFRLLQKVNDLRLIEEDGNELPLNEDGRAAVFDLLENHGTQSFAKIKQHLGLPKTAQFNLERGAGKSPQLKGNLTAQSMRKVFGERWKEFSAGKQNQIIENWRNSEKDEELKREAMEHLGLDEAGANALVNEKAPGDYCSLSLVALGKILPLMRAGKSFKEAETEIYGNRFSGAAVHSLIPVLRPNRKHFRNGTPPPQDPLMASIANGLRNPAVERSITEMRKVVNAIVREYGKPCEIRIELARELKKPRSKRLDETVRNRKREAENKALAERMHNECGTPQNPSRNDLEKAKLWVEQQGECPYTGRSLPFSRLFDDNNGFDVDHILPRSRHPDDSYQNKVLCWGDTNRMVKRNQTPYEAFAEQDPENWHQILARVARWKNPGKSRKFEIRSTDELADFSSRQLNDTRYTSLLAARLLSTLYGGRDLAENGRKRQIIFASTGAVTATLRRNWGFEQILRNMIPPEPTESTGKPRTDHRHHAIDAIVIALTRNDVIQSMARASALEPWQPGTRSWRHVPQPWRTPDFFRSVEEQVREMLTSHRPEHKVSGELHQGSNYARPYMYKGKSIVHSRTLVSELKVEQIEADDVIVDRAVRDILRAKLKEIGGTLKGSDKVKAFEKPENTPYILTPAGKRIPIRKVRIRETKNPLLVGAGSNERYVASGGIHHVDLFVTRDEKRRETWDSKVIQTTEMYDRFPKHDRRPGRPHTESKNFSRLRQNDDDDESRFLFSLMKSDTIQLEQDGHRQIFKVKKFEATGKMTFIPINNAMPDKLQYSTGAAWSKMPATLKSMSPQKVVIDLLGRVHPAND

SEQ ID NO: 17390 - protein, 1088 aa, unidentified
  REGION 1..1088: note = Cas Enzyme sequence
MSESGVSTQPYVLGLDLGSASLGWALVGVDAMERPSSLIRAGVRIFEPGVDGSALDIQQGKDQSKAVDRREARLRRRQLRRRVARQRELFGVLQGAGLLPTDDTQGTGIGSEQRHRILNNLDVTLTNRYRNGADQETFAQMPLYALRKKALYEPLALDELGRVFFHLSQRRGFQSNRKDVKKKTKDAEDQGQVKSAIHELEQAIEAAGAQTLGEYLAGLDPHEQKVRRQWTGRKMFEKEFQKIWDKQKEYHTDLLTSELHDRIWDLLFFQRPVAAQKHLVGKCELEPDKRRAPWAALLAQQFRLLQKVNDLRLIKEGGNELPLNEDGRAAVFDLLENHGTQSFAKIKQHLGLPKTSEFNLERGKAKDLKGNVTAQSMRKVFGERWREFSAGKQNQIIENWRNSEKDEELKREAMEHWGLDEAGANALVNEKAPGDYCSLSLVALGKILPLMRAGKSFKEAETEVYGNRFSGAAVHSLIPVLRPNRKHFRNNTPPPQDPLMASIANGLRNPAVERSITEMRKVVNAIVREYGKPCEIRIELARELKKPRSKRLDETARNRKREAENKALAERMHNECGMPQNPSRIDLEKAKLWVEQQGECPYTGRSLPFSRLFDDNNGFDVDHILPRSRHPDDSYQNKVLCWGDTNRMVKRNQTPYEAFAEQDPENWHQIMARVARWKNPGKSRKFEIRSTDELADFSSRQLNDTRYTSLLAARLLSTLYGGRDLAENGRKRQIIFASTGAVTATLRRNWGFEQILRNIIPPEPTESTGKPRTDHRHHAIDAIVIALTRNDVIQSMARASALEPWQPGTRSWRHVPQPWRTPDFFRSVEEQVREMLTSHRPEHKVSGELHKGSNYGRPYPYNGKSTVHSRVFISALTAKDIAEDDVIVDHAIRDILRARLAEVGGNPKAFEKPENTPFMLTSAGKRIPIRKVRIRETRNPLRVGKGSNERYVASGGIHHVELFVTRDEKRRETWDSRVIQITEAYKRQREKQPVVARVLEDAPEAEFLFSISNDDTIEIKEGDRRRIVRVKKSAENKQIFYVPVNDAHTDADQMKLAIVKSKTPSTLKPLEARKVVVDLLGRVHPAND

SEQ ID NO: 17391 - protein, 1052 aa, unidentified
  REGION 1..1052: note = Cas Enzyme sequence
MVCLNEANEPTELLRAGVRIFEPAVEGNVEKGQDVSNAAARRQARLARRQLRRRAGRQKQLFKLLQRQGLLPRYEGQAGDSAIQRHEILNALDRDLAAKWSNSVDPITSNFVELPLYVLRKTALDTQLQPFELGRIFYHLSQRRGFQSNRRASNKDKEEEQGKVKAGISQLEAEIKAAGAETLGAYFAALDPHSQKVRRRWTHRRMFQEEFEIIWERQRSFHPTLLTEELRREISRILFFQRPIREQANLIGHCELEPDQRRASWATLEAQRFRLLQKVNDLEIIYPGQVLGTSLTDAQRLSLYELLDAEGDQKFEAIRKHLGIEKNIGFNLQRGGDTKLRGNLVNKIMRKAFGERWEEMDDEQQRLAVDEWRTIEGEQSLRRRFVEHWGLDDLAASALAEQTPPKGHCQLSRKAIRRLFPLMMLGQRFMAARQEIPEYRPRLKEPLERIPPVRETLNNLRNPAIERALTELRKVVNAMVGEYGKPAEVRIELARDLKKSRAERAKATDIMRRREKERITAKERLLKELGPAFDHPSRADVEKALLWEECGGICPYTGRSIEFASLFGEAPQFDVEHILPLSRIPDDSFQNKTLCYHEENRNRKGNRTPFEAYGADPDTYGQIIGRVKAWKIGNPGKLRRFELRTLDEIEGFSSRQLNDTRYSSRLAMQLLATLYGGDRIPQQDSSNRQIVFASSGSVTATLRKVWGLEEILREAAPSANGQSRGKPRTDHRHHAIDAIVIALTRQGTIQAMNRAAEQAPSWMRTGRAYRGLQQPWRDFVPSTRPVIHGLLVSHRPEHRLTGELHDATNYGAPRKVSGKEVVHVRKPVSGLGVKDVESIVDTVVREAVRAKAKELDGDLSKCNPKEGVEDWPLLRTRNGKTIPIKRVRIQKSLEVETVANGSARERYVALSSNHHVAIFAELDGHGKERRWEPITVSLYEAMNRKRSGLPVVQQAYPGAEDCVFKFSLMGGDTALLHRDCDHARDICRPRAWRIRTITQTGRVALVPINDARMKAEIKSSKDWWEPGIDALRKLGCEKVVIDTLGRPHVTSD

SEQ ID NO: 17392 - protein, 1076 aa, unidentified
  REGION 1..1076: note = Cas Enzyme sequence
MSSAMESPQKYVLGLDLGSASLGWALIALDDADDPTSLIRAGVRIFEPGVDGTSMEIEQGKDQSKAVERRTARLHRRQLRRRAARQRDLFRLLQRHSLLPAPGVLSGSPEEQRHSILNELDQHLTHKWQSAFPDNRFAQLPLYYLRKRALDASLEAPEIGRILFHLIQRRGFLSNRKENKQNPEQKKELGQVKAEIHSLEQDILSAGARTLGEFFAGLDPHAQRVRRRWTARKMFQDEFEKIWEAQAIHRLELLTPELHDKIAHLLFFQRPIAAQTHLVGKCELESGKQRAPWAAMEAQRFRILQKVNDLKLINPGSLISDPLTEDERQRLYDLLDWEGDQTFKAIKKYLSFPAEAQFNLEKGDEKRLRGNRTQAVMRKVFGDRWDGFSAGKQHQIIENWRNSESDEALIREAVEQWLLDAAAASSLSEQIPEPGYCAVSLTAIAKLLPLMQCGKSFKEAETEVYGARFSGGVVFDTLPEVRKQLESLRNPAVERALTELRKVVNAIVREYGKPYEIRVELARELKKPRQERIDATKKNRNRQREREDIAVKILRECGLSNPSRKDIEKALLHEECGGYCPYTGRHIPFSTLFDNSEFDVEHIIPRSRYPDDSFQNKTLCYLPENRDIKKGQTPWEAYGKDEQRWAEIMTRVSSWKNRGKMVRFSIQTEDALGDFSARQLNDTRYVSVLSARFLGALYGGRDVMDGEKVRQVIFASSGSVTATLRSSWGLEAILHELVPTEPGESRGKPRTDHRHHAIDAITIALTRPKVIQSMARAASMEPWQKDARAWRKIELPWKNFVPSIRPRIEEMLVSHRPEHKMSGELHKGTNYSAPSNYKGKPTVHTRCSLSALSASDIADDEVIVDIAVRDAVRMKLVELGGNPKLFDRPENAPCLSARDGRLIPIRKVRIRETKNPLRVGHGARERFVAPGGIHHVALFVVRDERRREKWDSDVAQVTEVYRLCPKNDHRKGRPRSAVKEPPISRQLKADPEAQFLFSLMKDDTIKVTDANGTHILRVKKFSDNKQMWFVPVNDAHDDAQQKKLCITWSRTPNSLKELHPRKVVIDLLGKVHPAND

SEQ ID NO: 17393 - protein, 1106 aa, unidentified
  REGION 1..1106: note = Cas Enzyme sequence
MSESGVSTQPYVLGLDLGSASLGWALIGIDAMEKPSTLIRAGVRIFEPGVDGSALDIQQGKDQSKAVDRREARLRRRQLRRRVARQRELFGVLQGAGLLPTDDTQGTGIGSEQRHRILNNLDVTLTNRYRNGADQETFAQMPLYALRKKALYEPLALDELGRIFFHLSQRRGFQSNRKDVKKKTKDSEDQGQVKSAIHELEQAIEAAGAQTLGEYLAGLDPHEQKVRRQWTGRKMFEKEFQMIWDKQNEYHTAPLTPELHDRIWSLLFFQRPVAAQKHLVGKCELEPDKRRAPWAALLAQQFRLLQKVNDLRLIGEDGNELPLNEDGRAAVFDLLENHGTQSFAKIKQHLGLPKTAQFNLERGKAKELKGNVTAQSMRKVFGERWKEFSEGKQNQIIENWRNSEKDEELKREAMEHWGLDEAGANALVNEKAPGDYCSLSLVALGKILPLMRAGKSFKEAETEIYGNRFSGAAVHSIIPVLRPNRKHFRNGTPPPQDPLMASIANGLRNPAVERSITEMRKVVNAIVREYGKPCEIRIELARELKKPRSKRLDETARNRKREAENKALAERMHNECGTPQNPSRNDLEKAKLWVEQQGECPYTGRSLPFSRLFDDNNGFDVDHILPRSRHPDDSYQNKVLCWGDTNRMVKRNQTPYEAFAEQDPENWHQILARVARWKNPGKLRKFEIRSTDDLAEFSSRQLNDTRYTSLLAARLLSTLYGGRDVAENGGKRQIIFASTGSVTATLRRNWGFEQILRNIIPPEPSESTGKPRTDHRHHAIDAIVIALTRNDVIQSMARASALEPWQPGTRSWRHVPQPWCTPDFFRSVEEQVREMLTSHRPEHKVSGELHQGSNYARPYMYKGKSIVHSRTLVSELKVEQIEADDVIVDRAVRDILRAKLKEIGGTLKGSDKVKTFEKPENTPYILTPAGKRIPIRKVRIRETKNPLLVGAGSNERFVASGGIHHVDLFVTRDEKRRETWDSKVIQTTEMYDRFPKHDRRPGRPHTESKNLSRLRQNDDDDESRFLFSLMKSDTIQLEQDGHRQIFKVKKFEATGKMTFIPINNAMPDKLQYSTGAAWSKMPATLKSMSPQKVVVDLLGRVHPAND

SEQ ID NO: 17394 - protein, 1078 aa, unidentified
  REGION 1..1078: note = Cas Enzyme sequence
METPQKYVLGLDLGSASLGWAMIALNHADEPTSLIRSGVRIFEPGVDGTALDIEQGKDQSKAVERRTARLHRRQLRRRAARQRELFQELQKAGLLPTNAAGGGASSEQRHELLNEFDRSLTLKFLKPNDDSFAQKPLYLLRTIALDHALEPFELGRVLFHLSQRRGFKSNRKETKKSAKENEDLGQVKADIHSLELAIQEAGARTIGEYFAGLDPHIEKVRRRWTARKMFEHEFALIWAAQVAHHGSLLTQELHDRVHELLFFQRPISAQKHLVGTCELERGNDKHPPKRRAPWATMAAQRFRMLQKVNDLVVIDTKNQASRKLTEEERGKLYQLLDREGTQSFASIRKYLELKGTTFNLEAGGDKDLPGNRTQKSMRTVFGVFWDEFTEGKQNQIIENWRNSESDELLMQEAMEHLGLDAEAAAVLVKESPQADYCSLSLTAIAKLMPLMMSGRSFKDVETEIYGSRFSGLAVHDTLPPVREALPTLRNPAVERAMTELRKVVNAIVREYGKPYEIRIELARELKKPRQERVKATTANRKREADNKGIAAKILNECGIANPSRADLEKAKLFVECGGICPYTGRSIPFSQLFQDSEFDVEHIIPRSRFPDDSFQNKTLCYLPENREHKRNQTPFEAYSNNPDVWAQILLRVTKWSNPGKLSRFKLQSERELADFSARQMNDTRYTSVLAGRLLAMLYGGRDVETGDSNRQVIFASSGAVTATLRRSWGFERILQAIVSPEPGDTRGKPRTDHRHHAVDAITIALTRQSVIQAMASASAFEPWQPGTRSWRRVPEPWTRPDFIGNLTEQIAQMVVSHRPEHKISGELHKGSNFSRPYLYKGKSTVHTRCELSQLKAADIAADDTIVDKAILGLIRAKFDELGGNPKAFEDPKNLPCFTTANGRKIPIRKVRIRQVKEPKLAGHGDRERFVDSGGIHHVALFVARNDTRQEQWLSEVAQVTDVYQRCPRRDKRIGRPKSIANEPAVSRKLKDNPEAEFLFSLMKDDTVELDYNGAREVFRVKKFYAAGPIWFTGVNNAQMDADQKKNKTTWSKNPNGLKTLHPRKVVVDLLGKVHPAND

SEQ ID NO: 17395 - protein, 1062 aa, unidentified
  REGION 1..1062: note = Cas Enzyme sequence
MSAALEQQKYVLGLDLGSASLGWALIALNDADDPVSLIRAGVRIFEPGVDGTSIEIEQGKDQSKAVERRTARLHRRQLRRRAARQRDLFRVLQRHSLLPAPETLVGSPEEQRHSVLNELDQELAQKWQSTYQGKRFAELPLYYLRKMALDERLEAHEIGRILFHLIQRRGFLSNRRENKQNPDQKKELGQVKAEIHSLEQEIQNAGARTLGEFFAGLDPHAQKVRRRWTARKMFQDEFEKIWEAQKAHRPELLTQELHDKIAHLLFFQRPIAAQTHLIGKCELETGKQRAPWAAMEAQRFRILQKVNDLRLINPGSLISDPLTEEGRQRLYHLLDREGDQTFKAIRKYLSFSAEVQFNLEKGDEKRLRGNRTQAAMRKVFGERWDTIGEGKQHQIIENWRNSESDDVLIREAMEQWSLDAAAATLLSEQTPEPGYCAVSLAAISKLLPLMASGKSFKEAETELYGARFSGGTIFETLPEVRKQLESLRNPAVERSLTELRKVVNAIVREYGKPHEIRIELARELKKPRQERIEATKKNRNRQREREDVAVRILRECGLSNPSRRDIEKARLHEECGGYCPYTGRHIPFSTLFDNSEFDVEHIIPRSRYPDDSFQNKTLCYLPENRDVKKGQTPWEAYGKDEQRWAEIMTRVSSWKNRGKMARFAIQTEEALGDFSARQMNDTRYASVLASRFLGALYGGRDLVDAEKVRQVIFASSGAVTATLRSSWGLEAILREIVPTEPGESRGKPRTDHRHHAIDAITIALTRPKVIQSMALAASLEPWQRDSRAWRKIESPWRDFVLSIRPHIEQMLVSHRPEHKMSGELHKGTNYPPPHNYKGKPTVHTRCALSALSAADIADDEVIVDPAVRDAVRAKLEKLGGNPKLFDRPENVPCLESRDGRFIPIRKVRIREAKKPILVGTGVRERYVASGGIHHIGLFVVRDARRREVWESEVVQITDAYERHREHLPVVCRTHDAEEAAFLFSLMKDDTVELEKDGTRGIYRVKKFEATGKITFVPVNNAMLDKMQYTTGAAWSRMPATLKPMSPRKIVIDLLGKVHPAND

SEQ ID NO: 17396 - protein, 1088 aa, unidentified
  REGION 1..1088: note = Cas Enzyme sequence
MPEIAPSAQPYMLGIDLGSASIGWAVVELDSSGVPTGLLSNGRNGSPSCGVRIFEPAVSGDIEKGQDESNAVARRAARLVRRQLRRRVARQRELFRLLQRHGLLPLYQGMDGDGSQQRHAVLNALDREIVAKWAEAGNGTERIATELPLYMLRKAALDEALTPFELGRVFYHLSQRRGYKSNRKEKAAKTDAPTKVNKKDDLGEVEGDIKDLVQEMSRAGTRTLGEYFASLDPHTQKVRRRWTGRKMYEDEFAKIWESQAGFHPGLLTEELRREIKRLLFYQRPIREQPHLIGGCELEPGERRAAWATLDAQQFRILQKVNDLELVLPGQITGIPLTPDQRLIVLNLLENSADVTFKKIRKALNLADNVGFNLQRGGETKLKGNLTNTHMADVFAKRWPEMSDEEKKQVVEDWRTIPLDDSLIRRAIDFWKLDEPGAKWLAFRSAPSGYCMYSRKATRKLLPLMVAGVRLNAAIKEIYGDRLSGGRVCDRIPPVRNALKTLRNPAIERALTELRKVVNAVVREHGKPTEIRIELARDLKRPRKERAGFVRIIRDREKERNTAKEKLLKECGIHNPSRADVEKALLWEECGGICPYTAQAINFGSLFGQNPQFDVEHIIPFSRIPDDSFQNKTLCYHEENRNVKRNQTPFEAYRDPDQYKAICDRLRAWPKPNLGKLRRFELRTTEELEGFSSRQLNDTRYASKLAGELVGTLYGGRDIPTDGGSRQVIFASSGMVTATLRRGWGLEAILREAASSSNGLNKGKPRTDHRHHAIDAIVIALSRPSIIAAMSRVNSQDPYWPQNGRTVPRICAPWKDFVPSVRPHIERMLVSHRPEHRLAGQLHDETNYGRPRKEGGKEVVHIRKPVPGLSVGDIESIVDPAVRDAVRAKADELGGDLKKWTPNETQNDWPVLKTANGKGIPIKRVRIKKTLVVEAIAKDDRTRYVALSNNHHVAFFALLDERGRETRWDSVPVSLFEAMERKRKALPLIQTTYPKVGDWQFKFSLMGGDTLLLHRDCDHAAGKCIPSAWRLRTIAANGQLSLVRINDARLKADIKKAKDWWSPMADRLRELNAAKVVIDSLGKLHEVQG

SEQ ID NO: 17397 - protein, 1082 aa, unidentified
  REGION 1..1082: note = Cas Enzyme sequence
MSPTLEVAQKYVLGLDLGSASLGWAMIALNQTGEPTSLIRSGVRIFEPGVDGTALDIEQGKDQSKAVERRTARLHRRQLRRRAARQRELFQELQKAGLLPTNANGAGASSEQRHQLLNELDRSLTSKFLKPNDDSFAQKPLYLLRKLALDHALEPFELGRVLFHLSQRRGFKSNRRETKKGAKENEDLGQVKADIHSLELAMQEAGARTIGEYFSGLDPHTEKVRRRWTARKMFEHEFALIWTAQVPHHAPLLTQELHYRVHELLFFQRPISAQKHLVGTCELERGDDKHPPKRRAPWATMAAQRFRMLQKINDLVVIDAKNQTSRKLTEEERGKLYQLLDREGTQSFTSIRKYLDLKGTTFNLEAGGDKDLPGNRTQKTMRKVFGIFWDEFTEGKQNQVIENWRNSESDESLMEEAIVHLGLDTEAAAVLVKESPQADYCSLSLTAITKLLPLMMSGRSFKDAETEIYGSRFSGLAVHETLPPVREALPTLRNPAVERAMTELRKVVNAIVREYGKPYEIRIELARELKKPRQERVKATTANRKREADNKGIAGKILSECGIANPSRTDLEKAKLFVECGGICPYTGRSIPFSQLFQDSEFDVEHIIPRSRYPDDSFQNKTLCYLPENREHKRNQTPFEAYSNNPDVWAQILLRVTKWSNPGKLSRFKIQSESELADFSARQMNDTRYTSVLAARLLAMLYGGRDVESDNGNRQVIFASSGAVTATLRRSWGLERILQAIVSPEPGETRGKPRTDHRHHAVDAITIALTRQSVIQAMANASAFEPWQPGTRSWRRVPEPWTTSDFIRSLTEQIEKMVVSHRPEHKISGELHKGSNFSIPYLYKGKSTVHTRCALSELKPADIAADDAIVDKAVLALIRAKLNEVGGNPKAFEDPNNLPCFTTANGRKIPIRKVRIRQVKEPQVTAKGERERFVDSGGIHHVALFVARNETRQEQWLSEVAQVTDVYQRCPRRDKRSGRPKAIANEPAVSRKLKDNPEAEFLFSLMKDDTVELDYNGAREVFRVKKFYAAGPIWFTGVNNAQMDADQKKNKTTWSKNPNGLKTLNPRKVVVDLLGKVHPAND

SEQ ID NO: 17398 - protein, 1068 aa, unidentified
  REGION 1..1068: note = Cas Enzyme sequence
MDQTAEVAKYTLGLDLGSASIGWALIAPDSSYNPHKLLRAGVRIFEPGVEGSMSEIERGKDESKAIVRRNARLHRRQLRRRAARQRDLFLLLQQKSLLPLAADASANLSDQRHQVLNDLDRELTSKLRQTVEAGSLRAVEQSLPYYLRKSALDRKLSTFEMGRVFYHLIQRRGFKSNRREGKKAKDDDVGKVKAGISELEALMTSAGSRTLGEYFAGLNPHERKIRGRWTARAMYEHEFELIWQTQRTYSPDVLDDDLKPRISRLLFFQRPIAAQEHLIGFCELEKDERRTPWAFLEAQRFRALQKVNDLRVIEHGKLAERSLTDDERNTVFAKLEDEGDQSFAELRKLLGLKKTNFNLELGGEKGLRGNRTNSFMRSVFGVFWDEMPEEEKHKAVTLWYRTESEEKLAQKARERWALDENATKKFVETRPEDGYCSLSLKALRRLLPEMETGISYGEIRPRLYPEARKQPKDLLPLVREAVPSLRNPAVERALTEVRKLVNAIVRQYGKPHEIRIEMARELRKSRKEREESTRQNRTRQRERDEAKVKILKESGIQNPSRSDVEKALLFEECGGICPYTGHSIEFSSLFGDSQFDIEHIIPLSRCPDDSFLNKTLCYHEENRSVKGNHTPWEAYGADEERWAQILARVGKFGNPAKLRRFELRSEEELGEFTARQMNDTRYTTRLAVDLLSTLYGGRDIPRGDGTNRRVIHATTGMVTATLRKSWGLEAILREALPSSNGESKGKPRTDHRHHAIDAIVIALTSQSAVQQMSVAAARAPSWQSGGRSFRGMEAPWPNFVDSIRPHIGSMVVSHRPEHKMSGALHDETNYGRPRLEGKKLVVHTRKLVVSLGKRDIASIVDPVVRRAVEEKFSALGGDLSRCETANDWPLCPTNNGKAVPIRRVRIRKVLNVSTVGKGTGQRFVMPANNHHIEVFAKLDAHGKEVRWDNIVVSLLDAVERKRQQVKVVQRSYRDTDDYIFKFSLMGGDIVQLHKNCDHAAGKCSPSLYRLRTIAANGQLSLISVNDARLKDEIRKVKEWWSPRCDALRKLDCQKVQIDLIGRVHPVND

SEQ ID NO: 17399 - protein, 1068 aa, unidentified; identical to SEQ ID NO: 17398
  REGION 1..1068: note = Cas Enzyme sequence

SEQ ID NO: 17400 - protein, 958 aa, unidentified
  REGION 1..958: note = Cas Enzyme sequence
MTNLAIFLRNIGLFPEIKIEDSGIRHEFLKEYDLANDQPYTLRAKGLDHKLEPYELGRALYHHGQRRGFLSNRKSAPKDTKEEKGIKKEIGELAGDIIKKKARTLGEYFSMTEPISEPIRGRYTSRKMYIDEFEQIWSKQSEFYPDILNEENRKKIFKIIFHQRPLKSQKHLIGECELEPNRFRAPWGILKAQRFRYLQLLCNLTVADDARSTQRPITDEEFELLQQNLELHGDITFAQARRLLGLGRFAKFNLELGGEKRIIGNKISAKLAKIFGEEIWSGFTEDKQNKIAEDLRCINNEDTLKSRGINVWGLNEEGAEKLSQIKLEDGYCRFSRQAIDRLLPMLERRVSLQTAIRELYPERWDNEQDRLDFLPPVSESGLPALRNPIVERTLTELRKVVNSIIAQYGKPNMIRIELARDLKQSGQQREKASRKIRANQRAREKAAKKIIEETGIENPTREDILKVLLAEECNWICPYTRKNISIGSILGDNPQFDIEHIIPFDRSLDDSFLNKTLCDAVENRKVKKNRTPFEAYHGSARWDEIVVRLSDFKSDVKFQKLRRFKMTPEEVQKELEGFTARQLNDTRWASRWAKQYLGLLYSGIKGDGIDAEGKRKVQAVGGPVTAHLRNQWNLNSILSDSDIKGRDDHRHHAVDAVVVGLTDAGSIKKLSGAAVSGYSGRKKFKEIEPPWDGFLEEVRNKIQSVTTSHRLSRRVRGAMHQESFYGKPRKDKDGKTYIHIRKPLESLSKKELKYIVDPVISDAIKTKLKELKQDDPKKAFADIENHPVLSGNHGKKTPIHRVRVRMNLSETFPVGKNHRTRHVLSDSNHHIEIVESTDPENEKINWEGLVVSLFEAYQRKKNGTPIVRREFGVNKKFLFSLANGDIIELDNAEGTARGLFIVRTVPKSKQIKFVPINDARAYKQDMWGGLTAKPDSLRRRRCRKLTVTPLGDVRTAND

SEQ ID NO: 17401 - protein, 1049 aa, unidentified
  REGION 1..1049: note = Cas Enzyme sequence
MALKETVLGLDIGTNSVGWALIEGKQKIKAVGVRVFESGTDGTPDSIAAGKDEPRNQKRRDARLARRHLWRRARRTEKVYRLLSHAGMLPITPSDDPTERNAALNELDNRLHAAHVPPSDPRSAHLLPYILRKKALDERLDPQALGRALYHLAHRRGFLSNRKSLPKKDEDLGKVKSGIQSLREAMNAAGARTLGEYFTTLDPEAARIRTRWTAREMYVQEFERICAAQAPHHPDLLTETFLKQLRKAIFFQRPLKSQKHLIGKCMLEKNSPRAPWPLLSTQYFRLLQKVNDLRIVREEGEIGLSTEERTRLIKELQTEGDLTFPKIKTLLELKRTERFNLEQGDEKKIPGNRTAAKIREVLGARWDELSSVEKPGLVQDLMSIQNNDAFIRRATKRWDISESLARELANTGLEDGHCSLSSKAILRLTPLLEEGLSYAEARKKLYSASSIAAQASDELGRPPLLRNPIVERALNQVKKVVNSIVREYGKPTLVRVELARDLKRPRALRAKLSKANRALEGIRESAKEKILSEAGYRTPRRSDIEKAILWDECGGICPYTGASISFSALFGPESQFDVEHIIPYSRCLDDSFLNKTLCHGKANRNRKKNMSPFEAFSANEDEWNLILGRVRDFKGSAAEQKLRRFKMTSEEIQERFESFTNRHLQDTRYASVEAGRYLGALFGCREDQPGVDAEGVRRIQVSSGQITALLRSEWGLNGVLNDGGEKTRDDHRHHAVDAIVTALADPGVVKHLSDAAANAQQAGRRRFAPLKLPWERLVHDSRDAVAGITASHAPTRKVSGSLHEETLYSPPKRDGEGKDCVHVRKSLSPMLKPKPAEKLIGSIIDPAVRKAVGDHLARHGGDPKKAFSDESDMPFMTTGDGRKVAIRKVRVRVHQRTTMIGKGPRTRFVMTGANSHMEVFESKDAQGHVKWIGRVVSLLDAADRTRRRAPLVDQKWDAARFLFTITGGDCFAMTLDRGEQLFRVRTITTLRQKGREYPQVAFAPINDARTKDEMKKTKSWMVLMLEPMRNRECRKITIDPLGRTRRSRE

SEQ ID NO: 17402 - protein, 1073 aa, unidentified
  REGION 1..1073: note = Cas Enzyme sequence
MDKEQRMSTINEDLCLGLDIGTNSIGWALLDEKANKIMALGSRIFEAGTMAVGKEDDSSAISAGRDKARNAVRREKRMARRQLERRAMRLRTTFLRLQKLGLLPGPVADDSGNRHRILNELDAALVKTHIPQNDLRQAHLLPYLLRAKALDEKLEPHALGRALYHLAQRRGFLSNRRSQPKENEKPGEIKQAIETLNGEIKSNGVRTLGEYFSRLDPEKARIRSRWTSRQMYLDEFEAIWTAQEKYHADLLTDVAKKLIHAAIFTQRPLKSQKNKIGFCELEKGHRRAPWACIEAQQFRMLQRVNDLRIISEEGEIELSPEERQKLIAALESQGDLKFSQIKKELSLSKTTHFNLQNGGEEKIPGNRLTSKIKKIFGQKWDELSSQDKNQIVIDLWSIQSDEALAKRAQKRWGLNEGQAREFARISLEDGYCALSKKAISKILPLLEKGKSYMEARKEVYPGTSMTQPPVETLPAISPSWFKSGAKTATFRNPIVERSLTQMRKVVNALIRTYGKPGVIRVELARDLKKPRKLREKISRDSRSREKERAEMAEKLLKEAGISNPKRSDIEKALLAEECGRLCPYTGKPISWNDLFGPEPQFDIEHIIPFHRSLDDSFMNKTLCHHEENRNIKKGKTPFEAYSQNPDQWAAILARVKNFNKNPKHRATQEKLRRFKMEPQEVQEMFAGFDSRQLNDTRYASSEAARYLGRLYGCREDQPGVDASGKRRVQSSAGQITAWLRDEWDMNKILNDGGTKTREDHRHHAVDAIVTALVKPGTVRALSEAASRAQAARRRRFGALEKPWPTLTEDARDAVSKIVVSHAVSHKVSGAFHDETFYSQIPNKNGETRVHVKKRLENMTTADVEKIVDNAVRKAVEEKLKELGESNPSKAFPNSSDLSRFPSLKTKDGRSIPILGARIRVSGTVMPIGNGFRRRYVMTAGNHHLEVFETKDKKWNGKIVTLLEAADRLRKKTEIIQRDHGEGTKFLFTLANGDIIECEEKENKKELFRIRTILMTKPHGGTPRVEFVHLNDARETKKIKQDKAWFPRILDRLREFNCRKVQINPLGLISSSHE

SEQ ID NO: 17403 - protein, 1051 aa, unidentified
  REGION 1..1051: note = Cas Enzyme sequence
MTHSFSFVKKGVAMKDEDLILGLDLGANSLGWSLIRGQKSLVAWGVRIFKAGLEDMQVDGTGKPPNQERRQARLRRRQVERRARRLAHVARLLQRSKLLPPGDIEAPQQRHSLFSNLDSHLMSDKERLRDLGALDENGLREKLQAGPCYLLRAAALDKPLKPYELGRAVYHLAQRRGFLSSRKALRKDKKEEGKVKKGTTELQKNIQQAGCRTLGEYLYKVAPAERLRERYTSRAMYEEEFETIWKAQAPYHQGILTEELKEKLHHAIFHQRPLKRPQVGTCQLEPGRPRAPWALLSAQRYRFLQRLNDLRIMDDGGQQRKLTPEERQTLIKELERKRELGFERIKKLLSLPQDYSFNLQRGGEERLLGNSTAASLRKIFTPRRWDALSHEDKDRVVEDLLSIEKEETLKRRAVRHWGLTEEAAEELCQLELEKGYCSFSRKALRKLLPLLEQGTSLQEAIKELYPGHKRAQEGRDLLPPVREALSGVRNPVVERSLTELRRVVNALIKRYGKPDIIRIELARELNPAKRRKDIWRRMRQQEKRREEAANKIVQEAGIQNPSRRDIEKYLLAEECNWRCPYTGRGISLSALLGPQPQFDVEHIIPYDRCLDNSFLNKTLCHVEENRRKHDRTPWEAYAHNPERYQEILQRVKTFRGPAAREKLMRFQLHGEELEEFIENFKARQLNDTRYAARLAIQYLGLLYGSPEGIDPEGRRRVQAVPAGQIVAQLRDAWGLSRLLSSSGSKTRDDHRHHAVDALVVALTTPREVKALSEAAKRAKGRGRLLSYMPEPWRGFHDQLAKALQHLVVSHRVCKKLRGALHNETFYSNRVDKEGKFTVKRKPLWELSGSDIERILDKAVRQAVEEKLRSLGIDTKKDKFKKVKALQDNPPVLKNGKPVRRVRFRVNLEVVPIGSGPHVRHVVPGNNHHMEIVLDQRTGKWEGHVVSLLEATKRKKQGLEVVKRDHGEGKKFLFSIAPGEVLEMDTPEGGRGLYRVRTVPQNKQLYFVPIYDARPVKKIGKKGLTAHPDTLREKNCQKVVITPLGEVRYAND

SEQ ID NO: 17404 - protein, 1059 aa, unidentified
  REGION 1..1059: note = Cas Enzyme sequence
MELAMKEDMILGIDLGANSIGWALLRCDPVSKEVTGLIDAGSRIFEAGMNGDISSGRAESRCAERRSARSIRRNLERRRRRMTKLRNLLQEYGLLPSGEDVEKTIHDLDIQVKEYIKKVPYSFKPEDEILAHTYPYFLRALASKQELPPHLLGRAIYHLAQRRGFWSNRKSMAKEKELGQVKQGIKDLETRMSETGAETLGQFFAFINPNETRIRGLWTSRDMYLHEFRMIAEQNTAYLDGIKTQRLEKAIFFQRKLRTQKALIGKCTFEKNRRRCPWYRREAQEFRYLQSVNNLRLITTDGELRSLSEEERSQLLEILSGNTQQLDQYGSITLPRVKKALGLHPKTKFTIEEGGEKTLKGDKTTAKIMSVLGDSWLTFSAENQELLIHDLQCFEKSKPLATRLVAFYKATGEHADKLSETILEDDYCSLSLKAINKLLPLMREGKAYSEAVKEVYPEAFSSTGAVHDHLPALKCFNESLRNPVVERCLNELRQVVNAVIRDYGKPGMIRIELARDVKNTKKAKERAIQENRDREKERQYAEGRIKQEFPGLQVSRDDITKILLAEECGYICPYTGEHISISSLLGRNPRFDIEHIIPRSRSMDNSFLNKTLCLHEENRNVKKNRTPYEAYHGTAKYDEILGRVSRFTGKLAKRKLELFTMTTDEVTGRYEDFSSRQLNDTRYASVEAAAYLGLLYGGVISSLDGKRRVNVLSGGMTSMIRAFHGLNTILNDGGEKSRDDHRHHAVDAIAIGFTSPGMIKHLSDSIRIQEAYGTGTHFRTESVLKLDTWPSMLETSRDKISMILASHHVSKKARGPLHEATFYSKDHRYEVGGKTQIVKHVPVALQNLEKSKIPGIVDKGIREAIERKLDELQIDDPKKAFRNNENLPVLVSKNGNATIPIKKVKIRRTQNTISVGQGKRARSVVSGNNHHMLIYAELDDAGNEVKWVGEVVTLLEAKERQKNGKPVIDNNVGPGRRFKMSIQCGDVFEMDINGQRELVIARSIPQTRQLVFARLNDARLKETIKATGDWFSKVPNTLRTSNPIKYTVDPLGRLRRAND

SEQ ID NO: 17405 - protein, 1059 aa, unidentified
  REGION 1..1059: note = Cas Enzyme sequence
MEQAMKEDMILGIDLGANSIGWALLKCDPISKDVTGLVDAGSRIFEAGMTGDISSGRAESRCVERRNARSVRRNLERRRKRMTTLKNLLQEYGLLPDGESIESIVHDLDMQVKDFIKTIPESHRPENRVLAHTYPYFLRALASIQEIPPHLLGRAIYHLAQRRGFQSNRKTQTDEKELGLVKQGIADLRSRMSETGAKTLGQYFAFVDPSEIRIRGRWTSREMYESEFRLIMGNNPCNLSSSQIKKVEKTIFFQRKLRSQKTLIGECALEKSKRRCPWYRREAQEFRYLQSVNNLKLITIDGELRSLYPEERTVLLDILSGATFQLDKRGDLTLAKAKKALGLPAKTKFTIEDGGEKVLKGDRTTARMVSILGEAWNGFNPEKQASLIQDMSCFEKSEPLKKRLVSHHGISLDMSELLADTTLEPGYCNLSANAIRKLLPLMREGKAYSEAVKEVYPAVFSSTGIVNEFLPSLKNYTKSLRNPVVERCLNELRRVINAVIREYGKPGIIRLELARDVKNTKKVKERMIQENRDREKERHYALNKILEEFSEFNASRDDITKILLAEECGYICPYTGESISISSLIGRNPRFDIEHIIPRSRSMDNSFINKTLCLHEENRNVKKNRTPYEAYHGTAKYDEILGRVSRFKGKLAKRKLELFQMTPDDVTSKYEDFSNRQLNDTRYASLEASAYLGLLYGGVNTSIDGKRRVNVLSGGVTSMVRAFHGLNAILNDGGEKTRKDHRHHAVDAIAIGVTSPGMVKHLSDSIRIQETMGAVTHYRTESVLKMDSWPSMLEDSRHKIAEILASHHVSKRISGALHEATFYSKDHHATINGKVQTFKHIPVELPNLERGKVPFIVDDGVRRAVETKLEQLQIDDPKKAFRNLENLPELISSDGETRIPIKKVKIRRTQNTITVGKGNRQRSVVSGNNHHMLIYAELDDADNEVKWVGEVVTLLEAKERQRRNQPVVNRDLGPGKKFKMTIQCGDVFKMVVGEKRELVIVRTIPQSKQICFARVNDSRLVKDIKSSGDWLSKMPDTLRVSNPTKYTVDPLGRLRRAND

SEQ ID NO: 17406 - protein, 1007 aa, unidentified
  REGION 1..1007: note = Cas Enzyme sequence
RGVSRRQARAARRRLDRRARRCDKLFRILQGAGLLPPGGPPPADGPRTAAERRERRRARSKARNELLTALDVQLLADLTEKLRDEAADEQTLALLPHTLPYALRARALDRPLDPFELGRALYHLGQRRGFLSNRKAPPKEKKEEGAVKEGIARVRQGMADTGARTLGEYFASLDPEDQRIRNRWTARDMYEAEFEAIWAAQAPHHPGVLSAELKKRVHRAIFFQRPLRIRKEFIGACPHEPDHKRAPMALLDAQRFRLLQQVNHTRVQMADGTVRELSDAERTTLVNALDADGDLTFTKAKKLLGVPRNAVFNFEEGDEKRFVGNRTAARLGKVFGHGWSELSPEQQRQVVEDVRSIQKPETLARRAKSAWGLSDQQAADLAQLALEDGYCRLSRQALAKLLPYMEQSLTYQGAVGEVYGHELDTPAVDLLPPVAHAVPDLRNPAVARALTELRKVVNGIVRTYGRPAAIRIELARDLRRSRRQRQRATAKMRDIERDREVARELIRTEAGIQEPRRSDIQKVLLAQECAWTCPYTGKAISMAGLLGPHPQFDVEHIIPFSRSLDNSFLNKTLCEIEENRARKQDRTPHEAYAEADPDRWDQILARVRRFHGSAAREKLRRFQIVDPSFDDFVSQQLNDTRYASRLAIRYLGLLYGPEARSRVQASRGGVTGFLRDEWDLNTILGDGPGKSRDDHRHHAVDAIAIALTERATVKMLSDAAEHARRAGRSRFAPVPLPWSTFLDDVRAAVAAICVSNRVSRRVSGPMHEETFYSPGHSDPDGRPCVHVRKPVEALSRNEIPLIVDDKVREAVEAKLAELGGDLKAFAEPANHPVLAHRNGKSTAIHRVRIRKPIAPFPVGAGHRERHVVTKLNHHVEIVEVHDHKGNPKWEGRLVSQFEAMRRHRAGEPIVRRDHGLDAVFLFSLSPSESVLIAEDGQEFLLRVIGVSQRASGGVEFEFRRNTDARPMTDLRKIKGARVRKSADALRQLAARKIVIDPVGRIRRVGRD

SEQ ID NO: 17407 - protein, 1056 aa, unidentified
  REGION 1..1056: note = Cas Enzyme sequence
MEMSREFSYILGLDLGVASIGWAIVPENEELFHKLKLGVRIFKSAARGKYGAASAKTVEEGRDKPLNQKRRERRASRRLLDRRRRRKISLLRHLQTMGLLPECDYQSCEARNRMFDELDRELRSLNKASEHREEHLLPYILRARGVREPLTHYELGRAIYHLGQRRGFLSNRKVPMKEEDRGKVYSEIEELKEHLQAGCTLAEYFCTTDPEKECIRGRYTSRQMYLDEFQKIWEYQSGIYPEILTEEWKEKIHKTIFYQRPLKSQKDKIGVCRLEKGRKRARMASLGAQQIRYWQKILDLEYQIDDELPQPLREDEQTKLAAALEQKERMTFAEIKKLLKLPKSTKFNLERGGENSLPGNRTGCRIRGVLQERWDTMSPEKQKELADELLQFDKEEACQRRLENMGYAREDAVELSLLLFEEGYSRLSNRAISKILDRMVEKRIQYKTAEEEIYGEDRSDRRKYAFLPPLLKTEGFGDIITNPIVLRTLSEMRKVVNAIIREYGLPKRIVVELARSLKKGRKLRAKESERMNEKKRDRERIRKILVESGIAVPSQTDILKYQLAEECQWQCPYTGRRFTISNLYGPQPEFDIEHILPLSKSLDNSFRNKTLCYWKENRTVKKGNSPYEAYHKDPERYQEVRTWCKVLPPEKQKLFIKEGYDTDFSSRMLNDTAYMSRSALQYLALLYGGIIEPGKDDKKGEQKIYTSNGAITGFLRNEWGMNQILNQSSYEKTRTDHRHHAVDAVVIAFCSSRIKQELSRAAQLSESRKLNRKFISEELPHPRKNFIETVRKAVEEINVSFRCDKQVSGEMHDETFWTKPHVYRDEKGNEVEKRHKKIAVGELTLKKIEAIADGGIRRFILSELEKHGGDLDKLKAAPLVRRTSDGREIPIRHVRCVETANVEKIGKDSSVRYVATDAKHHAEVFAYVDKKGVEKWKVRIVSIWEAYKRQRAGMPVICRNFHEKTENRKKETEYVFKFSLFKDDCLLLNEDDGSQILYRVIAWEEPCRICLQKHTDARSWDDAADTRIRKNLTVLCGKVQKVTVDLLGNIHPAEAE

SEQ ID NO: 17408 - protein, 1044 aa, unidentified
  REGION 1..1044: note = Cas Enzyme sequence
MRVLCQAFIEKIEASKMKNKTVLGFDIGSNSIGWAIVSIGSDGQPEEVVNMGVRIFDAGIQEGTATGAAGPKNRERREARLRRRQYARRRRRKIKLLNILKRSGLFPETDEVAEIIKEMDKQIYLRYRDEVEDTRRLAHSVQYFLRSRALDFKLDKFELGRAIYHLNQRRGFLSNRKTQAKENEGVVKKDISALWREIKESGCRTLGEYLSKLDPEEQRVRARYTHRQMFVDEFNAIWDAQRELGHSQLTDDLKKDIERTIFYQRKLKSVKRRIGKCVLEPEEKRCPWYRFEAQRFRILQNINNLKLIDEDGVERQLTENERAKLIELLEDKEKVTFTEAKKALGLKPRSCRFTIEGGGEKNIRGNRTNAALKDIFGNRWENFTKDQEEQILEDLRSYRKEWALAKRAQSVWQLNEEKAEEFSKIRLEEGYCNLSLQAIRKITPFLEAGKTYPEAVKEVYGSFKLSTPVHDNLPTVDDVIGDLRNPVVHRCLTEVRHCLNPILKRYGKPDLINVELARDVKSTRKEKEQRTKNMRDNERARQNAAAKILKETGISDPSRDDVLKALLAEECNWTCPYTRKSIGWEGLFGPSPEFDIEHIIPLSRSLDDSFINKTLCFHQENVHVKKNRTPYEAYGNDKERYEAIIQSVKRFRGSARSEKLRRFLLTDTSEFENFSARHLNDTRYASKETVKFISRLYGGISDASGKQKIQTVKGLITALMRNYLGLNSILGEGGKTREDHRHHVIDALVVAITSPLIIKRLSTYAGRYGHLGRISFGKESPLGEEVLKQVRDNVERIIPVHRYSKKVRGPLHEETLYGLGVEQGVAHIRRPLVGMKESEVSKIADSTIRRLVNEKLDELGESDPKKAFAKPGNRPVITSRDGRVRTINSARIKTKLATFPVGAGDKKRNVKGGSNHHIEIVAVLDDSGKETEWEGHVVSLFEAYQRKKMKEPVVRREFGEGRRFKFSLAWGELVEMEIEKGKREIFVVRTVFKPMAFARVNDARMKKDIQAAKDWITKLPNPLRAAKCSKVFLTPFGEVRYAND

SEQ ID NO: 17409 - protein, 1027 aa, unidentified
  REGION 1..1027: note = Cas Enzyme sequence
MFTLGLDLGISSVGWALLREDCSKRELVAWGSRIFEPGVEGTENDIAVGKGVSRCAERRLKKALRTQYSRRRRRKKDLLDLLIANGLLPENVDSAFFCRIDNRLLMLMPKEERARLGHVLPYLFRKMALDRVLEKHELGRALYHLAQRRGYLSNRKQELKDQDETGKVKSGINALKQAMAAAGARTLGEYFSMVDPEVERIRSRYTERAMYQDEFRKICQAQRKHISAELEEKLFRAIFSQRKLKSCKGLVGKCRIYPERRRCSMATMEAQLFRIYDTVSKLRITCKSQVRSLTEDERLKAVEVLNGFNDLCNRKGKVALSELQKAVGLGKGEKFSLGDDDKEIYANELHNILYRAFGDKAATVSGQDREKFFNDLRSIEKNEVLHKRLTDYWQLSEEKAAEVSAIALPDKYSAFSLKALQEMLPDMAGGVRLSDWLKLNNHTLAADKEFDRLPLVDDDEVGFELRNPIVHRVLTEMRRVVNSIVERYGKPDKIHVELARDLKATNEERRKIDERNKKREKEREAIAKRIIAETGLEKISRNDILKVMLADECDFTCPYSGERFSMSELLDGGLVHIEHIIPYSRSFDDSFANKTLCVNKLNAQKSNNTPYEAFGNSADYPEMLERVRHFKGVYAERKLELFKLDKVEPSDFMERNLNDTRYASKLAMQYLAMLYGGIVDKNGKRRVYAIAGGCTALIRRAWGGNYLLGEGEKVRDDHRHHAVDAMTIALTTPALVQEVARMTPERRREFEKKTQHFIDSNFYQQAKSMLDDCAVSHHVVNKMRGALHKETIYSKDYSNGGAIRHKRIELKKLTKDHIANIVDPAVKNIILDKLGVANDYEVTNAMLKIFGDEGNYPQMLDRNGNAVNTIKKVRIACGVQTRTIGNGDGKREVATDDNYILAIFAKLNAQGEEIGWVGEVVTLMDAVQKKQRKEPLFEKNRPGMKFKFSLQKGDIVKTIQDGKAQLGVIRAFSSEIRIEYCSITDARIKKDIQAADAWNRQRISTCFKVKMQKYNMNVFGELQIAND

SEQ ID NO: 17410 - protein, 1024 aa, unidentified
  REGION 1..1024: note = Cas Enzyme sequence
MITLGLDLGISSIGWAILSENAAKRELINWGSRIFEPGVEGTENEISAGKGVSRCANRRLKKALRTQYFRRRKRKKDLIDLLIANGLLPENVDSAFFAEIDKKLLMLFPVAERKHIGHVLPYFYRKAALDRVLEKYELGRALYHLAQRRGYLSNRKQELKEQDAAGVVKTRINELKQAISESGARTLGEYFTMVDPEVERIRSRYTERSMYQDEFRKICQTQREHISAELEEKLYKAVFHQLPLKSCKGLIGKCRLYPEHRRCSMEKHEAQLFRIYTSVNNLRITCKNQIRSLTEDERLKVIEILNGYSDIFTKSGKVTLAKLQKAAGLAKGEKFNLGDDEKEIYGNELNNILYRAFGDKAAEMQQAEQDKFFNDLRSIEKSHVLIKRLINYWQISEEKAEDIASIALPDNYCAYSLKALQEMLPDLAAGVTLPQWLKLNNHTQIADKEFELLPLLDDCSFELRNPIVHRVLTEMRRVVNSIVERYGKPDRIHVELARDLKATNKEREQITIRNRKREKERLAIAERIAKEAGLEKISRNDILKVMLADECDFTCPYSGEHFSMSDLLHGGLVHIEHIIPYSRSFDDSFANKTLCINKLNAQKSNNTPYEAFGGSAEYSEMLERVRHFKGPYAERKLELFELQKVEPAEFLERNLNDTRYASKLAMQYLAMLYGGMVDKTGKRRIYAIAGGCTALIRRAWGGNYLLGEGEKVRDDHRHHAIDAMTIALTTPGLVQEVAKMSPERRREFNDATQKFIDSSFYQQAHAMLDDCAVSHHVVNKMRGALHKETIYSKDYSNGENIRHERVELKALTAKDIKQIVDPAIKNIILDKLGVANDYEVTDAMLKIFGDEANYPAMLDRNGNPVNTIKKVRIARTVNTRTVGKGDGKREVANGANYILAIFAKLNEKGEETGWEGEVISLMDAVQKKQRNEPLFEKNRPGMKFKFSLQKGDIVKFTKDGEEILGIIRGVSLPQFYCCPIKDARKVQDLKADHCWFTPTISAAFNWKMQKYNMNVFGELQIAND

SEQ ID NO: 17411 - protein, 1024 aa, unidentified
  REGION 1..1024: note = Cas Enzyme sequence
MITLGLDLGISSIGWAILNETYQKRELIAWGSRIFEAGVEGTDNEISAGKGVSRCAERRLKKALRRQYLRRRNRKNNILDILIENGFLPQDVDSAFFTQIDKKLFDQFPKSEHRRIGHVLPYLWRKMALDQGLEKYELGRAIYHLAQRRGYLSNRKQELKEQETVGAVKSGINELKQAIADSGARTLGEYFCMIDPEVERIRERYTERSMYQEEFRKICQGQRQHIPEDLEKELYDAIFFQNKLKSSKGLVGKCRLYSDRRRCSMAITEAQLFRIYTSVNNLRIVSKNQVRSLTEDERLKVIEVLNSYSDIFNKSGKVALSKLQKAAGLAKGEKFNLGDDEKEIYGNELHNILYRAFGEKASVMSVEEQLKFINDLQSIEKNDVLLKRLIKYWQLDEEKAEDVASIALPDDYCAFSLKALREMLPELENGVNLSDWLKNNNHTLSAEKEFDTLPLLDECDFELRNPIVHRVLTELRRVVNSIVERYGKPDRIHVELARDLKATNKEREAATIRNRKREKERAAVAQRILEETRLEKISRNDILKVMLADECDFTCPYSGVHFSMKELLDGGLVHIEHIIPYSRSFDDSFANKTLCVNKLNAEKGNRTPYEAFGNSPEYAEMLERVKHFKGAYAERKLELFELQEVEPSEFLERNLNDTRYASKLAMQYLAKLYGGIVDKTGKRRVYAIAGGCTALIRRAWGGNYLLGEGEKVRDDHRHHAIDAMTIALTTPALVQEVAKMSTERRKEFEKKTQQFIDSSFYQQASAMLENCAVSHHVVNKMRGALHKETIYSKDYSNGDSIRHERVALDKLSSKDIKQIVDPAIKNIILDKLGVTNDYEVTDSMLKIFGDKANYPSMLDRNGNPVNIIKKVRIARKVQTRTIGKGDGKREVANGANYILAIFAKLNEQGEEIGWEGEVVSLMDAVQRKQRHQPLFEKDRPGMKFKFSLQKGDIVKFTKDGEEILCVIRGISLPQFYCCRISDARMKKEIQAAQCWYQPTPTAAFNWKMQKYNMNVFGELQTAND

SEQ ID NO: 17412 - protein, 1029 aa, unidentified
  REGION 1..1029: note = Cas Enzyme sequence
MGMFTLGLDLGISSVGWALLREDCNTRELVAWGSRIFEPGVEGTENDIAVGKGVSRCAERRLKKALRTQYSRRRRRKKDLLDLLIANGLLPENVDSDFFTEIDNRLLMLMPHAERARLGHVLPYLFRKMALDRVLDKHELGRALYHLAQRRGYLSNRKQDLKDQDETGKVKSGINALKQAMAAAGAQTLGEYFSMVDPEEERIRTRYTERAMYQDEFRKICQAQRKHISEELEAKLFKVIFSQRKLKSCKGLIGKCRVYPERRRCSMATMEAQLFRIYDNVSNLRVVNKGQVRSLTEDERIKAIEVLNGFNDLCNRQGKVALSKLQKAVGLGKGEKFSLGDDDKEIYANELHNILYRAFGDKASTLDEQTKERFFNDLRSIEKNEVLHKRLTDYWQLSEEKAAEVSAIALPDKYSAFSLKALQEMLPDMAGGVRLSDWLKLNNHTFAADKEFDLLPMVDDKECKFELRNPIVHRVLTEMRRVVNSVVERYGKPDRIHVELARDLKATNEERRKIDERNKRREKERQAIAQRIIKETGLEKISRNDILKVMLADECDFTCPYSGKRFSMSELLDGGLVHIEHIIPYSRSFDDSFANKTLCINKLNAQKSNNTPYEAFGNSADYTDMLERVRHFKGVYAERKLELFKLDKVEPSDFMERNLNDTRYASKLAMQYLAMLYGGVVDKTGKRRVFAIAGGCTALIRRAWGGNYLLGEGEKVRDDHRHHAIDAMTIALTTPALIQEVARMTPERRREFSDKTQKFIDSNFYQQAKAMLDNCAVSHHVVNKMRGALHKETIYSKDYSDGQKIRHTRVGLKDLTPEDVKKIVDPAIKNIILDAVGAADEDSVSKEMLKIFGDEANYPQMLDRNGNAVNTIKKVRIARKVQTRTIGNGDGKREVATDANYILAIFAKLNAQGEETGWVGEVVTLMDAVQKKQRKEPLFEKNRPGMKFKFSLQKGDIVKTIQDGKEQLGVIRAFSSEIRIEYCSITDARIKKDIQAADAWNRQRISTCFKVKMQKYNMNVFGELQIAND

SEQ ID NO: 17413 - protein, 1053 aa, unidentified
  REGION 1..1053: note = Cas Enzyme sequence
MNSRVTPWRLGLDIGSSSVGWAALELDIAGDPKGILGLGTRIFSAGVDGDIETGKDESRSVARRGARMQRRQLDRRARRMRNVFSELRRSGLLPGAGHAESEEIHQTLEVLDKELAASWITTGDHRAAQLLPYLLRAAAADRHLKPYEVGRALYHLAQRRGFASNRKESAKQTDDKELGPVKEGIKTLEASLADRTLGQYFSALDPHEHRIRSRWTSRQMYRNEFDRIRTSQEGGPAALDKDAWGRIERAIFHQRPLKSQKGKVGRCEFVIGERRAPKWLPEFQRFRMLSVVNNLRVRTPVEEGAALTPETRRGFSERALTSGERAEVLALLDASASVRLTSLRTKLKLKGTTFNLEEGGEKEIRGNVTGARLRGVFGQRWDAMGDGDRTRVITDVLSMEQDRALERRARETWGLEDDAVAAFVALRLEEGYATLSRLALSRLLPHLEAGLSVQEARQREFPGHFVAGDRAGSLPPVRKSLFHLRNPTVERSLTETRRIVNELIRAYGIPEQVHIELARDIKKSRKDRQDLAKANRNRQGERESAAERLRELGLANPSRADIERALLHEECGGKCPYTGRSIALAELFSKSSPWDVEHIIPFSRSLDDSFANKTLCLAEENRNGKRNRTPFEAYSGDSDRYAQILSRVGQFQGKDARRKLDRFRVKDLGDGLRDEFCSRQLNDTRYASRLACGYLEELYGGASDEDGVRRVFASAGQVTAIVRRELGIEGMLGSPTDGRKNRDDHRHHGLDALAIALTSPGMVKRLADAAEGARSAGRRRFAALPAPWVTFSDEAIARAAEMVVSHRGSRTIRGELHEATNYSRPIGGDPTVRHVRKLVSSFALGGDVEDIVDPAVRQAVQAHIAVRGGDKRCLANSNDPPRLPGKEGAPGTPIRRVRIRAARGSVVPVGVGARQRFVAPGSNHHMAIVALLGPDGNPVKWEGHVVTRLEAARRAARGEPVIQRDWGPGHRFCFSLASGDMVRMALDGCESVFLVRGVSGERLTLAQSTDARPVTLVRKLKQEFKPSVATCMAKFGLRRITVSPSGVITPSNA

SEQ ID NO: 17414 - protein, 1089 aa, unidentified
  REGION 1..1089: note = Cas Enzyme sequence
LNSANVNYRMGIDVGSYSLGMAAIAIDDDGKPTEILSAISLIHDSGVDPDSAKSAATRLATSGIARRTRRLYRRKRKRLAKLDKFISSQGWPLKEFEEYEDPFYPWRVRAELATTAIADQQELGEKLSIALRHIARHRGWRNPYSKVAALYTVAEPSDALVSIQEQCATELGRPIPPTTTVGQLVTSMNLGKTRLRGEDSLLAARPRQSDNANEIHTIAKVQGLSNDLVKQIIDHVFAAESPKGSAAERVGKDPLQPTKKRALKASDAFQRYRIAALIGNLRIRGGKGNRRLTAEETRLVFDYLRNLPAKQEPTWQLVAEQLKIDRGNLMGTAIMTDDGERAGAKPPVHNTNRIMESTKIKPLATWWKSADADARAAMVKALSNAEVDDFDSQAGTQVQEFFFSISDEDQEKLDGLHLPIGRAAYSEDTLDRLTKRMIGEGMDLYEARQAEFKIPNDWAPPAPEIGERVGNPAVDRVLKATARWLNAAERQWGTPKSVNIEHVRAAFMSESSARELDRDNQHRAKRNVKVVAEMQEKLGIEGRPSRADVWRFQSIQRQNGKCAYCGTQISYMNSEMDHIVPQAGEGSTNTRDNLVAVCRECNSSKSNIAFAVWAENTSRTGVSVKEAVERTRHWVTDSGLRKPEFDKFCKQVCDRLRRKATDEPIDARSLESVAWMANELRSRIAQKFKDGDTKVRVYKGALTAEARRASGIAGKLEFVDGKGKSRLDRRHHAVDAAVVAFTSNYVAETLALRSNMKFDQELRRKAPQWREFTGSDHVHQVEWTKWKYRMQALAELLNNALAQDRIVVMHNLRLRLGNGAAHEDTIGKLTRIKVGDAISTTDIDRASSEALWCALTRDPDYDPKTGLPENPNRTIRIHGTHLTASDEITVFPVVAASIPIRDGFAKLGSNYHHVRLFRVPSGKKYKYCLMQVYTVDLLKFRKEDLFTVELKPQTISVRTCEAPLRKALANGTAEYLGWLISDDELFVNISSFDTPGIVKLQEAYGLVNRWRLAGFNSNTQMVLRPLYLSKEGLKPDVDPEIKRIIDNRGWFVTVNKLFSTGHVTVVRRDALGRPRFHSAAHLPICWEVK

SEQ ID NO: 17415 - protein, 1113 aa, unidentified
  REGION 1..1113: note = Cas Enzyme sequence
LTSANVNYRVGIDVGSYSIGMAAIAIDDDGKPTEILSAISLIHDSGVDPDSAKSAATRLATSGIARRTRRLYRRKRKRLAKLDKFISSQGWPLKEFEEYEDPFYPWRVRAELATTPITDKQELGEKLSIALRHIARHRGWRNPYSKVTALYTVAEPSDAFLAIQGECAKKLGRSIPQTTTVGQLVASMNLGKTRLRGKAKLANKANPHGKEAGLFTANKLQQSDYANEIHTIAKVQGFSNELVKQIIDHVFAAESPKGSAAERVGKDPLQPTKKRALKASDAFQRYRIAALIGNLRIRNSKGNRRLTAEDTRLVFDYLRSLPPKQEPTWQLVAEQLKIDRGNLVGTAIMTDDGERAGAKPPVHETNRLMESTKIKPLAVWWKSADADARAAMVKALSNAEVDDFDSQAGAQVQEFFFGISDKDHEELDKLHLPIGRAAYSEDTLVRLTKRMIDEGMDLYEARQAEFKIPNDWAPPAPEIGEQVGNPAVDRVLKATARWLNAAERQWGTPKSVNIEHVRDAFMSESSARKLDQDNQRRAKRNEEIVAKMQEILGIEGRPSRADVWRFQSVERQNCQCAYCGAQISFKNSEMDHIVPRAGEGSTNTRDNLVAVCRECNSSKSNIAFAVWAENTSRTGVSVQKAVERTRHWVTDSGLRESEFKKFRKQVCDRLQRKATDEPIDARSLESVAWMANELRSRIAQKFKDGDTKVRVYNGTLTAKARRASGISGKLEFVDGKGKSRLDRRHHVVDAAVVAFMSNYVAETLALRSNMKFDYELRSGKKSKQKLEHKKPKYKTFTGPTPAHQTEWVKWNIRMQALAELLNNALAQDRIVVMHNLRLRLGNGAAHEDTIGKLTRIKVGDAISTTDIDRASSEALWCALTRDPDFDPKTGLPENPNRTIRIHGTHLTASDEITVFPVTAASIPIRDGFAKLGSNYHHVRLFRVPNGKKYKYCLMQVYTVDLLKFRKEDLFTVELKPQTISVRTCEAPLRKALANGTAEYLEWLVSDDELFVNISSFDTPGIVKLREEYGPVIRWRLAGFNSNTQMVLRPLYLSKEGLKPDVDPEIKKIIDNRGWFITVNKLFSTGHVTVVRRDALGRPRLHSAAHLPICWEVK

SEQ ID NO: 17416 - protein, 1093 aa, unidentified
  REGION 1..1093: note = Cas Enzyme sequence
MAAIAIDDDGKPTEILSTISLIHDSGVDPDSAKSAATRLATSGVARRTRRLYRRKRKRLAKLDKFISSQGWPLKEFEEYEDPFYPWRVRAELATTPITDQQELGEKLSIALRHIARHRGWRNPYSKVTALYAVAEPSDAFLAMQGECAKKLGRSIPQTTTVGQLVASMNLGKTRLRGKAKLANKANPHGKEAGLFTANKLQQSDYANEIHTIAKVQGFSNELVKQIIDHVFAAESPKGSAAERVGKDPLQPTKKRALKASDVFQRYRIAALIGNLRIRDGKENRRLTAEDTKLVFDYLRSMPAKQEPTWQLVAEQLKIDRGNLVGTAIMTDDGERAGAKPPVHETNRLMESTKIKPLAAWWKAADADARAAMVKALSNAEVDDFDSQAGAQVQEFFFSISDKDHEELDKLHLPIGRAAYSEDTLVRLTKRIIDEGMDLYEARQAEFKIPNDWAPPAPEIGEQVGNPAVDRVLKATARWLNAAERQWGTPKSVNIEHVRDAFMSESSARKLDQDNQRRAKRNEEIVAKMQEILGIEGRPSRADVWRFQSVERQNCQCAYCGTQISYKNSEMDHIVPRAGEGSTNTRDNLVAVCRECNSSKSNIAFAVWAENTSRPGVSVQKAVERTRHWVTDAGLRESEFKKFRKQVCDRLRRKATDEPIDARSLESVAWMANELRSRITQKFKDGDTKVRVYSGTLTAKARRASGISGKLEFVDGKGKSRLDRRHHVVDAAVVAFMSNYVAETLALRSNMKFDYELRSGKKSKQKLEHKKPKYKTFTGPTPAHQTEWVKWNIRMQALAELLNNALAQDRIVVMHNLRLRLGNGAAHEDTIGKLTRIKVGDAISTTDIDRASSEALWCALTRDPDFDPKTGLPENPNRTIRIHGTHLTASDEITVFPVTAASIPIRDGFAKLGSNYHHVRLFRVPNGKKYKYCLMQVYTVDLLKFRKEDLFTVELKPQTISVRTCEAPLRKALANGTAEYLGWLVSDDELFVNISSFDTPGIVKLREEYGPVNRWRLAGFNSNTQMVLRPLYLSKEGLKPDVDPEIKKIIDNRGWFITVNKLFSTGHVTVVRRDALGRPRLHSAAHLPICWEVK

SEQ ID NO: 17417 - protein, 1070 aa, unidentified
  REGION 1..1070: note = Cas Enzyme sequence
MAAIAIDDDGKPTEILSAISLIHDSGVDPDSAKSAATRLATSGIARRTRRLYRRKRKRLAKLDKFISSQGWPLKEFEKYEDPFYPWRVRAELATTAITDQQELGEKLSIALRHIARHRGWRNPYSKVTALYTVTEPSDAFLAMQEECAKQLGRTIPETITVGQLVTGMNLGKTRLRGENSLLAARPRQSDNANEIHTIAKVQGLSNELVRQIIDHVFAAESPKGSAAEQVGKDPLQPTKKRALKASDAFQQYRIAALIGNLRIRGGKGNRRLTTEETRLVFDYLRSLPAKQEPTWQLVAEQLKIDRGNLVGTAIMTDDGERAGAKPPVHDTNRIMENTKIKPLATWWKSADADARAAMVKALSNAEVDDFDSQAGAQVQEFFFGISDEDQEKLDGLHLPIGRAAYSEDTLDRLTKRMIGEGMDLYEARQAEFKISNDWAPPAPEIGERVGNPAVDRVLKATARWLNAAERQWGAPKSVNIEHVRAAFMSESSARELDRDNQQRAKRNVKVVAEMQEKLGIEGRPSRADVWRFQSIQRQNGKCAYCGAEISFKNSEMDHIIPQAGEGSTNTRDNLVAVCRECNSSKSNIAFAVWAENTSRPGVSVQKAIERTHHWVTDSGLRKPEFDKFRKQVCDRLRRKATDEPIDARSLESVAWMANELRSRIAQKFKDGDTKVRVYKGALTAEARRASGISGKLEFVDGKGKSRLDRRHHAVDAAVVAFTSNYVAETLALRSNMKFDQELRRKAPQWREFTGSDHVHQVEWTKWKYRMQALAELLNNALVQDRIVVMHNLRLRLGNGAAHEDTIGKLTRLKVGDAISTTDIDRASSEALWCALTRDPDFDPKTGLPENPNRTIRIHGTHLTASDEITVFPVAAASVPIRDGFAKLGGNYHHVRLFRVPSGKKYNYFLMRVYTIDLLKFRKEDLFTVELKPQTISVRKCLPKLREALANGTAEYLGWLVNDDELLIRASSASTEKPIAKLQEHYGATKRWRFAGTDSESKILLRPLQLSAEGLPSDVEKDIREIVEKRGWRISINSLFNGARVTIIRRDALGRPRLYSAAHLPICWEVK

SEQ ID NO: 17418 - protein, 1059 aa, unidentified
  REGION 1..1059: note = Cas Enzyme sequence
AATRLATSGIARRTRRLYRRKRKRLAKLDKFISSQGWPLKEFEEYEDPFYPWRVRAELATTPITDKQELGEKLSIALRHIARHRGWRNPYSKVTALYTVAEPSDAFLAIQGECAKKLGRSIPQTTTVGQLVASMNLGKTRLRGKAKLANKANPHGKEAGLFTANKLQQSDYANEIHTIAKVQGFSNELVKQIIDHVFAAESPKGSAAERVGKDPLQPTKKRALKASDAFQRYRIAALIGNLRIRNSKGNRRLTAEDTRLVFDYLRSLPPKQEPTWQLVAEQLKIDRGNLVGTAIMTDDGERAGAKPPVHETNRLMESTKIKLLATWWKSADADARAAMVKALSNAEVDDFDSQAGAQVQEFFFGISDKDHEELDKLHLPIGRAAYSEDTLVRLTKRMIDEGMDLYEARQAEFKIPNDWAPPAPEIGEQVGNPAVDRVLKATARWLNAAERQWGTPKSVNIEHVRDAFMSESSARKLDQDNQRRAKRNEEIVAKMQEILGIEGRPSRADVWRFQSVERQNCQCAYCGTQISYKNSEMDHIVPRAGEGSTNTRDNLVAVCRECNSSKSNIAFAVWAENTSRPGVSVQKAVERTRHWVTDSGLRESEFKKFRKQVCDRLRRKATDEPIDARSLESVAWMANELRSRITQKFKDGDTKVRVYNGTLTAKARRASGISGKLEFVDGKGKSRLDRRHHVVDAAVVAFMSNYVAETLALRSNMKFDYELRSGKKSKQKLEHKKPKYKTFTGPTPAHQTEWVKWNIRMQALAELLNNALAQDRIVVMHNLRLRLGNGAAHEDTIGKLTRIKVGDAISTTDIDRASSEALWCALTRDPDFDPKTGLPENPNRTIRIHGTHLTASDEITVFPVTAASIPIRDGFAKLGSNYHHVRLFRVPNGKKYKYCLMQVYTVDLLKFRKEDLFTVELKPQTISVRTCEAPLRKALANGTAEYLGWLVSDDELFVNISSFDTPGIVKLREEYGPVNRWRLAGFNSNTQMVLRPLYLSKEGLKPDVDPEIKKIIDNRGWFITVNKLFSTGHVTVVRRDALGRPRLHSAAHLPICWEVK

SEQ ID NO: 17419 - protein, 1089 aa, unidentified
  REGION 1..1089: note = Cas Enzyme sequence
LNSANVNYRVGIDVGSYSLGMAAIAIDDDGKPTEILSAISLIHDSGVDPDSAKSAATRLATSGIARRTRRLYRRKRKRLAKLDKFISSQGWPLKEFEKYEDPFYPWRVRAELATTAITDQQELGEKLSIALRHIARHRGWRNPYSKVTALYTVTEPSDAFLAMQEECAKQLGRTIPETITVGQLVTGMNLGKTRLRGENSLLAARPRQSDNANEIHTIAKVQGLSNKLVRQIIDHVFAAESPKGSAAEQVGKDPLQPTKKRALKASDAFQQYRIAALIGNLRIRGGKGNRRLTTEETRLVFDYLRSLPAKQEPTWQLVAEQLKIDRGNLVGTAIMTDDGERAGAKPPVHDTNRIMENTKIKPLATWWKSADTDARAAMVKALSNAEVDDFDSQAGAQVQEFFFGISDEDQEKLDGLHLPIGRAAYSEDTLDRLTKRMIGEGMDLYEARQAEFKISNDWAPPAPEIGERVGNPAVDRVLKATARWLNAAERQWGAPKSVNIEHVRAAFMSESSARELDRDNQQRAKRNVKVVAEMQEKLGIEGRPSRADVWRFQSIQRQNGKCAYCGAEISFKNSEMDHIIPQAGEGSTNTRDNLVAVCRECNSSKSNIAFAVWAENTSRPGVSVQKAIERTHHWVTDSGLRKPEFDKFRKQVCDRLRRKATDEPIDARSLESVAWMANELRSRIAQKFKDRDTKVRVYKGALTAEARRASGISGKLEFVDGKGKSRLDRRHHAVDAAVVAFMSHYVAETLALRSNMKFDQELRRKAPQWREFTGSDHVHQVEWTKWKYRMQALVELLNNALAQDRIVVMHNLRLRLGNGAAHEDTIGKLTRIKVGDAISTTDIDRASSEALWCALTRDPDFDPKTGLPENPNRTIRIHGTHLTASDEITVFPVTAASIPIRDGFAKLGSNYHHVRLFRVPNGKKYKYCLMQVYTVDLLKFRKEDLFTVELKPQTISVRTCEAPLRKALANGTAEYLGWLVSDDELFVNISSFDTPGIVKLREEYGPVNRWRLAGFNSNTQMVLRPLYLSKEGLKPDVDPEIKKIIDNRGWFVTVNKLFSTGHVTVVRRDTLGRPRLYSAAHLPICWEVK

SEQ ID NO: 17420 - protein, 1070 aa, unidentified
  REGION 1..1070: note = Cas Enzyme sequence
MAAIAIDDDGKPTEILSAISLIHDSGVDPDSAKSAATRLATSGIARRTRRLYRRKRKRLAKLDKFISSQGWPLKEFEEYEDPFYPWRVRAELATTPITDKQELGEKLSIALRHIARHRGWRNPYSKVTALYTVAEPSDALVSIQEQCAAELGRPIPPTTTVGQLVASMNLGKTRLRGEDSLLAARPRQSDNANEIHAIAKVQGLSNDLVKQIIDHVFAAESPKGSAAERVGKDPLQPTKKRALKASDAFQRYRIAALIGNLRIRGGKKNRRLTAEETRLVFDYLRSLPAKQEPTWQLVAEQLKIDRGNLVGTAIMTDDGERAGARPPVHDTNRLMESTKIKPLAAWWKSADTDARAAMVKALSNAEVDDFDSQAGAQVQEFFFSISDKDHEELDKLHLPIGRAAYSEDTLDRLTKRMIGEGMDLYEARQAEFKIPNDWAPPAPEIGERVGNPAVDRVLKATARWLNAAERQWGAPKSINIEHVRAAFMSESSTRELDRDNQQRAKRNVKVVAEMQEKLGIEGRPSRADVWRFQSIQRQNGKCAYCEAQISFKNSEMDHIVPQAGEGSTNTRDNLVAVCHECNSSKSNIAFAVWAENTSRPGVSVQNAVEQTRHWVTDSGLRKPEFDKFRKQVCDRLRRKATDEPIDARSLESVAWMANELRSRIAQKFKDGDTKVRVYKGALTAEARRASGISGKLEFVDGKGKSRLDRRHHAVDAAVVAFTSNYVAETLALRSNMKFDQELRRKAPQWREFTGSDHVHQVEWTKWKYRMQALAELLNNALAQDRIVVMHNLRLRLGNGAAHEDTIGKLTRLKVGDAISTTDIDRASSEALWCALTRDPDFDPKTGLPENPNRTIRIHGTHLTASDEITVFPVAAASVPIRDGFAKLGGNYHHVRLFRVPSGKKYNYFLMRVYTIDLLKFRKEDLFTVELKPQTISVRKCLPKLREALANGTAEYLGWLVNDDELLIRASSASTEKPIAKLQEQYGPTKRWRFAGTDSESKILLRPLQLSAEGLPSDVEKDIREIVEKRGWRISINSLFNGARVTIIRRDALGRPRLYSAAHLPICWEVK

SEQ ID NO: 17421 - protein, 1108 aa, unidentified
  REGION 1..1108: note = Cas Enzyme sequence
MLQPTDLPPSAFFFTKGFALTSATVNYRVGIDVGSYSIGMAAIAIDDDGKPTEILSAISLIHDSGVDPDSTKSAATRLATSGIARRTRRLYRRKRKRLAKLDKFISSQGWPLKEFEEYEDPFYPWRVRAELATTPITDKQELGEKLSIVLRHITRHRGWRNPYSKVTALYAVAEPSDALVSIQEQCATELGRPIPPTTTVGQLIASMNLGKTRLRGEDSLLAARPRQSDNANEIHTIAKVQGLSNELVKQIIDHVFAAESPKGSAAERVGKDPLQPTKKRALKASDAFQRYRIAALIGNLRIRGGKGNRRLTTEETRLVFDYLRSLPAKQEPTWQLVAEQLKIDRGNLVGTAIMTDDGERAGARPPVHETNRLMESTKIKPLATWWKSADADARAAMVKALSNAEVDDFDSQAGAQVQEFFFGISDEEQEKLDGLHLPIGRAAYSEDTLDRLTKRMVDEGMDLYEARQAEFKIPNDWAPPAPEIGEQVGNPAVDRVLKATARWLNAAERQWGAPKSVNIEHVRAAFMSKSSAWELDRDNQHRAKRNVKVVAEMQEKLGIEGRPSRADVWRFQSIQRQNGKCAYCEAQISFKNSEMDHIVPQAGEGSTNTRDNLVAVCRECNSSKSNIAFAVWAENTSRPGVSVKEAVERTRHWVTDSGLRKPEFDKFRKQVCDRLRRKATDEPIDARSLESVAWMANELRSRIAQKFKDGDTKVRVYKGALTAEARRASGISGKLEFVDGKGKSRLDRRHHAVDAAVVAFTSNYVAETLALRSNMKFDQELRRKAPQWREFTGSDHVHQVEWTKWKYRMQALVELLNNALAQDRIVVMHNLRLRLGNGATHEDTIGKLTRIKVGDAISTTDIDRASSEALWCALTRDPDFDPKTGLPENPDRTIRIHGTHLTASDEITVFPAAAASIPIRDGFAKLGSNYHHVRLFRVPNGKKYKYCLMQVYAVDLLKFRKEDLFTVELKPQTISVRTCEAPLRKALANGTAEYLGWLVSDDELFVNISSFDTPGIVKLQEAYGLVNRWRLAGFNSNTQMVLRPLYLSKEGLKPDVDPEIKKIIDNRGWFVTVNKLFSTGHVTVVRRDALGRPRFHSAAHLPICWEVK

SEQ ID NO: 17422 - protein, 1132 aa, unidentified
  REGION 1..1132: note = Cas Enzyme sequence
MLQPTDLPPSAFFFTKGFALTSANVNYRVGIDVGSYSIGMAAIAIDDDGKPTEILSAISLIHDSGVDPDSAKSAATRLATSGVARRTRRLYRRKRKRLAKLDKFISSQGWPLKEFEEYEDLFYPWRVRAELATTPITDKQELGEKLSIALRHIARHRGWRNPYSKVTALYAVTEPSDAYLAMQGECVKKLGRSIPKTITVGQLVASMNLGKTRLRGKEKPPNKANPHGKEAGLFTANKLQQSDYANEIHTITKVQGLSNELVKQIIDHVFAAESPKGSAAERVGKDPLQPTKKRALKASDVFQRYRIAALIGNLRIRDGKENRRLTAEDTKLVFDYLRSMPAKQEPTWQLVAEQLKIDRGNLVGTAIMTDDGERAGAKPPVHETNRLMESTKIKPLAAWWKAADADARAAMVKALSNAEVDDFDSQAGAQVQEFFFSISDKDHEELDKLHLPIGRAAYSEDTLVRLTKRIIDEGMDLYEARQAEFKIPNDWAPPAPEIGEQVGNPAVDRVLKATARWLNAAERQWGTPKSVNIEHVRDAFMSESSARKLDQDNQRRAKRNEEIVAKMQEILGIEGRPSRADVWRFQSVERQNCQCAYCGTQISYKNSEMDHIVPRAGEGSTNTRDNLVAVCRECNSSKSNIAFAVWAENTSRPGVSVQKAVERTRHWVTDAGLRESEFKKFRKQVCDRLRRKATDEPIDARSLESVAWMANELRSRITQKFKDGDTKVRVYNGTLTAKARRASGISGKLEFVDGKGKSRLDRRHHVVDAAVVAFMSNYVAETLALRSNMKFDYELRSGKKSKQKLEHKKPKYKTFTGPTPAHQTEWVKWNIRMQALAELLNNALAQDRIVVMHNLRLRLGNGAAHEDTIGKLTRIKVGDAISTTDIDRASSEALWCALTRDPDFDPKTGLPENPNRTIRIHGTHLTASDEITVFPVTAASIPIRDGFAKLGSNYHHVRLFRVPNGKKYKYCLMQVYTVDLLKFRKEDLFTVELKPQTISVRTCEAPLRKALANGTAEYLGWLVSDDELFVNISSFDTPGIVKLREEYGPVNRWRLAGFNSNTQMVLRPLYLSKEGLKPDVDPEIKKIIDNRGWFITVNKLFSTGHVTVVRRDALGRPRLHSAAHLPICWEVK

SEQ ID NO: 17423 - protein, 1118 aa, unidentified
  REGION 1..1118: note = Cas Enzyme sequence
MLQPNLRVRLSFYPKGTIPVSVPYRVGIDVGTFSLGCSAIEIDENDQPVRILSAVSLIHDSGLDPDQQKRAVTRLASSGVARRTRRLYRRRRHRIIKLEKFLKEQGWETLPFERYSDPYFPWKARVALVNGYVEDPTQRDRYLSVALRHIANHRGWRNPYWKVSSLYSPGGPSEAFEQVRAELESATGHEIPTDSTVGQLISFAQFGKDRLRGGGKQKDKNKPQSEVKQAVISARLHQIDHAREINEICRVQRIDDSLRKRILDLVFAAESPKGAQLGRVGKDPLQPRLDRALKATDAFQRYRIAALTGNLRIQRDGHNERLTHEERLIVFNYLVNLDHKTEASWLGIADILHIDRGQLRGTATMTDDGERAGAKPPVHDTNRTIFGCKVKPLSQWWEGASDDERAAMLKSLSNADVEDPDSPAGAQVHAFFAELDETEHEKLDALHLPIGRAAYSENTLTRLTTRMLDDNVDLYEARLAEFNIDKDWVPPAPRIGEPVGNPAVDRVLKGVARWLEAAADEWGAPKSVVIEHVRDGFVSKAKANEIDRENNARHRRNRKLFQEMQEKLGIDGPVRSSELWRFQSVQRQNCQCAYCGSPITYSTCEMDHIVPRAGEGSTNTRDNLVAVCHRCNLSKKNIPFAAWASKTNIPGVSVKEALERTRHWSEDAGMSAKDFKKFRKSVSDRLKRTTVDEPIDARSMESVAWMANELRGRVAQRFSGQDTKVNVYRGALTAEARRAAGISNKLRFIDGPGKSRLDRRHHSIDAAVVAFTQNYVAETLAIRSNKKREAQLLQAAPQWKEFTGADEAHRSAWNAWLPKMQKLAVLLQAALDEDRIVVTSNIRLRLGNGRAHEDTIGELKKLRVGEAISATDIDRAATEALWCALTREEDFDEKKGLPANPQRRIRVNGTWFEAEDEIEIFPVGAGAIKLRGGYAKLSRFHHARIFKIPGKKKPTYCMLRVYTTDLNKHRHEDLFAVDLKPQTMSVRQAEPKLRKALAAGTAEYLGWIVVDDELIVDTSQFATGQISEMQSEFGQVKRWRVDGFDSNSKLRLRPLQFSAEGLSESVSEGSRKIIDMPGWRSAINKLFSEGKVTVIRRDSLGRVRLNSAAHLPITWKAE

SEQ ID NO: 17424 - protein, 1099 aa, unidentified
  REGION 1..1099: note = Cas Enzyme sequence
LSLSYRVGIDVGTYSLGCTAIEVDDKDQPINILSSVSLIHDSGLDPDQQKRAVTRLASSGVARRTRRLYRRRRRRMIKLEKFLTSQGWETRPFEHYSDPYLPWNARVALVNGYIADDAQRGRYLSIAFRHIANHRGWRNPYWKVSSLYSPDKPSDAFEQIRKELEKSTGRKIPETITVGQLISFAQFGKDRLRGGGKKKDEKKPQEQVNQAVISARLHQIDHAREINEICRVQKIDDTLRKQILDLVFAAESPKGAQIGRVGKDPLQPKLPRALKASDAFQQYRIAALTGNLRIYRDGVSIPLDRDEKLIVFNYLINLSHKEEPSWLKVAEVLNIDRGQLRGTATMTDDGERAGATPPVHDTNRTILGCKVKPLVHWWEGANDDERAAMLKSLSNSEVDDFDSPAGAQVQAFFANLDESEQEKLDSLHLPIGRAAYSEDTLMRLTSRMLDENLDLYEARLAEFDIPKDWAPPAPRIGEPVGNPAVDRVLKGVARWLEAAADEWGAPKSVVIEHVRDGFISKSKANEIDRANNTRHKRNRELFKQMQENLGIDGKLRSSDLWRYQSVQRQNCQCAYCGSPITYTTCEMDHIVPRAGEGSTNTRDNLVAACHRCNLAKKNIPFAVWAAQTNIPGVSVKEALDRTRHWSEDSGMTSKDFKKFRKNVCDRLKRTVVDEPLDARSMESVAWMANELRGRVAQRFQEENTVVNVYRGELTAEARRAAGISDKLRFIDGTGKSRLDRRHHAVDAAVVAFTQNYVAETLAIRSNKKREAQLLQATSQWKEFTGSDAEHRAAWNAWLPKMQKLAVLLQKTLDEDRIAVTSNLRLRLGNGRAHEDTIGELKTIRVGDAISVTDIDRASSEALWCALTRKPDFDENNGLPENPDRRIRIHGTWYTAEDDIEVFPIGAGAIKVRGGYAELSRFHHARIYKIPGKKAPVYCMLRVYNADLAQYRHEDLFSVEIKPQTMSVRQAEPKLRKALAENTAEYLGWLVTDDELVIDTSKFNTGQIAEMQSEFGQVRRWRLDGFYSPSRLRLRPLQMSAEGLSSDASAGSKKIIDAPGWRPSVNKLLSGVNVTVIRRDALGRARLTSNAHLPVSWKAE

SEQ ID NO: 17425 - protein, 1108 aa, unidentified
  REGION 1..1108: note = Cas Enzyme sequence
VNYRVGIDVGSYSIGMAAIAIDDDGKPTKILSAISLIHDSGVDPDSAKSADSRLKTSGIARRTRRLYRRKRKRLAKLDKFISSQGWPLTEFEEYEDPFYPWRVRAELATTAIADQQELGEKLSIALRHIARHRGWRNPYSKVTALYTVTEPSDAFLAMQGECAKQLGHPIPPTTTVGQLVAGMNLGKTRLRGKEKPPNKANPHGKEAGLFTANKLQQSDYANEIHTIAKVQGLSNELVKQIIDHVFAAESPKGSAAERVGKDPLQPTKKRALKASDAFQQYRIAALIGNLRIRDGKGNRRLTAEDTRLVFDYLRSLPAKQEPTWQLVAEQLKIDRGNLVGTAIMTDDGERAGAKPPVHETNRLMESTKIKPLATWWKSADADARAAMVKALSNAEVDDFDSQAGVQVQEFFFGISDKDHEELDKLHLPIGRAAYSEDTLVRLTKRMIDKSMDLYEARQAEFKIPNDWAPPAPEIGERVGNPAVDRVLKATARWLNAAERQWGTPKSVNIEHVRDAFMSESSARKLDQDNQQRAKRNVKVVAEMQEKLGIEGRPSRADVWRFQSVQRQNCQCAYCGTQISFKNSEMDHIVPRAGEGSTNTRDNLVAVCHDCNSSKSNIAFAVWAENTSRPGVSVKEAVERIRHWVTDSGLRKPEFDKFRKQVCDRLRRKATDEPIDARSLESVAWMANELRSRIAQKFKDGETKVRVYNGTLTAKARKASGISGKLEFVDGKGKSRLDRRHHVVDAAVVAFTSNYVAETLALQSNMKFDYELRLNEKSKQELERKKPKYKTFTGPTPAHQAEWVKWKDRMQDLAELLNNALMQDRIVVMHNLRLRLGNGAAHEDTIGKLTRIKVGDAISTTDIDRASSEALWCALTRDPDFDPKTGLPENPNRTIRIHGTHLTASDEITVFPVAAASIPIRDGFAKLGSNYHHVRLFRVPNGKKYKYCLMQVYTVDLLKFRKEDLFTVELKPQTISVRTCEAPLRKALANGTAEYLGWLVSDDELLIDTSSFKTTGIVKLQEEYGQVKRWRLAGLNSVSGMKLRPLYLSKEGLKPNVDPEIKKIVGDRTWIVAVHKLFDTGHVKIIRRDALGRPRFHNAAHLPICWEVK

SEQ ID NO: 17426 - protein, 1080 aa, unidentified
  REGION 1..1080: note = Cas Enzyme sequence
MAAIAIDDDGKPTEILSAISLIHDSGVDPDSAKSAATRLATSGIARRTRRLYRRKRKRLAKLDKFISSQGWPLKEFEEYEDPFYPWRVRAELATTPITDQQELGEKLSIALRHIARHRGWRNPYSKITALYTVAEPSDALVSIQEQCATELGRPIPPTTTVGQLVASMNLGKTRLRGEDSLLAARPRQSDNANEIHAIAKVQGLSNDLVKQIIDHVFAAESPKGSAAERVGKDPLQPTKKRALKASDAFQLYRIAALIGNLRIRGGKKNRRLTAEETRLVFDYLRSLPAKQEPTWQLVAEQLKIDRGNLVGTAIMTDDGERAGAKPPVHETNRLMESTKIKPLATWWKSADADARAAMVKALSNAEVDDFDSQAGAQVQEFFFGISDEDQEKLDGLHLPIGRAAYSEDTLDRLTKRMIGEGMDLYEARQAEFKIPNDWAPPAPEIGERVGNPAVDRVLKATARWLNAAERQWGAPKSVNIEHVRDAFMSESSARKLDQDNQHRAKRNEEIVAEMQEKLGIEGRPSRADVWRFQSVERQNCQCAYCGTQISYKNSEMDHIVPRAGEGSTNTRDNLVAVCRECNSSKSNIAFAVWAENTSRPGVSVQKAVERTRHWVTDSGLRKPEFDKFRKQVCDRLRRKATDEPIDARSLESVAWMANELRSRIAQKFKDGDTKVRVYNGTLTAKARKASGISGKLEFVDGKGKSRLDRRHHVVDAAVVAFMSNYVAETLALRSNMKFDYELRSGKKSKQKLEHKKPKYKTFTGPTPTHQAEWVKWNIRMQALAELLNNALAQDRIVVMHNLRLRLGNGAAHEDTIGKLTRIKVGDAISTTDIDRASSEALWCALTRDPDFDPKTGLPENPNRTIRIHGTHLTASDEITVFPVTAASIPIRDGFAKLGGNYHHVRLFRVPSGKKYNYFLMRVYTIDLLKFRKEDLFTVELKPQTISVRKCSSKLREALANGTAEYLGWLVNDDELLIRASSASTEKPIAKLQEHYGPTKRWRFAGTDSESRILLRPLQLSAEGLPSDVEKDIREIVEKRGWRISINSLFNGARVTIIRRDALGRPRLHSAAHLPICWEVK

SEQ ID NO: 17427 - protein, 1108 aa, unidentified
  REGION 1..1108: note = Cas Enzyme sequence
MLQPTDLPPSAFFFTKGFALNSANVNYRVGIDVGSYSLGMAAIAIDDDGKPTEILSAISLIHDSGVDPDSAKSAATRLATSGIARRTRRLYRRKRKRLAKLDKFISSQGWQLKEFEEYKDPFYPWRVRAELATTTITDQQELGEKLSIALRHIARHRGWRNPYSKVTALYTVTEPSDAFLAMQEECAKKLGRSIPKTITVGQLVASMNLGKTRLRGENSLLAARPRQSDNANEIHTIAKVQGLSNDLVKQIIDHVFAAESPKGSAAERVGKDPLQPTKKRALKASDAFQRYRIAALIGNLRIRGGKGNRRLTAEETRLVFDYLRSLPAKQEPTWQLVAEQLRIDRGNLVGTAIMTDDGERAGAKPPVHDTNRIMESTKIKPLAAWWKSADTDARAAMVKALSNAEVDDFDSQAGAQVQEFFFGISDEDQEKLDGLHLPIGRAAYSEDTLVRLTKRMIDKGMDLYEARQAEFKIPNDWAPPAPEIGERVGNPAVDRVLKATARWLNAAERQWGAPKSVNIEHVRAAFMSESSARELDRDNQQRAKRNVKVVAEMQEKLGIEGRPSRADVWRFQSIQRQNGKCAYCGAQISFKNSEMDHIVPQAGEGSTNTRDNLVAVCRECNSSKSNIAFAVWAENTSRPGVSVQKAIERTHHWVTDSGLRKPEFDKFRKQVCDRLRRKATDEPIDARSLESVAWMANELRSRIAQKFKDGDTKVRVYKGALTAEARRASGISGKLEFVDGKGKSRLDRRHHAVDAAVVAFTSNYVAETLALRSNMKFDQELRRKAPQWREFTGSDHVHQVEWTKWKYRMQALAELLNNALAQDRIVVMHNLRLRLGNGAAHEDTIGKLTRLKVGDAISTTDIDRASSEALWCALTRDPDFDPKTGLPENPNRTIRIHGTHLTASDEITVFPVTAASIPIRDGFAKLGGNYHHVRLFRVPSGKKYKYCLMQVYTVDLLKFRKEDLFTVELKPQTISVRTCEALLRKALANGTAEYLGWLISDDELLIDTSSFDTPGIVKLREEYGPVNRWRLAGLTSVTRLNLRPLYLSKEGLKPNVNPEIKKIIDNRSWIITVNKLFSSGHVKIIRRDALGRPRLHSAAHLPICWEVK

SEQ ID NO: 17428 - protein, 1084 aa, unidentified
  REGION 1..1084: note = Cas Enzyme sequence
MQLTEPQSTAASSYTLGLDLGTASLGWAVVDGLSQRVLDAGVRIFEPAVDATKFERGQEGASKNVARRTARLQRRQFRRRAARHHDLFLELQEAGLLPPTPDPKPADRGEARQAVLGQLDAQLRAAWRERLAELQPACPAPEQTLLYALRARALDARLEPHELGRALYHLAQRRGFKSNRRASKREPGKDGEKEESELKQEMAALEREIQESGSRTLGEFLSRQDPAAARIRGRHAQRRLYEEEFDGIWNRQAEWHAVLTPELRERVHNLIFFQRPIKAPPPGRCELETGCFRAPMASLPAQRFRLLQKVNDLRILDGRGERALTPEQRTTLLAELEKGDVTFGAARKLLGLRGTRFNLESERQDKIEGNRTGAKMLAAFGERWMAFSEAERDRIVELWRQTEDEAELKQVGQQYGLEAEAAEAWARPEAGPEDGYCRLSVEALRKLLPRMEAGAAFKTAETEVYGARFSGGAVRAQLDPVAKVLAHVPNPAVMRSLTELRKVVNAVVRQFGKPHEIRIELARDLKRSARDRDALSRAMSQQQKARGAAKGEIVKELGIQRPSGADIEKALLFEECGGLCPYSGEPIDFRALFETGEFEVEHILPKTRFFDDSFANKTLCHRSMNAQKRDRTPFEAFGHDPEQWEQILERVRKFKRLGAVHRLGKRKGKRAELEPRHPKLGRFLLTRADELESFSNRQLSDTRYASKLAARYLEQLYGGRDVEQADGRKRQAIFASAGPATATLRRAWGLEAILRQPEASANGQSKGKPRTDHRHHAVDAVVIALTSRAAVQQLAASAEASQRQTGVARVSSRTLEAPWPDFVESVRPVIERINVSHRPERKLSGEPHDQTLYGRPRQSGEREWAHVRKSVHTLSEKQIRAADVIVDPRVRDAVRAKLEELGDPKKLEQDPACLVTRRGKRVKILKVRIRVPCEVRKIGAPPRERYVWLRSNHHMGVFAGRDAKGREVWDYIVVSRLDAFERRRSGQPVVQKDLPGQPDFQFLFSLMSGDMVEIEDNDGRRGLFVVRSISKGDFNFARHTCAMLKEDMAKTRHWLRIRSIEKLRQRGCRKVSVDPLGRVREAND

SEQ ID NO: 17429 - protein, 1034 aa, unidentified
  REGION 1..1034: note = Cas Enzyme sequence
ATKFERGQEGASKNVARRTARLQRRQFRRRAARHHDLFLELQGAGLLPPTPDPKPADRGEARQAVLGQLDAQLRATWRERLAELQPACPAPEQTLLYALRARALDVRLEPHELGRALYHLAQRRGFKSNRRASKREPGKDGEKEESELKQEMAALEREIQESGSRTLGEFLSRQDPAAARIRGRHAQRRLYEEEFDGIWNRQAEWHAVLTPELRERVHNLIFFQRPIKAPPPGRCELETGCFRAPMASLPAQRFRLLQKVNDLRILDGRGERALTPEQRTTLLAELEKGDVTFGAARKLLGLRGTRFNLESERQDKIEGNRTGAKMLAAFGERWMAFSEAERDRIVELWRQTEDEAELKQVGQQYGLEAEAAEAWARPEAGPEDGYCRLSVEALRKLLPRMEAGAAFKTAETEVYGARFSGGAVRAQLDPVAKVLAHVPNPAVMRSLTELRKVVNAVVRQFGKPHEIRIELARDLKRSARDRDALSRAMSQQQKARGAAKGEIVKELGIQRPSGADIEKALLFEECGGLCPYSGEPIDFRALFETGEFEVEHILPKTRFFDDSFANKTLCHRSMNAQKRDRTPFEAFGHDPEQWEQILERVRKFKRLGAVHRLGKRKGKRAELEPRHPKLGRFLLTRADELESFSNRQLSDTRYASKLAARYLEQLYGGRDVEQADGRKRQAIFASAGPATATLRRAWGLEAILRQPEASANGQSKGKPRTDHRHHAVDAVVIALTSRAAVQQLAASAEASQRQTGVARVSSRTLEAPWPDFVESVRPVIERINVSHRPERKLSGEPHDQTLYGRPRQSGEREWAHVRKSVHTLSEKQIRAADVIVDPRVRDAVRAKLEELGDPKKLEQDPACLVTRRGKRVKILKVRIRVPCEVRKIGAPPRERYVWLRSNHHMGVFAGRDAKGREVWDYIVVSRLDAFERRRSGQPVVQKDLPGQPDFQFLFSLMSGDMVEIEDNDGRRGLFVVRSISKGDFNFARHTCAMLKEDMAKTRHWLRIRSIEKLRQRGCRKVSVDPLGRVREAND

SEQ ID NO: 17430 - protein, 1084 aa, unidentified
  REGION 1..1084: note = Cas Enzyme sequence
MQLTEPQSTAASSYTLGLDLGTASLGWAVVDGLSQRVLDAGVRIFEPAVDATKFERGQEGASKNVARRTARLQRRQFRRRAARHHDLFLELQGAGLLPPTPDPKPADRGEARQAVLGQLDAQLRATWRERLAELQPACPAPEQTLLYALRARALDVRLEPHELGRALYHLAQRRGFKSNRRASKREPGKDGEKEESELKQEMAALEREIQESGSRTLGEFLSRQDPAAARIRGRHAQRRLYEEEFDGIWNRQAEWHAVLTPELRERVHNLIFFQRPIKAPPPGRCELETGCFRAPMASLPAQRFRLLQKVNDLRILDGRGERALTPEQRTTLLAELEKGDVTFGAARKLLGLRGTRFNLESERQDKIEGNRTGAKMLAAFGERWMAFSEAERDRIVELWRQTEDEAELKQVGQQYGLEAEAAEAWARPEAGPEDGYCRLSVEALRKLLPRMEAGAAFKTAETEVYGARFSGGAVRAQLDPVAKVLAHVPNPAVMRSLTELRKVVNAVVRQFGKPHEIRIELARDLKRSARDRDALSRAMSQQQKARGAAKGEIVKELGIQRPSGADIEKALLFEECGGLCPYSGEPIDFRALFETGEFEVEHILPKTRFFDDSFANKTLCHRSMNAQKRDRTPFEAFGHDPEQWEQILERVRKFKRLGAVHRLGKRKGKRAELEPRHPKLGRFLLTSADELESFSNRQLSDTRYASKLAARYLEQLYGGRDVEQADGRKRQAIFASAGPATATLRRAWGLEAILRQPEASANGQSKGKPRTDHRHHAVDAVVIALTSRAAVQQLAASAEASQRQTGVARVSSRTLEAPWPDFVESVRPVIERINVSHRPERKLSGEPHDQTLYGRPRQSGEREWAHVRKSVHTLSEKQIRAADVIVDPRVRDAVRAKLEELGDPKKLEQDPACLVTRRGKRVKILNVRIRVPCEVRKIGAPPRERYVWLRSNHHMGVFAGRDAKGREVWDYIVVSRLDAFERRRSGQPVVQKDLPGQPDFQFLFSLMSGDMVEIEDNDGRRGLFVVRSISKGDFNFARHTCAMLKEDMAKTRHWLRIRSIEKLRQRGCRKVSVDPLGRVREAND

SEQ ID NO: 17431 - protein, 1061 aa, unidentified
  REGION 1..1061: note = Cas Enzyme sequence
VRVFDPGVTGEVSDIEAGKDEARGKERRDARQARRQCWRRAWRMKRLFRELQAAALLPPTLPGEHPDEPTSRYATIERLDAELRERWLNAGSAASPAPAGAGAAAQPAQATVAAPSQVLPYLLRARALDQRLEPFEIGRAIYHLAQRRGFLSNRLAAPKDDEKESEVYSGISALAAKMQEANARTLGEYFSRLDPREERIRDRWTARRMYEREFDLIWAPQAAHHPQLLTARLCKRLRRLVFYQRALKSASGLIGQCELEKGQRRAPWACLEAQRFRLVQSVNNLRVTSQGSRELTPDERSRLLAALEGRKDMTFEAVGKLVGLRGERFNLEAGGEKKLKGNRTAALMTACFGDRWQTFADQDRARIVGEWCNIGNSEKLVSRLVGVWGAAEPQARKLAGERPPKGHCHLSRQALRRLLPLMERGMPYMTAVDEVYGVRYSGGQVYGQLPPVREILPQLRNPAVARGLTEFRKVVNAIVREHGKPAEIRIELGRDLRRPREQRKRIWKESRAREDERDRARRLLESEIGIPKPTRGDIEKFLLWEECGHFCPYTGQPISREALFVEPQFQVEHILPLSRFPDDSFQNKTLCYHEENARKRNRTPFEAYGADPEWPRILERVKNFNNHEKLRRFQMQETDAGQMLEQFSSRQLNDTRYGSRVAADYVGALYGGRDVADPAMPDGKQRRVVFTSTGQVTAILRREWRLGAILPPPPNVTNPAEKARHDHRQHAIDAVVTALATPAWVKRLSDRAAGNLRQWGRASFRGLEGPWPDFVDAVRESVLSINVSHRAEHKVSGQLHEETNYGKPYERTEGGKASVCSNVRKPLSGITRAQIACIVDPAVRQAVERRLQELGDDLKKLQSSGTPRGPEASDALEPPFLVARDGRRIPIYKVRIRQVLSTEKLGQGSRERHVALGNNHHAEIVAELDESGEEGRWEAVVVSRFEAAARLEDMRRKRSGLPVVQRDHGSSRVFKFSLMNGDTVEMADGERRALFIVHKISRFATGQVEFAFCRATDARRVKQIQEGKGVDWPRPGPDGLRKLGCVKVSVDALGRVRPAND

SEQ ID NO: 17432 - protein, 1097 aa, unidentified
  REGION 1..1097: note = Cas Enzyme sequence
MDSTDESVPYILGIDLGSASIGWAVLTRPAAGENALLTNGVRVFDPGVTGEIGDIEAGKDEARGKARRQARQSRRQTWRRAWRMKKLFRELQSAGLLPLTAPGEHQDEATARYATIEALDGELRARWLAPQPLAVPGSANGAGAAPALQPAPAPEHVLPYLLRARALDMRLEPFEIGRALYHLAQRRGFLSNRLTAPKEDEEEGQVREGISSLEEEMRQAQARTLGEYFSRLDPTEERIRRRWTARSMYEGEFDLIWKAQAVHHPQLLTPQLRKRLHSAIFYQRPLKSASALIGECEFEKGRRRAPWACLEAQRFRLLQKVNDLEVVTQGQRHLTGDERAALLAALETRADMKFAEIRRLLGLKNQRFNLEAGGEKKLKGNLTAAVMTRCFGERWETFKDEERARIVEEWRTIEKPETLVRRLVDVWGAPEPPARQLSGERAPNGYCHLSRKALRKLLPLMEEGVQYMAAVDKVYGTSFSGGLVSDRLPPVRELLPQLRNPAVGRALTELRKVVNAIVHEYGKPAEIRIELGRDLRRPREERARIWRENRSRQDERERVRSILREEVGVPQPSRDDIDKYLLWQECGNFCPYTGRPISREALFGAAPQFQIEHILPLSRFPDDSFQNKTLCYHEENARKKNRTPFEAYGADPDNWARLLERVGKFKNREKLRRFEMQQTETEALLQQFSSRQLNDTRYSAKVAAQYLGALYGGRDVADPATPTGSRRVVFTSTGQVTATLRREWRLNGILPAPAGLTEPAEKARHDHRQHAIDAIVTALATPAWVKRLSDRAAGNQRQSGRASFRGLEGPWPNFADSVREAVLSITVSHRPEHKLSGQLHEETNYGRPYKHIEKGRETDRANVRKPLSAIKPGEIARIVDPAVREAVERRLEGLGGDLKKLQLAATPPRHRPAGAAPEPPPFLKARDGREIPIFKVRVWQALTPQKVGEGSRERQVALANNHHAEIFALLDEQGQEQRWDAVVVSRLEAMRRKRSGQPLVQRDQGPSCLFKFSLMLGDTVQIEDEGHRTLFVVRKISESGKGRIEFAFARATDARRAKDIKLGKGRDWPRPSPDGLRKLGCAKVSVDPLGRVRPAND

SEQ ID NO: 17433 - protein, 985 aa, unidentified
  REGION 1..985: note = Cas Enzyme sequence
WRVRAELATTPITDQQELGEKLSIALRHIARHRGWRNPYSKITALYTVAEPSDALVSIQEQCAAELGRPIPPTTTVGQLVASMNLGKTRLRGEDSLLAARPRQSDNANEIHTIAKVQGLSNKLVKQIIDHVFAAESPKGSAAERVGKDPLQPTKKRALKASDAFQLYRIAALIGNLRIRGGKKNRRLTAEETKLVFDYLRSLPAKQEPTWQLVAEQLKIDRGNLVGTAIMTDDGERAGAKPPVHETNRLMESTRIKPLATWWKSADADAQAAMVKALSNAEVDDFDSQAGAQVQEFFFGISDEDQEKLDGLHLPIGRAAYSEDTLDRLTKRMIGEGMDLYEARQAEFKIPNDWAPPAPEIGERVGNPAVDRVLKATARWLNAAERQWGAPKSVNIEHVRAAFMSESSARELDRDNQQRAKRNVKVVAEMQEKLGIEGRPSRADVWRFQSIQRQNGKCAYCGAQISFKNSEMDHIVPQAGEGSTNTRDNLVAVCRECNSSKSNIAFAVWAENTSRPGVSVQKAVERTRHWVTDSGLRKPEFDKFRKQVCDRLRRKATDEPIDARSLESVAWMANELCSRIAQKFKDGDTKVRVYKGALTAEARRASGIAGKLEFVDGKGKSRLDRRHHAVDAAVVAFMSHYVAETLALRSNMKFDQELRRKAPQWREFTGSDHVHQVEWTKWKYRMQALAELLNNALAQDRIVVMHNLRLRLGNGAAHEDTIGKLTRIKVGDAISTTDIDRASSEALWCALTRDPDFDPKTGLPENPNRTIRIHGTHLTASDEITVFPVAAASVPIRDGFAKLGGNYHHVRLFRVPSGKKYNYFLMRVYTIDLLKFRKEDLFTVELKPQTISVRKCLPKLREALANGTAEYLGWLVNDDELLIRASSASTEKPIAKLQEHYGATKRWRFAGTDSESKILLRPLQLSAEGLPSDVEKDIREIVEKRGWRISINSLFNGARVTIIRRDALGRPRLYSAAHLPICWEVK

SEQ ID NO: 17434 - protein, 1111 aa, unidentified
  REGION 1..1111: note = Cas Enzyme sequence
VDHLEVHVSDSAGGHVSEIPEYLLGIDLGVLSLGWAAVKLQDGRPIGLLDAGVRAWDLQNIAESDIAVGKEEPPSQTRRQMRQMRRQLFRRAQRLRRTWRALQQLGLFPPGSRHCAARKAFLDQLDGQAKAWLYQHRFGSADPPPHWEDTWIYHLRAAALDQPLPPELLGRVFFHLAQRRGFQSTAKTRSGGEQKDGEDRKNKKNKKGKKSEKSERERIRAAISQLQQAMQTSGARTLGEYFARLDPHQERIRGRWTSRRIYKEEFEAIWAAQAPFHPEWTAADKDRLFRALFFQRPLKSQRGLVGLCPLESKVLPPAQPGQKAKVLYRHRRAPLASLEAQRIRYMQRINDLEIIAPDGTHWVLRDPAYQLMRSKLYDLAEHHEELTFPAIRKALGIPTGKKGEDWKFNLEAGGEKKLPGNTTAARIRRILGDQRWDSLGPDGQKQLVDTLLAFLSEEALQQHLEAHWHLDPPTAQALAHLELEPGYHSYSRRAIRKLLPLLEQGLRLNEARRKLYPQKEADAGGWDRLPPVCQVLPQVRNPLLVRALTELRKVVNALLHKYGKPVQIRIELARDIKRSRREREALSRRMRKQEDSRKKAAQIAREHLGREPSPFEITKVLLAEECNWKCPYTGREKIELAALLGPEPQFDVEHIWPFDRSLDDSFANKTLCYHEENRLRKSNRTPWEAYGSDPHRWGEIIARVKQFKGEWAKEKLRRFLAQELPEDFPQRHLSDTRWISRTAADYLGLLYGGRIDPTGKQRIQTTAGRLTALLRRAWDLDSILGPGTEKNRADHRQHAIDAVVIALTDPAVVHRLSRWASHRPSWVRITPQLDSPWPGFFDQVKHRILSILVSFRQHRRLSGPLHDQTFYAPPVPSPEDPKKLRTKVRKKLSELSDNAVEDIVDPEVRRLVQEKLQALSQHDPKLADPKKAFASPENLPYLRSRRTGQIIPIKSVRIWVTAHLEKIGSGMRQRYVIPGTNHHLEIFAHLDAQGNETRWDGHVVSLLEAVRRKRLGQPVVCRDHGPNTRFKFTLAKGDYIQWTDDQGQPQILRVIGISHNNIEFRLPSDARPITIIKQEKQRIRARYQTLFQRRARKVAVSPLGEVYPAGD

SEQ ID NO: 17435 - protein, 1043 aa, unidentified
  REGION 1..1043: note = Cas Enzyme sequence
MSSHHLVLGLDIGPNSLGWALLDEEGKRIVSAGVRVFEAGLDSLEKDGKGESRNLERRSARLIRRQLERRSRRLAKTAHVLQAAGLLPQGDTSTAEARHRFFEALDAQMDSPYGLRARALDEKLEPYELGRALYHLAQRRGFLSNRRESSRAKDDEDEGIVKEGISRLQAEIESGCFRSLGEYFATLKRQEQRIRSRYTSRKMYQDEFALIWQAQKKHYPAVLTDELRESVHHAIFHQRPLKSAKHLVGKCELEKGRRRAPWALLDAQRFRYLQRVNDLELTQPDERPLTPDERQKLLDYLELYGDMTFGKARELLDFKSRGKGAVKFNLEAGGEKNLPGNRTASKLAKVFGEKRWAGMSAEERNAVVEDMLSIVKPEALKRRAMKHWGLDEAAADELCAVKLEGDYCNFSRKALRKLLPLLEQGLRLNKAVKQLYPDRWAYAGKPVDELPPLRKCEDPYLSEMRNPIVMRSLTEVRRVVNAIVAKHGKPAEIHIEMARQLRQSSRQRAETTKRIRFNEKKRKDACEKIAQEAGITEPTQTDILKVLLADECGWICPYTGKNISVIDLVGPHPQFDIEHIIPYERCLDDSFANKTLCEAEENREVKRNRTPYEAYHGTDRWDQIIHRVKGFKSHSAKGKLFRFTADEKEVGEFIDRFTNRQMNDTRYSSKVAKKYLGLLYGGVDDDGIDANRKRCVQATSGGVTAVLRRAWGLNSILGGGEKTRDDHRHHAVDAIAIALTDPAKVKALNNAAVDTMERMRRARSVKLPEPWDGFLEEARTKIRGITVSHRVDRRVRGPLHQETFYSPPKLDENGKKLVRVRKPLNAIGARDVASIVDPAVRAAVESRLRQLGETDPKKAFKDAANLPRHKNGHRIKSVRLVRPGEAVLPVGQGHRTRWVMPDRNHHMEIVEVVVKDKKGNIKRDKDGNPEVKWEGHVVSMLEAYQRLGRKEPVVKRDWGEGKKFLFSLACRDIIQLVKEEKPELFVIRSIDAARNTWFVPINDARPRTGLSWAGLKASTNTLRDWHCRKVAVNPIGEVHYQND

SEQ ID NO: 17436 - protein, 1043 aa, unidentified
  REGION 1..1043: note = Cas Enzyme sequence
MSSHHLVLGLDIGPNSLGWALLDEEGKRIVSAGVRVFEAGLDSLEKDGKGESRNLERRSARLIRRQLERRSRRLAKTAHVLQAAGLLPQGDTSTAEARHRFFEALDAQMDSPYGLRARALDEKLEPYELGRALYHLAQRRGFLSNRRESSRTKDDEDEGIVKEGISRLQAEIESGCFRSLGEYFATLKRQEQRIRSRYTSRKMYQDEFALIWQAQKKHYPAVLTDELRESVHHAIFHQRPLKSAKHLVGKCELEKGRRRAPWALLDAQRFRYLQRVNDLELTQPDERPLTPDERQKLLDYLELYGDMTFGKARELLDFKSRGKGAVKFNLEAGGEKNLPGNRTASKLAKVFGEKRWAGMSAEERNAVVEDMLSIVKPEALKRRAMKHWGLDEAAADELCAVKLEGDYCNFSRKALRKLLPLLEQGLRLNKAVKQLYPDKWAYAGKPVDELPPLRKCEDPYLSEMRNPIVMRSLTEVRRVVNAIVAKHGKPAEIHIEMARQLRQSSRQRAETTKRIRFNEKKRKDACEKIAQEAGITEPTQTDILKVLLADECGWICPYTGKNISVIDLVGPHPQFDIEHIIPYERCLDDSFANKTLCEAEENREVKRNRTPYEAYHGTDRWDQIIHRVKGFKSHSAKGKLFRFTADEKEVGEFIDRFTNRQMNDTRYSSKVAKKYLGLLYGGVDDDGIDANRKRCVQATSGGVTAVLRRAWGLNSILGGGEKTRDDHRHHAVDAIAIALTDPAKVKALNNAAVDTMERMRRARSVKLPEPWDGFLEEARTKIRGITVSHRVDRRVRGPLHQETFYSPPKLDENGKKLVRVRKPLNAIGARDVASIVDPAVRAAVESRLRQLGETDPKKAFKDAANLPRHKNGHRIKSVRLVRPGEAVLPVGQGHRTRWVMPDRNHHMEIVEVVVKDKKGNIKRDKDGNPEVKWEGHVVSMLEAYQRLGRKEPVVKRDWGEGKKFLFSLACRDIIQLVKEEKPELFVIRSIDAARNTWFVPINDARPRTGLSWAGLKASTNTLRDWHCRKVAVNPIGEVHYQND

SEQ ID NO: 17437 - protein, 1250 aa, unidentified
  REGION 1..1250: note = Cas Enzyme sequence
MVKKILGIDLGVASIGWALIKEDEENCQNNEILAMGVRIVPIDSTDVQDYSKGTGETPSHKRTVKRGMRRMYARYVMRRKNLTRKLIQLEMFDSSLFELDKMSLWQLRAKAVNEQIGLKEIGRVLYHLVQKRGYKSNRRQSSKEREDSNYLQEVKGRHQHIRDLGLTIGQYFFHELSQNPFFRIKEKVFPREAYEEEFWAIINRQKVYYPQVLNEQVIQDLYQIIYYQRPLRSQKGLVKICEFEGKWIVRNGRELFIGPKVAPRSSPLFQIEKIWESIHNIRLKNKYGEEYQLTQTDKQKIFEYLNVNDKLTGPKLLELLGLSKNDGWYYNKSVEKGIQGNLTLTRIKKALTGYPMTDDLLKFELVIEDKENEGLLVDSDTGEILQTVRKKEISPAIEKEPLYQLWHLLYSIHEHEECVNALIKKFNLPEDVANRLADLDMTAGGYSSKSNKMMRRILPYLMEGYDFAHACQIAGYNHSNSLTVDENLARRLKDKITLLPKNSLRQPIVEKVLNQLISIVNEIIDEHNGLVTREERITNRFEIRIELARELKQNRQDRADTWKRQNRIEQENKRYIEELDGLGIKFSRSNIIKMRLFNETSVDENGRVNAYCLYCGKMFGKHQALAGNEVDVDHIIPRSLVYDDSQQNKILVHRSCNASKGDMTAYDFMASKGEDALEEYIARVDLLYKNKAITKGKRDRLLLGQSKITGDFIQRQLNETRYVARKAREILYSVCYNVRPTPGILTSRLRHLWGWDKVLLDLQIERFKYLVDNKLSEASEENYSQILEEIEKEYSKRVDHRHHAIDALTIACTRQGFVQRLSTLHAQVTRDELFRIINQDETSSIEDLNIEISERLNLLDKYFVASRPFTTKQVKEKAAGILVSYKPGKKVAVKGRNIVHLPDGKIYVQKGIIVPRGALSEESVYGKIKFHDSPKPLKYLLEHPDLIVNPIIRERVVQFIEKHKDVPVKEYPKILKKEPILLPSGQPLQEALCYAEDFVIRKPLDANNFKELKDFDIIVDKALIELIKRRVAEKGNIKEALAQGIYMDEEKLRPIRSVRVFTGLNAVVPVKYDSEGRPVGYVKPGNNHHVAIYQDSEGNLVEHVCTFWHAVERYKYGLPVIIDDTSQLWDSILTSSQVYPQTFLDQLPESGLRLKMSMQINEYFLMFLEPEKAKEAIQNDDYPLLSKHLYRVFSLSSHDYNFSYQYNTFIPRNKFDRINFKSIRIQSIKSLFDALPIKITVDLLGRLKQV

SEQ ID NO: 17438 - protein, 1223 aa, unidentified
  REGION 1..1223: note = Cas Enzyme sequence
MRNPNSKLVLGLDLGVASIGWALVQQSPDPSIDPTILGMGVRVIPLSIEEKDEFSAGSKQSKNANRRIKRGIRRNLQRFTLRKHRLVRLLTDHHMLPSPELFALGRQQLWDLRARAARERIDLTEFGRVLFHINQKRGFKSNRKTDPLDDAAEAGKAPKEALRYTEKIQARQQTLEASGLSIGAYFAAQLREHPHAKMREAIYPRAAYIAEFDLLWATQARHYPHVLTEELRTAIRDRTIFHQRPLKSAKGLVNGCRYEKRPYKDAKSGKWIPNAIPAAPISSPLYQEFRIWQELANVRIVWKDGRPEEPLTPAQKQQLYTQLSTSAYITATDFLKTVLGKSAKLAKWNRLGERLPGNKTLAQIRKALLEVPGHIDQYGTLDLTQTQTFLAKVPADDPASTERVLVQREEVIPAIEKEPAYQLWNLLYSAEDNEVLARKLVHMGFPTATAQQLTKVKLEDGYGTLSTKALRRILPCLRQGMTYDAACATVGYQHSDYEGKDEILEKLAERLAPIHKGELRNPVVERILNQCVNVVNAILETYGHPDEIHVELARELKQNAKQRERASRENNARDRENKKIAALIEEQLPFQRVTREDIEKYRLWEEMGKISPYEPNRPISIQELFGGDVDIEHIIPRSRLFDDSFQNKTIARRGPNRDKGNRTGYDYMQSLGEQALHDYLEFIQGRLTAKGGISPQKAKILKMKQADIPTDFVARQIKETQYISKEALTRMRPLVRQKTDLLATSGGITAFLRHHWGLDDLLKALVWDKYAKLGKTKERKDKTDKRITYIQGWSKRDDHRHHALDALVVAMTSRSLIQRLNTLNADADARFQAKEDKWKPKAPWSNAFVGQLTQAMQGIIISLKPGKRDAVRSKNRYKRGKHMAEQMTWTPRGELHKETVYGINYSQTPTMVKLDGKIDPEGIVDPRIRARVLDHIARHGGHAPTALDDLKRHPIWLDEAAKIPLKEVYYRQPRTVKRSHLRDLKAKDIPDVVDARVRAILQARITSHGEAKTFDNLEQDPVWFNEAAGIKIERVRVYERPSVDSVRKIRRGYVALGNNHHAALYRDAQGKLQEHLCTFWDAVARRKAGISPIVRDPQATFDAVVTRPELAETVLRYLPDPSWTFVQSYAQNELFLICPDEAQAEALLATKDLKAMSPWVFRVQKITAGDYFFRHHLETSVAKNEELKEAAVTGRTKRITAIANFPRIKLRFNLLGHLIDPQP

SEQ ID NO: 17439 - protein, 1509 aa, unidentified
  REGION 1..1509: note = Cas Enzyme sequence
MKKTLGLDLGTNSIGWAVINSNIDSEGKEKLVGISSCGSRIIPMDAATLGDFGKGNTKSPVAERTRLRGIRRLLERSLLRRERLHRILSVMGFLPEHYASQLDRYGKFLPETEPKLAWYKDDSGRYQFLFQKSFHEMLEDFRQHQPELVAGEKKIPYDWTIYYLRKKALSQEITKEELAWILLNFNQKRGYYQLRGEEEQEENNKSVEYHALKVVSVEDSGERKGKDIWYNVTLENGWVYRRASNIPLDWTGKVKEFVVTTELDDAGNPKKNKEGVIKSSLSMLKEDDWGLLKTRTQAQIDESGKTVGTYIYESLLCMPNQKIRGKLVRTIERKYYKDELRQILVKQSEFHAALQDHNLLLSCIEELYPNNEAHRRLLSASSFIYFLIEDILFYQRPLKSQKGLIDNCPYESHIYKDKKDGSLHHVPLKCVSKSHPLFQEFRLWQFLSNLRIYQRERMMDGSLKLDVDVTREFLPSEEDYVKLFDWLNERKEISQKLLLAYRPFGLKKNEQANYRWNYVEDKSYPCNETRAEIKSRLSKAGVPEEFLTAEKEEALWHILYSISDKKELTKALGTFAAKNCLNESFVEVFAKIPPFESNYAAYSLKAIRKLLALMRMGKYWNEQAIDRQTRDRIEKILTGEYDETIRSRVREKAMLLTDISSFRGLPLWLACYIVYDRHSESKELVKWETPADIDHFLSKFKQNSLRNPIVEQVITESLRTVRDIWKQEGKIDEIHVELGREMKNPAKERARITAQVQENENTNLRIKALLAEFMNPEFEIENVHPYSPGQQEILRIYEDGVLSGIAEKDLPDDITAILKKFRENDVKKRPTTSEVLRYKLWLEQRYRSPYTGRVIPLGKLFTPAYEIEHVIPQSRYFDDSISNKVICESAVNKLKDNCLGYEFIKKHSGEMVELGNGETVPVFSVEEYERFVKESYFGNSKKMKKLLLEDIPDSFIERQLNDSRYISRVVTSLLSNLVCEEGEQDGLSKNVIVCTGGITDRLKKDWGVQEVWNRIILPRFLRLNEITGRTDFTSTSVNGHLLPALPLYLQKGFNKKRIDHRHHAMDAIVIACANRNIVNYLNNSSARKNSEISRYDLQRLLCEKVKTDANGNYKWILRKPWETFTQDVYAALTNIVVSFKQNLRVINRTTNYYQHYNEAGEKRMIPQTKGDRWAIRKPMHKDTVYGEVNLRKEKTLPLRDVVKNPSIVVDKSLKNKLYELLKSQYDLKAIAKYFEIHQDVWADVNLKKIKVYYFTKETNERFFATRKSLDPSFDQKKIEEEVTDTGVQKILLHHLQQNNNDPDMAFSPDGIDRMNQNMTILNDGKWHQPIYKVRTYEKADKFAVGESGNKAKKFVEAAKGTNLFFAVYESVQEDEAIGKQVCKRTFATIPLNEVIKRKKQGLPAAPEDLNGNLPKFVLSPNDLVYLPTEEERNSSRIIQPLDRERIYKMVSSSGSQCFFIKVFVANSIWDKNEYSSLNKMERAITNEMIKEICVPIKIDRLGNVSLIQI

SEQ ID NO: 17440 - protein, 1509 aa, unidentified
  REGION 1..1509: note = Cas Enzyme sequence
MKKTLGLDLGTNSIGWAVINSNIDSEGKEKLVGISSCGSRIIPMDAATLGDFGKGNTKSPVAERTRLRGIRRLLERSLLRRERLHRVLSVMGFLPEHYASQLDRYGKFLPETEPKLAWYKDDSGRYQFLFQKSFHEMLEDFRQHQPELVAGEKKIPYDWTIYYLRKKALSQEITKEELAWILLNFNQKRGYYQLRGEEEQEENNKSVEYHALKVVSVEDSGERKGKDIWYNVTLENGWVYRRASNIPLDWTGKVKEFVVTTELDDAGNPKKNKEGVIKSSLSMLKEDDWGLLKTRTQAQIDESGKTVGTYIYESLLCMPNQKIRGKLVRTIERKYYKDELRQILVKQSEFHAALQDHNLLLSCIEELYPNNEAHRRLLSASSFIYFLIEDILFYQRPLKSQKGLIDNCPYESHIYKDKKDGSLHHVPLKCVSKSHPLFQEFRLWQFLSNLRIYQRERMTDGSLKLDVDVTREFLPSEEDYVKLFDWLNERKEISQKLLLAYRPFGLKKNEQANYRWNYVEDKSYPCNETRAEIKSRLSKAGVPEEFLTEEKEEALWHILYSISDKKELTKALGTFAAKNGLNESFVEVFAKIPPFESNYAAYSLKAIRKLLALMRMGKYWNEQAIDRQIRDRIEKILTGEYDETIRSRVREKAMLLTDISSFRGLPLWLACYIVYDRHSESKELVKWETPAGIDHFLSKFKQNSLRNPIVEQVITESLRTVRDIWKQEGKIDEIHVELGREMKNPAKERARITAQVQENENTNLRIKALLAEFMNPEFEIENVHPYSPGQQEILRIYEDGVLSGIAEKDLPDDITAILKKFRENDVKKRPTTSEVLRYKLWLEQRYRSPYTGRVIPLGKLFTPAYEIEHVIPQSRYFDDSISNKVICESAVNKLKDNCLGYEFIKKHSGEMVELGNGETVPVFSVEEYERFVKESYFGNSKKMKKLLLEDIPDSFIERQLNDSRYISRVVTSLLSNLVCEEGEQDGLSKNVIVCTGGITDRLKKDWGVQEVWNRIILPRFLRLNEITGRTDFTSTSVNGHLLPALPLYLQKGFNKKRIDHRHHAMDAIVIACANRNIVNYLNNSSARKNSEISRYDLQRLLCEKVKTDANGNYKWILRKPWETFTQDVYAALTNIVVSFKQNLRVINRTTNYYQHYNEAGEKRMIPQTKGDRWAIRKPMHKDTVYGEVNLRKEKTLPLRDVVKNPSIVVDKSLKNKLYELLKSQYDLKAIAKYFEIHQDVWADVNLKKIKVYYFTKETNERFFATRKSLDPSFDQKKIEEEVTDTGVQKILLHHLQQNNNDPDMAFSPDGIDRMNQNMTILNDGKWHQPIYKVRTYEKADKFAVGESGNKAKKFVDAAKGTNLFFAVYESVQEDEATGKQVCKRTFATIPLNEVIKRKKQGLPAAPEDLNGNLPKFVLSPNDLVYLPTEEERNSSRIIQPLDRERIYKMVSCTEGECHFIPEYVANPILQTIELGSNNKAQRAWSEEMIKEICVPIKIDRLGNVSLIQI

SEQ ID NO: 17441 - protein, 1250 aa, unidentified
  REGION 1..1250: note = Cas Enzyme sequence
  SITE 80: note = misc_feature - Xaa can be any naturally occurring amino acid
RGNFLFEGKDVQTGASMQEGLQDLFEMIDSKLDASDSDITIYDKSKFDEIQNILVDNSIPKFIPKRFSLEGKEIKTKEAXIVELFANAYVDDKAKQAKVNKFSKALANALTGRRFILQDIIFDEVDKESNPKIEINFSKLDDDKREAILLAVGDNSSIVEGLELIYYAYLFNDILGGEKSISKAMVRIYEKHKEDLKILKKLFKKDGLSKEDKKNGKFNLIFNKKNIVNYVSYIKSTSIGKKSQKATRDEFYGFLKPLVEELDDSPEKQYVLDEIEKDTFLPKINDVRNAAIPYQFHEDELKRIIENQKGYYPELAKNAEKILSILSFKRPYSVGVLYSSKGKSRFSWAEDIIRERVYPWNFNDLVDVDKMSENFISRMTNYCNYFEEEQVLPLCSIIYQTYITLNELNKIRINRFPIDCDTKKKVFDELFCKKKSVSKNDLQIFLSNNEEVYKGVNIESIEGLSDDNKFNGKMSTLADFRRILGDSFSKEDLNKYEDAVRIITLFNDEKIKIKQLQRVCGFDKAIAQKLAKLNYQKWGRFSKKFLNGIRSKHGKTVIEELYSGRLNSSYKNECPNLNQLIYDEGLGFKEQVLKEKDKIERFNYEEHVKDLYCSPAVKRQIWQALLIIEEIVQIMGDDPIGIFIESTRKPEAPKKSQSRVERLKQLYSSIKEENDYLIKSAEEKLMQLQLDKNERLDNEKLYLYLLQLGRCMYSGEALDLDNLNAYEIDHIVPRSYIKDDSFENRVLVKKIENQNRSNTLGIAIDIITKQKSFWKFLYNKKFIGGRKYNNLLKTEYTEDDLAGFIARQLVETNQTTKAVKELLEQRFVSEKTDVQPIKAQLVSELRYQQTDKGNLEFIKLRNLNYMHHAKDAYLTATIGLFTKYTFPSWGRDERMAMAGIRLKEIEKEIRLGNYKNEKEFNRLINKRYSLIVDMMVHGKGDDFIEIEEGELINERFNNLLKTMSFNDCKLTKKLEFKASSNFYDQTIYPSREGLIPKKYLKDDNGINKPLAPELYGGFSGEQAEFMVVVRYDDVKKGEVKEKYSFEKIPVLIAYQEKLQPGRLKEHLEEICGLHNPKVVKKANKGQLIKMEGHYVTIASDKEVTNAVQLVLPAKYNKLLKTAEKISGNYDFEENVDVKTKMEVLANEIIPEMCRKIRGLYPLFKSIVEKVEIYFNEGYRDLSLNEKLEYINKLLVITMPNATRVDMPKKFGGGGSGWGRLQRRVDVYKIEEWVYQSCTGLYYSIEKGLNG

SEQ ID NO: 17442 - protein, 1127 aa, unidentified
  REGION 1..1127: note = Cas Enzyme sequence
MENYQYRIGLDIGIASVGWAVLETNAQGEPKRIADLGVRIFTKAEHPKDGSSLAAPRRSARSVRRRLRRRKFRIQRVKGLFEREGLITKQELEKSFQTNAVENVYELRAKALDRRITNEELAHVLLHIAKHRGFKSNRKAEAKDNETGAVLSAIRENEQRLLEGNYRTVGEMIAKDESFREDAPWNENHYIFTPRNKAGNYKHTVLRDMLVKEVHCIFEAQRSFGNDAASEKLENDFIDVFTAQRSFDMGPGGESPYGGNIIERMLGKCTFEKNEPRAPKGSYTAERFVILPKINNLRIKDSAGSERGLTEEERKLLLAESYKSKELKYTKVRKILALRDDEYFKGLNYGRKEVADVEKATFVKATATLTITKILEANGEYDFSDLADGLDEKRAFLVDEIARLIATYKEDAKRREEFEQFDLDDETVDKLLELNDSKFQHLSFVAMQKLMPYLEEGYTYNEACERVGYDFKDEYHGEKFHTLRGNEFQTIYQEELADITSPVVKRAISQTIKVVNAIIDKYGSPQAINVELAREMSRPFNERSKMEKDMLANQANNEAILKRLREEYGVAHPTGQDIIRFRLWQDQDGRCLYSGEAIPIDRLFAVGETDIDHIIPYSISFDDRLSNKVLVKAKCNREKGNRLPYEYLGNNPAEWEAFKSRVDTYVKDSRKRNNLKKEKLTEEDRKGFKERNLTDTKFATVVVTRLLRNYLEMAPIEGKHKHVTAVNGSVTAFLRKRWGLSQKDRRTDTHHARDAVVIAACTDGMIQKITRFSQLQELKHTRDRRIIDPDTGEELTFDEKYEQEWLNMYGKHLPTPWPEFREELELRMMPHPEDVVLDDPRKFNQIIGYKDDLWGKPYEQPIFVSRMPNHKTTGAGHAETIRSARLFDSEGVVIAKTALQDLKLDKEGQIDGYYNKESDRLLYDALLRRLQMYSGDAKKAFPEGEDFHKPTSTGEEGPVVKKVKIMKKQTAGVSVGKGGIAENGGMIRVDVFQVNKKYYFVPVYYADAVAKRLPNKACVALKPKSEWKEMEDQFFVFSLFPGDLFFFKHKKGMKIKYYDKSMGSVSEALCYFTGANTHTASFAGDSNDKVFSFEGMGIQSLEALEKYQVDVLGNIKKVEKETRMTFR

SEQ ID NO: 17443 - protein, 1102 aa, unidentified
  REGION 1..1102: note = Cas Enzyme sequence
LHVNAFFGYIAVVVYEIVEKQMTAFKPNPLNYILGLDIGIASVGWAMVEIDNEENPIRLIDLGVRVFERAEVPKTGDSLAAARRAARSIRRLTRRRAHRLLRARRLLKHEGVLKPEDFDENGFIKLLPNTPWQLRAAALDRRLAPLEWAAVLLHLVKHRGYLSQRKNEGETADKELGALLKGVADNAHALQAGDFRTPAELALNKFEKESGHIRNQRGDYSHTFSRKDLQAELVLLFEKQKEFGNPHVSDDLKNGIENLLMTQRPALSGDAIQKMLGHCTFEPAEPKAAKNTYTAERFIWLTKLNNLRILNQGNERPLTDAERTTLMDEPYKKSKLTYAQARKLLDLDDTAFFKGLRYGKDNAESATLMEMKAYHAISRALEKEGLKDKKSPLSISPELQDEIGTAFSLFKTDEDITGRLKGCLQSEILDALLKHISFDKFVQISLKALRRIVPLMEQGKRYDEACAEIYGDHHGRKNSEETLYLPPIPADEIRNPVVLRALSQARKVINAVVRRYGSPARIHIETAREVGKSFKDRKEIEKRQEENRKDREKAAAKFREYFPNFVGEPKSKDILKLRLYEQQHGKCLYSGKVIDIRRLNEKGYVEIDHALPFSRTWDDSFNNKVLVLGSENQNKGNRTPYEYFNGKDNSREWLEFKARVETSRFPHSKKQRVLLQKFDEEGFKERNLNDTRYVNRFLCQFVADHMQLTGKGKRRVFASNGQITNLLRGFWGLHKVRAENDRHHALDAVVVACSTVAMQQRITRFVRYKEMNAFDGKTVDKETGEVLHQKTHFPQPWEFFTQEVMIRVFDKPDGEPEFEEADTPEKLRALLAEKLPSRPEAIHEYVMPLFVSRAPNRKMSGQGHMETVKSAKRLNEGISVLRVPLTQLKLKDLEKMVNREREPKVYAGLKARLEAHKDDPAKAFAEPFYKHDKAGNPTQQVKAVRIEQVQKTGVLVRNRNGVADNATMVRVDVFEKAGKYYLVPIYSWQVAKGILPDRAVVAYADEENWTVMDESFEFRFALYSNDLIKVQLKKDSFLGYFSGLDRATGAISLREHDLEKSKGKDGMHRIGVKTALSFQKYQIDELGKEIRPCRLKKRPPVR

SEQ ID NO: 17444 - protein, 1103 aa, unidentified
  REGION 1..1103: note = Cas Enzyme sequence
LHVNAFFRYIAVVVYEIAEKQMTAFKPNPLNYILGLDIGIASVGWATVEIDDKENPVRLIDLGVRVFERAEVPKTGDSLAAARRLARSVRRLTRRRAHRLLRARRLLKHEGVLKPEDFDENGFIKLLPNTPWQLRAAALDRRLAPLEWAAVLLHLVKHRGYLSQRKNEEQTADKELGALLKGVADNTHALQAGNFRTPAELALNKFEKESGHIRNQRGDYSHTFSRKDLQAELVLLFEKQKEFGNPYVSDDLKNSIENLLMTQRPALSGDAIQKMLGHCTFEPAEPKAAKNTYTAERFIWLTKLNNLRILNQGNERPLTDAERTTLMDEPYKKSKLTYAQARKLLGLDDTAFFKGLRYGKDNAESATLMEMKAYHTVSRALEKEGLKDKKSPLNLSPEVQDEIGTAFSLFKTDEEITGRLKDCLQPEILDALLKHISFDKFVQISLKALRRIVPLMEQGKRYDEACAEIYGDHHGRRNSEETLYLPPIPADEIRNPVVLRALSQARKVINGVVRRYGSPVRIHIETAREVGKSFKDRKEIEKRQEENRKDREKAAAKFREYFPNFVGEPKSKDILKLRLYEQQHGKCLYSGKEIDLGRLNEKGYVEIDHALPFSRTWDDSFNNKVLVLGRENQNKGNRTPYEYFNGKDNSREWQEFKARVETSRFPHSKKQRVLLQKFDEGEFKKRNLNDTRYINRFLCKFVAGHMRLMDNRETRVFASNGQITNLLRGFWGLRKVRAENDRHHALDAVVVACSTVAMQQKITGFVRYKEMNAFDGKTIDKETGEVLHQKIHFPQPWEFFAQEVMIRVFGKPDGKPEFEEADTPEKLRALLAEKLPSRPEAVHEYVMPLFVSRAPNRKMSGQGHMETVKSAKRLNEGISVLRVPLTQLKLKDLEKMVNREREPKLYEALKARLEAHKDDPIKAFTEPFYKHDKAGNRTQQVKAVRIEQVQKTGVWVRNQNGIADNATMVRVDVFEKAGKYYLVPIYSWQVAKGILPDRAVVAYADEENWTIMDESFKFKFVLYANDLIKLTAKKNVFLGYFVSLNRATGAIDIRTHDTDSTKGKNGIFQSVGVKTALSFQKYQIDELGKEIKPCRLKKRPPVR

SEQ ID NO: 17445 - protein, 1086 aa, unidentified
  REGION 1..1086: note = Cas Enzyme sequence
MEKQMTVFKPNPLNYILGLDIGIASVGWAMVEIDDKENPIRLIDLGVRVFERAEVPKTGDSLAATRRLARSIRRLIRRRAHRLLRARRLLKHEGVLNPEDFNENGFIKLLPNTPWQLRTAALDRKLTPLEWAAVLLHLVKHRGYLSQRKNEGETDDKELGALLKGVADNTHALQAGNFRTPAELALNKFEKESGHIRNQRGDYSHTFSRKDLQAELVLLFEKQKEFGNPHVSDDLKNGIENLLMTQRPALSGDAIQKMLGHCTFEPAEPKAAKNTYTAERFIWLTKLNNLRILNQGNERPLTDAERTTLMDEPYKKSKLTYAQARKLLGLDDTAFFKGLRYGKDNAESATLMEMKAYHAISRALEKEGLKDKKSPLSLSPELQDEIGTAFSLFKTDEDITGRLKDCLQPEILDALLKHISFDKFIQISLKALRRIVPLMEQGKRYDEACAEIYGDHYGEKNSEEMLYLPPIPADEIRNPVVLRALSQARKVINAVVRRYGSPARIHIETAREVGKSFKDRKEIEKRQEENRKDREKAAAKFREYFPNLVGEPKSKDILKLRLYEQQHGKCLYSGKEIDLGRLNEKGYVEIDHALPFSRTWDDSFNNKVLVVGSENQNKGNRTPYEYLNGKDNSREWLEFKARVETSRFPHSKKQRVLLQKFDEEGFKERNLNDTRYVNRFLCQFVADHMHLTGKGKRRVFASNGQITNLLRGFWGLHKVRAENDRHHALDAVVVACSTVAMQQKITRFVRYKEMNAFDGKTIDKETGEVLHQKTHFPQPWKFFTQEVMIRVFGKPDGEPEFEEADTPEKLRALLAEKLPSRPEAIHEYVMPLFVSRAPNRKMSGQGHMETVKSVKRLNEGISVLRVPLTQLKLKDLEKMVNREREPKLYAGLKARLEAHKDDPVKAFAEPFYKHDKAGNRTQQVKAVRVEQVQKTGVWVRNRNGIADNATMVRVDVFEKAGKYYLVPIYSWQVAKGILPDRAVVAYAEEENWTVMDESFKFKFVLYANDLIKLTAKKNEFLGYFVSLNRATGAIDIRTHDTDSTKGKNGIFQSVGVKTALSFQKYQIDELGKEIRLCRLKKRPPVR

SEQ ID NO: 17446 - protein, 1103 aa, unidentified
  REGION 1..1103: note = Cas Enzyme sequence
LHVNAFFRYIAVVVYEIAEKQMTAFKPNPLNYILGLDIGIASVGWAMVEIDDKENPVRLIDLGVRVFERAEVPKTGDSLAAARRLARSVRRLTRRRAHRLLRARRLLKHEGVLKPEDFDENGFIKLLPNTPWQLRAAALDRRLAPLEWAAVLLHLVKHRGYLSQRKNEEQTADKELGALLKGVADNTHALQAGNFRTPAELALNKFEKESGHIRNQRGDYSHTFSRKDLQAELVLLFEKQKEFGNPYVSDDLKNSIENLLMTQRPALSGDAIQKMLGHCTFEPAEPKAAKNTYTAERFIWLTKLNNLRILNQGNERPLTDAERTTLMDEPYKKSKLTYAQARKLLGLDDTAFFKGLRYGKDNAESATLMEMKAYHAISRALEKEGLKDKKSPLSLSPELQDEIGTAFSLFKTDEEITGRLKGCLQPEILDALLKHISFDKFVQISLKALRQIVPLMEQGRRYDEACAEIYGDHYGEKNSEEMLYLPPIPADEIRNPVVLRALSQARKVINGVVRRYGSPVRIHIETAREVGKSFKDRKEIEKRQEENRKDREKAAAKFREYFPNFVGEPKSKDILKLRLYEQQHGKCLYSGKEIDLGRLNEKGYVEIDHALPFSRTWDDSFNNKVLVLGRENQNKGNRTPYEYFNGKDNSREWQEFKARVETSRFPHSKKQRVLLQKFDEGEFKKRNLNDTRYINRFLCKFVAGHMRLMDNRETRVFASNGQITNLLRGFWGLRKVRAENDRHHALDAVVVACSTVAMQQKITGFVRYKEMNAFDGKTIDKETGEVLHQKTHFPQPWEFFAQEVMIRIFGKPDGKPEFEEADTPEKLRALLAEKLPSRPEAVHEYVMPLFVSRAPNRKMSGQGHMETVKSAKRLNEGISVLRVPLTQLKLKDLEKMVNREREPKLYEALKARLEAHKDDPIKAFTEPFYKHDKAGNRTQQVKAVRIEQVQKTGVWVRNQNGIADNATMVRVDVFEKAGKYYLVPIYSWQVAKGILPDRAVVAYADEENWTIMDESFKFKFVLYANDLIKLTAKKNVFLGYFVSLNRATGAIDIRTHDTDSTKGKNGIFQSVGVKTALSFQKYQIDELGKEIKPCRLKKRPPVR

SEQ ID NO: 17447 - protein, 996 aa, unidentified
  REGION 1..996: note = Cas Enzyme sequence
KHEGVLKPEDFDENGFIKLLPNTPWQLRAAALDRRLAPLEWAAVLLHLVKHRGYLSQRKNEEQTADKELGALLKGVADNTHALQAGNFRTPAELALNKFEKESGHIRNQRGDYSHTFSRKDLQAELVLLFEKQKEFGNPYVSDDLKNSIENLLMTQRPALSGDAIQKMLGHCTFEPAEPKAAKNTYTAERFIWLTKLNNLRILNQGNERPLTDAERTTLMDEPYKKSKLTYAQARKLLGLDDTAFFKGLRYGKDNAESATLMEMKAYHAISRALEKEGLKDKKSPLSLSPELQDEIGTAFSLFKTDEEITGRLKGCLQPEILDALLKHISFDKFVQISLKALRQIVPLMEQGRRYDEACAEIYGDHYGEKNSEEMLYLPPIPADEIRNPVVLRALSQARKVINGVVRRYGSPVRIHIETAREVGKSFKDRKEIEKRQEENRKDREKAAAKFREYFPNFVGEPKSKDILKLRLYEQQHGKCLYSGKEIDLGRLNEKGYVEIDHALPFSRTWDDSFNNKVLVLGRENQNKGNRTPYEYFNGKDNSREWQEFKARVETSRFPHSKKQRVLLQKFDEGEFKKRNLNDTRYINRFLCKFVAGHMRLMDNRETRVFASNGQITNLLRGFWGLRKVRAENDRHHALDAVVVACSTVAMQQKITGFVRYKEMNAFDGKTIDKETGEVLHQKTHFPQPWEFFAQEVMIRIFGKPDGKPEFEEADTPEKLRALLAEKLPSRPEAVHEYVMPLFVSRAPNRKMSGQGHMETVKSAKRLNEGISVLRVPLTQLKLKDLEKMVNREREPKLYEALKARLEAHKDDPIKAFTEPFYKHDKAGNRTQQVKAVRIEQVQKTGVWVRNQNGIADNATMVRVDVFEKAGKYYLVPIYSWQVAKGILPDRAVVAYADEENWTIMDESFKFKFVLYANDLIKLTAKKNVFLGYFVSLNRATGAIDIRTHDTDSTKGKNGIFQSVGVKTALSFQKYQIDELGKEIKPCRLKKRPPVR

SEQ ID NO: 17448 - protein, 1085 aa, unidentified
  REGION 1..1085: note = Cas Enzyme sequence
MEKQMTAFKPNPLNYILGLDIGIASVGWATVEIDDKENPIRLIDLGVRVFERAEVPKTGDSLAAARRAARSIRRLIRRRAHRLLRTRRLLKHEGVLKPEDFDENGFIKLLPNTPWQLRAAALDRKLTPLEWAAVLLHLVKHRGYLSQRKNEEQTADKELGDLLKGVADNTHALQTGDFRTPAELALNKFEKESGHIRNQRGDYSHTFSRKDLQAELVLLFEKQKEFGNPYVSDDLKNGIENLLMTQRPALSGDAIQKMLGHCTFEPAEPKAAKNTYTAERFIWLTKLNNLRILNQGSERPLTDTERTTLMDEPYKKSKLTYARVRKLLGLDDTAFFKGLRYGKDNAESTTLMEMKAYHAISRALEKEGLKDKKSPLNLSPELQDEIGTAFSLFKTDEDITGRLKDCLQPEILDALLKHISFDKFVQISLKALRRIVPLMEQGKRYDEACAEIYGDHYGEKNSEEMLYLPPIPADEIRNPVVLRALSQARKVINSVVRRYGSPVRIHIETAREVGKSFKDRKEIEKRQEENRKDREKAAAKFREYFPNFVGEPKSKDILKLRLYEQQHGKCLYSGKEIDLGRLNEKGYVEIDHALPFSRTWDDSFNNKVLVLGSENQNKGNRTPYEYLNGKDNSREWLEFKARVETSRFPHSKKQRILLQKFDEEGFKERNLNDTRYVNRFLCQFVADHMQLTGKGKRRVFASNGQITNLLRGFWGLRKVRVENDRHHALDAVVVACSTVAMQQRITRFVRYKEMNAFDGKTIDEETGEVLHQKTHFPQPWDFFAQEVMIRVFGKPGGKPEFEEADTPEKLRALLAEQVSSRPQAVHEYVAPLFVSRAPNRKMSGQGHMETVKSPKRLDEGMSVLRVPLTQLKLKDLEKMVNREREPKLYEALKARLEAHKDDPAKAFAEPFYKQDKAGNRTQQVKALRIEQVQKTGVWVRNQNGIADNATMVRVDVFEKAGKYYLVPIYSWQVAKGILPDRAVVAYADEENWTVMDESFEFRFALYSNDLIKVQLKKDSFLGYFSGLDRATGAISLWEHDLEKSKGKDGMHRIGVKTALSFQKYQIDELGKEIRPCRLKKRPPVR

SEQ ID NO: 17449 - protein, 1089 aa, unidentified
  REGION 1..1089: note = Cas Enzyme sequence
MKYAIGLDIGIESVGYAVLELDSHDQPFRIERLGSRVFDRAEHPKDGSSLAVPRREARGARRRLRRHRHRLERIRGLILSSGILSGAELDALYKGQLEDIYALRTKALDELVSREAFARILIHLAQRRGYRSNRKADAADKENGVLLAAVSENQKRCEEKGYRTVGEMFYRDEAFAIYKRNKQANYLNTVDRASVEAEARLIFAAQRERGAAYASEETEAAYLDILLSQRSFAEGPACGPYSGNQVERMRGKCTFEEGQLRAAKASYSFQLFNLCQHINHIRLSAKGVTRSLTDEERQQVYELAHEKAEVTFAQIRKLLHLAEDEDFVGIRYEAGARAKAEKNAKLKDLENYHKIRKCISAYSAEAFAELSYDQLDAIGEALSKNQSDADITGELTAAKLSPQVIEALLTLPNFAKFGHLSVMACRKILPFLQQGYTYDKACEAAGYDPKANNGKPELYLPSLPKNQSEITSPVVLRAVSQTIKVVNAIVREMQGSPVYLNIELARELAHDKKERDEIKKAQDKNAETNEQLMEQLREYTDGKIGGQDLIKMKLWQEQDGRCMYSGEAIEIERLTEPGYVDVDHIVPYSICFDDRMANKVLVLTAENRQKGNRLPLQYLQGKKRDDFIIRVEQSNLKYAKKSRLLKESISDEAEWKQRNLQDTQFMASYLHRYISEHLLFAPSDSGRKRRVTAVNGAITAYVRKRWGIRKIREDGDLHHAVDAVVIGCITQGMINRISRYSYYKETKDNGDYIVDEQTGELITRFPTPWAHFLDELSIRMTQNAKNMRKQLFDANYDSYAEIDLETVMPPFVSRMCNHKSTGSAHLETVRSGKLLDQGKVISKVALTALKLDATGEIANYYNPESDRLLYEALKERLQAHGGDGKRAFADGEFRKPKADGTPGPVVKKVKVIDTVSNVVQVQDQTGVANNETMLRCDVFRVEDDGYYFVPVYVADTVKPQLPSLAPIAGKDADGRKRWKQMREEDFLFTLYPNDLIRIYSKKPFSLNVVNKKSTLPEKMTVPGEEGVFLYYRGMNISTAVLNAITHDNTYSHDSIGKTMQRIEKYEVDVLGNIRRIGEEKRKDFSHKKK

SEQ ID NO: 17450 - protein, 1181 aa, unidentified
  REGION 1..1181: note = Cas Enzyme sequence
MDVAWGIDVGIASVGFAVIEIDERGEPARLIDGAAHVFKASDGAAERRGHRSMRNQTQRAARRERYLKRHLVDLFQLSKLDDSALSDMELDLGGKGSKAFTDRIPLRALGLEQQLTKTDLCCAIMHIARNRGQRLSRGLGVAITDEDGKAEVTRMSDRANHTTADLVAHGKQLNLVAGVPATPGQLLWRDRQRGLPTRRVKSRKDAPIFTRGQVIDELDRLLKTQAKHHPELDETGAQELLINKTFWEKDPKPPTIGRCRYARVGTDGLIEERLPVADDLFQEKRILETLNNLRLISRETAKSSPINLEQRDILASHLMGGEDLSVSKLRTLLSLGKAATAPTTNMEEVSSRSKKRTKTPPPIPGHNIVKALRAAPEKSRSIILSIWANLGSERRAQLANVLRTEDDPQIAFSVLADEFGFPEEAVDPILKYQVSPQRSAAGPTATAMLRDKLKKDVISNYEAERQSGLIDKELALETRLERLPYYGRVLPNDCVGGDGLESSGDEKRYGKVTNPVVHQALNRIRRLANRYLEVYGPPRRINVELARDLNKSAEARAEIELKINQNTKQNQDFANIIRSHGARVGRANLQKMLLHEWQGQKCLYTGSTITIQQLFDGSSQVDHILPWAITKDDSIGNKALVKVAANAHKSRRTPYDAFAAGYAGQSFAQILHLVETKRKPILWRFSENALAEHETRGGWASRALSDTRYIAKLAQAYLQRVCIAGPSGHPEIVALSGRTTADLREVWGLRNLISKLMVDEGRLDSDFSKEPDVSALDEKEATKALAEHSKKLRKIRFDHRHHLLDAIVIACATRRDIQRLQTLAARVETPRGLAQSIQRMVEKNTQLANGGLPWRPGFHRLVYDFLSDVGASEDPSILTRVTRQPDHDSNGKLHAGTQYRVYCELPKPASKDADTPTEPNYIYDVSKPLSELVTEKAIEALPVSGAIQSAFKQALSSHSPIWWGGANAEAAFNNLSEELADLCSNLLTLLAAAPEHLKGEKARVLWATEEHTKTTGRKHYRALGRGVLRVIKGPGIQGIKQQKRNRIVVATSGNDRLDHWLDQDGEDRLEVVSTIDANNPYFRARWRIEGGRLLASLRLGDTVEMYIDPEQPDLGRALYTFAKNSWCDWNFVPLAEARTADEGRGIFTVRLTSKSGFINRRIRQILLSPDGRVRWRGRVMN

SEQ ID NO: 17451 - protein, 1088 aa, unidentified
  REGION 1..1088: note = Cas Enzyme sequence
MLQPLQVPYILGLDIGVQSIGWALVRLDEEGNPCGILRLGVRSFESSSGSEQEIEKGTDEPASRQRREKRLMRRQLFRRQQRLRRTARVLQQAGLLPPFPLQPASRDAAITQLDAQLRSQFIDSGNHVDAQLLPYRIRAAALDQPLPAYALGRAFYHLAQRRGFLSNKKAGGKKDEEEKGKVKAGIAELAKQIEAAGARTLGEFFARLDPHQQRIRSRWTSRKMYQQEFDAIWAAQEPHHPQILTAELKAKLYRAIFFQRPLKSQKGLVGRCSLEKGRRRAPLACLEAQRLRYWQKLNDMRLKDARRILNAIPEAEGLIDWLPQEGQGRLSLYAKQLLAQHLETSEELTFNQIRHILGLKKKKNSDLDFTFNLEEGDEKKLLGNRTAARLLKALGQRWQDMPEDQRQRLVDEILSFEKEEPLARRLEKAWGFTPAEAANVAALDFEQGYHSFSRQAIRKILPHLQQGQSLASIIKQLYKDTQPQATAWDRLPPLRDVFPHVNNPVVRRALTEVRKVVNAILRVYGKPQQVHIELARDLKKSRYERQQLFKGMRQQQKQREEAKSWLQCQMGITNPTAHDILKYRLWIECNQQCPYTGKPISKEALFGREPQFDVEHIIPFSRCLDNSFTNKTLCEIAENRNVKKNRTPYEAYGHDPQRWHEILQRVSRFQGDAAKAKLRRFQLTEIPADFANRHLNDTRYSSRLAAEYLALLYGGRSDAQGNLRVRAITGAVTAQLRDQWGLNAVLAELGRQLGVRDLDDNVEKARFDHRHHAVDALVIALTTPGMVKRFSDESQRARQYGRQLRCFFDPPWGTRTEFVADVRNAVLAINVSRRLDRRLKGPLHEETIYGKPKQYVDEKGKTIQVAHVRKPLESLSPKNVDDIVDPVIRELVKKKLQDLNTTDPKKAFQKKENHPYMIARDGRIIPIHKVRIRVTTETIMTVGHGPTLRHVKPGTNHHMEIVATLDAAGNEIRWEGITVSLFEALHRLRNKQPVVQRDHGPGKRFKFSLAGGEYLEFVENGQKKLVRVTTVYHSNVEFRLHNDARPITMLLGVKGARAGLGRSVDALRKLKARKVLVDPLGNILPAND

SEQ ID NO: 17452 - protein, 1148 aa, unidentified
  REGION 1..1148: note = Cas Enzyme sequence
MGLSFIGREGKTMDEKLDYRIGLDIGIASVGWAVLQNNSDDEPVHIVDLGVRIFDKAEIPKTGESLAGPRRAARSTRRRLRRRKHRLDRIKYLLSEEGIIDIEAFMARYHSENLPDVYQLRYEALDRKLSDDEFAQVLIHIAKHRGFRSTRKAETAAKENGAVLASTSKNQALMQEHHYRTVGEMMYLDESFRINCPWVESGYVLAPRNKAEDYRHTILRSMLVDEVHAIFEAQRTLGNTKASPQLEEKYLTIMESQRSFDMGPGLQPDGTPSPYAMEGFADRVGKCTLEKEEMRAPKAAYTAEYFVALQKINHTRLIDANGEVRNFTAEERECLIDMLHHQREIKYAAARKALKLDTNIRFQNLNYRGKKNDDAADKMAETEKAKFIGMPNYHDYKKYLANRLHEIPEPTEQELLDEIGRILTCYKNDDTRLKYLAELGLTAEEMDSLLAFTPAKFQHLSIKAMRKIIPYLEEGYTYDKACQEAGYDFKADGNGTKNKLLKGDAVNEIINEITNPVVKRSVSQTVKVINAIIQRYGSPQAINIELAREMAKTFDERRKLEKDMQERQSSNDKVKERIKELGVISPTGQDILKYRLWEEQGGRCMYSGKVIPIAELFDRAGGYDIDHILPYSITFDDSYRNKVLVTAQENRQKGNRTPYEYMCEDEERLKEFEVRVRTTIRDYRKQEKFLKRHFTEEEKKEFKERNLNDTKYITTVVYNMIRQNLELAPFNKPGKKKQVRAVNGAITSYLRKRWGMPQKNRETDTHHAMDAVVIACCTDGMIQKISRYMKGRELKYARGYEYYDEETGEIFSPGEMSRDEWDKEFGVRIPLPWPTFKTELEIRMGEEDPLNFLNTHTDVRTEIDYPAWMYGSEDGKEKPVIRQIFVSRMPNHKVTGAAHADTIRSPRHFADDGIVLTRTALTDLKLNKDGEIEGYYNKESDRLLYQALKHQLELYGGDAKKAFAQDFHKPKADGSEGPVVRKVRIQKKLSMGVSVNGGNGIAENDGMVRIDVFCENGKYYFVPIYTADVVKKKLPNRAATHTKPYSQWRIVDDKDFVFSLYSRDLIHVKSKKGIKVNLVDNSQILKNEIYAYYTAADISTASIVGIGHDSGFKFRGLGIQGLEVLEKCQVDVLGHISVVKQEKRMGFS

SEQ ID NO: 17453 - protein, 1169 aa, unidentified
  REGION 1..1169: note = Cas Enzyme sequence
VVLGGEKFMGEMSKTNMDRHRSYRIGLDIGIASVGWAVLENNSQDEPIRILDLGVRIFEAAEDSQTGAALAAKRRDARTAGRRIRRRRHRLERIKWLFEREGLIQIDSFTERYHSPNLPDVYELRYEGLERKLSNEEFAQVLLHIAKHRGFRSTRKAELKEGDNGKVLKATEENRKRMEEHGYRTVGEMIYKDAYFHTECAWADNGYLLTPRNKADDYSHTMLRALLEEEVHILFDSQRKFGNEKATEKLEQEYLEIMLSQRSFDMGPGQQADGTPSPYAMEGFGNKVGYCTLERESGERRAAKATYTAELFVALQKITHMKLVHMDGSSRFFTEEERNILLEMLSSKKEIKYAAVRKKLNLPLEEKFNTLNYNMKRKGKDNKEEEVDEAAIIAATEKATFISMSNCYEYRKRIGEYLETLPEEEQQDLLDEIGTILTCYKNDDSRMNRLTEAGLSKELADSLLELTPAKFQHLSIKAMKKIMPYMKEGMVYDKACEAAGYDFKNDNHGKKMKLLKGENITEIINEITNPVVKRSVSQTVKVINAIILKYGSPQAVSIELAREMSKNFKERKKAEKQIEENRKKNEMAKKEIQELGKLSPNGQDILKYRLWHDQQGICLYTGKKIPLEELFQPGYDIDHILPYSITFDDSYRNKVLVTSQANREKGNRTPYEYFGQDEVHWSAYEARVNHFIKDYKKRRNLLKQGFTKEDRREFKERNLNDTKYITRVIYNMIRQNLEMEPLNREDRKKQVFAVNGSITAYLRKRWGLMQKDRSTDTHHAMDAVVVACCTDGMIQKISRSTQYREVLYKGQSHPDYEIVDVETGEIISLEDLSREEWDERYGAQVPPPWEHFKEELEVRMGSDPKNDLDAHPDMYQLFRYPEDVYNNIRPIFVSRMPNHKVTGAAHADTIRSPRHYKDGGEIFADGGYVLSRTNIEDLKLDKDGEIKDYYNKDSDRLLYEALRARLAEYDGDGKKAFAEEFYKPKADGTQGPIVKKVKTYKKMSLGVEINKDEAGVGRGIAENANGGMIRVDVFRENGKYYFVPIYIADALKKRLPNKAAMQNKPYSEWKEMKDENFLFSLYSRDLIGFKNPKGKKVKCKDGKEIVLTKEIVYYVGANINTASISCKAHDNQYEFGSFGIQSLQELKKYQVDVLGNITEVRQEKRRGFH

SEQ ID NO: 17454 - protein, 953 aa, unidentified
  REGION 1..953: note = Cas Enzyme sequence
MGEMSKTNMDRHRSYRIGLDIGIASVGWAVLENNSQDEPIRILDLGVRIFEAAEVPKTGAALAAERRDARTARRRIRRRRHRLERIKWLFEREGLIQIDSFMERYHSPNLPDVYELRYEGLERKLSKEEFAQVLLHIAKHRGFRSTRKAELKEGDNGKVLKATEENRKRMEEHGYRTVGEMIYKDAYFHTECAWADNGYLLTPRNKADDYSHTMLRALLEEEVHILFDSQRKFGNEKATEKLEQEYLEIMLSQRSFDMGPGQQADGTPSPYAMEGFGNKVGYCTLERESGERRAAKATYTAELFVALQKITHMKLVHMDGTSRFFTEEERNILLEMLSSKKEIKYVAVRKKLNLPLEEKFNTLNYNMKRKGKDNEEEGMDEAAIIAATEKATFISMSNCYEYRKRIGEYLETLPEEEQQDLLDEIGTILTCYKNDDSRMNRLTEAGLSKELADSLLELTPAKFQHLSIKAMKKIMPYMKEGMVYDKACEAAGYDFKNDNHGKKMKLLKGENITEIINEITNPVVKRSVSQTVKVINAIILKYGSPQAVSIELAREMSKNFEERKKAEKQIEENRKKNEMAKKEIQELGKLSPNGQDILKYRLWHDQQGICLYTGKKIPLEELFQPGYDIDHILPYSITFDDSYRNKVLVTSQANREKGNRTPYEYFGQDEVHWSAYEARVNHFIKDYKKRRNLLKQGFTKEDRREFKERNLNDTKYITRVIYNMIRQNLEMEPLNREDRKKQVFAVNGSITAYLRKRWGLMQKDRSTDTHHAMDAVVVACCTDGMIQKISRSTQYREVLYKGQSHPDYEIVDVETGEIISLEDLSREEWDERYGAQVPPPWEHFKEELEVRMGSDPKNDLDAHPDMYQLFRYPEDVYNNIRPIFVSRMPNHKVTGAAHADTIRSPRHYKDGGEIFADGGYVLSRTNIEDLKLDKDGEIKITTIRTVTDYYMKH

SEQ ID NO: 17455 - protein, 1161 aa, unidentified
  REGION 1..1161: note = Cas Enzyme sequence
MGEMSKTNMDRHRSYRIGLDIGIASVGWAVLENNSQDEPIRILDLGVRIFEAAEVPKTGAALAEERRDARTARRRIRRRRHRLERIKWLFEREGLIQIDSFMERYHSPNLPDVYELRYEGLERKLSNEEFAQVLLHIAKHRGFRSTRKAELKEGDNGKVLKATEENRERMEEHGYRTVGEMIYKDAYFHTECAWADNGYLLTPRNKADDYSHTMLRALLEEEVHILFDSQRKFGNEKATEKLEQEYLEIMLSQRSFDMGPGQQADGTPSPYAMEGFGNKVGYCTLERESGERRAAKATYTAELFVALQKITHMKLVHMDGTSRFFTEEERNILLEMLSSKKEIKYAAVRKKLNLPLEEKFNTLNYNMKRKGKDNKEEEIDEAAIIAATEKATFISMSNCYEYRKRIGEYLETLPEEEQQDLLDEIGTILTCYKNDDSRMSRLTEAGLSKELADSLLELTPAKFQHLSIKAMKKIMPYMKEGMVYDKACEAAGYDFKNDNHGKKMKLLKGENITETINEITNPVVKRSVSQTVKVINAIILKYGSPQAVSIELAREMSKNFEERRKAEKQMEENRKKNEMAKKEIQELGKLTPNGQDILKYRLWHEQQGICLYTGKKIPLEELFQPGYDIDHILPYSITFDDSCRNKVLVTSQANREKGNRTPYEYFGQDEVRWSAYEARVNHFIKDYKKRRNLLKQGFTKEDRREFKERNLNDTKYITRVIYNMIRQNLEMEPLNREDRKKQVFAVNGSITAYLRKRWGLMQKDRSTDTHHAMDAVVVACCTDGMIQKISRSTQYREVLYKGQSHPDYEIVDVETGEIIFLEDLSREEWDKRYGAQVPPPWEHFKEELEVRMGSDPKNDLDTHPDMYQLFRYPEDVYNNIRPIFVSRMPNHKVTGAAHADTIRSPRHYKDGGEIFADGGYVLSRTNIEDLKLDKDGEIKDYYNKDSDRLLYEALRARLAEYDGDGKKAFAEEFYKPKADGTQGPIVKKVKTYKKMSLGVEINKDEAGVGRGIAENANGGMIRVDVFRENGKYYFVPIYIADALKKRLPNKAAMQNKPYSEWKEMKDENFLFSLYSRDLIGFKNPKGKKVKCKDGKEIVLTKEIVYYVGANINTASISCKAHDNQYEFGSFGIQSLQELKKYQVDVLGNITEVRQEKRRGFH

SEQ ID NO: 17456 - protein, 1161 aa, unidentified
  REGION 1..1161: note = Cas Enzyme sequence
MGEMSKTNMDRHRSYRIGLDIGIASVGWAVLENNSQDEPIRILDLGVRIFEAAEVPKTGAALAAERRDARTARRRIRRRRHRLERIKWLFEREGLIQIDSFMERYHSPNLPDVYELRYEGLERKLSNEEFAQVLLHIAKHRGFRSTRKAELKEGDNGKVLKATEENRKRMEEHGYRTVGEMIYKDAYFHTECAWADNGYLLTPRNKADDYSHTMLRALLEEEVHILFDSQRKFGNEKATETLEQEYLEIMLSQRSFDMGPGQQADGTPSPYAMEGFGNKVGYCTLERESGERRAAKATYTAELFVALQKITHMKLVHMDGTSRFFTEEERNILLEMLSSKKEIKYAAVRKKLNLPLEEKFNTLNYNMKRKGKDNEEEEVDEAAIIAATEKATFVSMSNCYEYRKRIGDYLDTLPEEEQQDLLDEIGTILTCYKNDDSRMNRLTEAGLSKELADSLLELTPAKFQHLSIKAMKNIMPYMKEGMVYDKACEAAGYDFKNDNHGKKMKLLKGENITEIINEITNPVVKRSVSQTVKVINAIILKYGSPQAVSIELAREMSKNFEERKKAEKQIEENRKKNEMAKKEIQELGKLSPNGQDILKYRLWHDQQGICLYTGKTIPLEELFQPGYDIDHILPYSITFDDSYRNKVLVTSQANREKGNRTPYEYFGQDEARWKAYEARVNHFIKDYKKRRNLLKQGFTKEDRREFKTRNLNDTKYITRVIYNMIRQNLEMEPLNREDRKKQVFAVNGSITAYLRKRWGLMQKDRSTDTHHAMDAVVVACCTDGMIQKISRSTQYREVLYKGQSHPDYEIVDVETGEIISLEDLSREEWDERYGAQVPPPWEHFKEELEVRMGSDPKNDLDTHPDMYQLFRYPEDVYNNIRPIFVSRMPNHKVTGAAHADTIRSPRHYKDGGEIFADGGYVLSRTNIEDLKLDKDGEIKDYYNKDSDRLLYEALRARLAEYDGDGKKAFAEEFYKPKADGTQGPIVKKVKTYKKMSLGVEINKDEAGVGRGIAENANGGMIRVDVFRENGKYYFVPIYIADALKKRLPNKAAMQNKPYSEWKEMKDENFLFSLYSRDLIGFKNPKGKKVHCTDGTEIVLTNEIVYYIGANIRTASISCKAHDNQYEFGSFGIQSLQELKKYQVDVLGNVTEVRQEKRRGFQ

SEQ ID NO: 17457 - protein, 1161 aa, unidentified
  REGION 1..1161: note = Cas Enzyme sequence
MGEMSKTNMDRHRSYRIGLDIGIASVGWAVLENNSQDEPIRILDLGVRIFEAAEVPKTGAALAAERRDARTARRRIRRRRHRLERIKWLFEREGLIQIDSFMERYHSPNLPDVYELRYEGLERKLSNEEFAQVLLHIAKHRGFRSTRKAELKEGDNGKVLKATEENRKRMEEHGYRTVGEMIYKDAYFHTECAWADNGYLLTPRNKADDYSHTMLRALLEEEVHILFDSQRKFGNEKATEKLEQEYLEIMLSQRSFDMGPGQQADGTPSPYAMEGFGNKVGYCTLERESGERRAAKATYTAELFVALQKITHMKLVHMDGTSRFFTEEERNILLEMLSSKKEIKYAAVRKKLNLPLEEKFNTLNYNMKRKGKDNKEEEIDEAAIIAATEKATFISMSNCYEYRKRIGEYLETLPEEEQQDLLDEIGTILTCYKNDDSRMNRLTEAGLSKELADSLLELTPAKFQHLSIKAMKKIMPYMKEGMVYDKACEAAGYDFKNDNHRKKMKLLKGENIIETINEITNPVVKRSVSQTVKVINAIILKYGSPQAVSIELAREMSKNFEERRKAEKQMEENRKKNEMAKKEIQELGKLSPNGQDILKYRLWHDQQGICLYTGKKIPLEELFQPGYDIDHILPYSITFDDSYRNKVLVTSQANREKGNRTPYEYFGQDEVRWSAYEARVNHFIKDYKKRRNLLKQGFTKEDRREFKERNLNDTKYITRVIYNMIRQNLEMEHLNREDRKKQVFAVNGSITAYLRKRWGLMQKDRSTDTHHAMDAVVVACCTDGMIQKISRSTQYREVLYKGQSHPDYEIVDVETGEIISLEDLSREEWDERYGAQVPPPWNYFVEELKVRMGSDPKNDLDTHPDMYQLFRYPEDVYNNIRPIFVSRMPNHKVTGAAHADTIRSPRHYNDGGEIFDDSGYVLSRTNIEDLKLDKDGEIKDYYNKDSDRLLYEALKARLAEYDGDGKKAFAEEFYKPKADGTQGPIVKKVKTYKKMSLGVEINKDEAGVGRGIAENANGGMIRVDVFRENGKYYFVPIYIADALKKRLPNKAAMQNKPYSEWKEMKDENFLFSLYSRDLIGFKNPKGKKVTCVSGETMTVTKDIVYYIGADIATASISGIAHDRSYRFKSLGIQSLQELKKYQVDVLGNVTEVRQEKRRGFQ

SEQ ID NO: 17458 - protein, 1161 aa, unidentified
  REGION 1..1161: note = Cas Enzyme sequence
MGEMSKTNMDRHRSYRIGLDIGIASVGWAVLENNSQDEPIRILDLGVRIFEAAEVPKTGAALAAERRDARTARRRIRRRRHRLERIKWLFEREGLIQIDSFMERYHSPNLPDVYELRYEGLERKLSNEEFAQVLLHIAKHRGFRSTRKAELKEGDNGKVLKATEENRERMEEHGYRTVGEMIYKDAYFHTECAWADNGYLLTPRNKADDYSHTMLRTLLEEEVHILFDSQRKFGNEKATEKLEQEYLEIMLSQRSFDMGPGQQADGTPSPYAMEGFGNKVGYCTLERESGERRAAKATYTAELFVALQKITHMKLVHMDGTSRFFTEEERNILLEMLSSKKEIKYAAVRKKLNLPLEEKFNTLNYNMKRKGKDNEEEEVDEAAIIAATEKATFVSMSNCYEYRKRIGDYLETLPEEEQQDLLDEIGTILTCYKNDDSRMSRLTEAGLSKELADSLLELTPAKFQHLSIKAMKKIMPYMKEGMVYDKACEVAGYDFKNDNHGKKMKLLKGENITEIINEITNPVVKRSVSQTVKVINAIILKYGSPQAVSIELAREMSKNFEERRKAEKQMEENRKKNEMAKKEIQELGKLSPNGQDILKYRLWHEQQGICLYTGKKIPLEELFQPGYDIDHILPYSITFDDSYRNKVLVTSQANREKGNRTPYEYFGQDEVRWSAYEARVNHFIKDYKKRRNLLKQGFTKEDRREFKERNLNDTKYITRVIYNMIRQNLEMEPLNREDRKKQVFAVNGSITAYLRKRWGLMQKDRSTDTHHAMDAVVVACCTDGMIQKISRSTQYREILYKGQSHPDYEIVDVETGEIISLEDLSREEWDERYGAQVPPPWEHFKEELEVRMGSDPKNDLDTHPDMYQLFRYPEDVYNNIRPIFVSRMPNHKVTGAAHADTIRSPRHYKDGGEIFADGGYVLSRTNIEDLKLDKDGEIKDYYNKDSDRLLYEALRARLAEYDGDGKKAFAEKFYKPKADGTQGPVVKKVKTYKKMSLGVEINKDENGMGRGIAENANGGMIRVDVFRENGKYYFVPIYIADALKKRLPNKAAMQNKPYSEWKEMKDENFLFSLYSRDLIGFKNPKGKKVTCVSGETMTVTEDIVYYVGADIHTASFLGKSHDSGYEYRGLGIQSLQELKKYQVDVLGNVTEVRQEKRRGFQ

SEQ ID NO: 17459 - protein, 1166 aa, unidentified
  REGION 1..1166: note = Cas Enzyme sequence
  REGION 627..635: note = misc_feature - Xaa can be any naturally occurring amino acid
MGEMSKTNMDRHRSYRIGLDIGIASVGWAVLENNSQDEPIRILDLGVRIFEAAEDSQTGAALAAKRRDARTARRRIRRRRHRLERIKWLFEREGLIQIDSFTERYHSPNLPDVYELRYEGLERKLSNEEFAQVLLHIAKHRGFRSTRKAELKEGDNGKVLKATEENRKRMEEHGYRTVGEMIYKDAYFHTECAWADNGYLLTPRNKADDYSHTMLRALLEEEVHILFDSQRKFGNEKATEKLEQEYLEIMLSQRSFDMGPGQQADGTPSPYAMEGFGNKVGYCTLERESGERRAAKATYTAELFVALQKITHMKLVHMDGTSRFFTEEERNILLEMLSSKKEIKYAAVRKKLNLPLEEKFNTLNYNMKRKGKDNEEEGMDEAAIIAATEKATFISMSNCYEYRKRIGEYLETLPEEEQQDLLDEIGTILTCYKNDDSRMNRLTEAGLSKELADSLLELTPAKFQHLSIKAMKKIMPYMKEGMVYDKACEAAGYDFKNDNHGKKMKLLKGENITETINEITNPVVKRSVSQTVKVINAIILKYGSPQAVSIELAREMSKNFEERRKAEKQIEENRKKNEMAKKEIQELGKLSPNGQDILKYRLWHDQQGICLYTGKKIPLEELFQPGXXXXXXXXXHILPYSITFDDSYRNKVLVTSQANREKGNRTPYEYFGQDEVRWSAYEARVNHFIKDYKKRRNLLKQGFTKEDRREFKERNLNDTKYITRVIYNMIRQNLEMEPLNREDRKKQVFAVNGSITAYLRKRWGLMQKDRSTDTHHAMDAVVVACCTDGMIQKISRSTQYREVLYKGQSHPDYEIVDVETGEIISLEDLSREEWDERYGAQVPPPWEHFKEELEVRMGSDPKNDLDAHPDMYQLFRYPEDVYNNIRPIFVSRMPNHKVTGAAHEATIRSPRHYKDGGEIFENGGYVLSRINIENLKLDKDGEIKDYYNKDSDRLLYEALRARLAEYDGDGKKAFAEKFYKPKADGTQGPIVKNVKTYKKMSLGVEINKDEAGVGRGIAENANGGMIRVDVFRENGKYYFVPIYIADALKKRLPNKASVANKPYSEWKEMKDENFLFSLYSRDLIGFKNPKGKKVTCVSGETMTITEDIVYYIGADINTASILGIAHDRSYRFKSLGIQSLQELKKYQVDVLGNVTEVRQEKRRGFQ

SEQ ID NO: 17460 - protein, 1161 aa, unidentified
  REGION 1..1161: note = Cas Enzyme sequence
MGEMSKTNMDRHRSYRIGLDIGIASVGWAVLENNSQDEPIRILDLGVRIFEAAEVPKTGAALAAERRDARTARRRIRRRRHRLERIKWLFEREGLIQIDSFMERYHSPNLPDVYELRYEGLERKLSNEEFAQVLLHIAKHRGFRSTRKAELKEGDNGKVLKATEENRERMEEHGYRTVGEMIYKDAYFHTECAWADNGYLLTPRNKADDYSHTMLRALLEEEVHILFDSQRKFGNEKATEKLEQEYLEIMLSQRSFDMGPGQQADGTPSPYAMEGFGNKVGYCTLERESGERRAAKATYTAELFVALQKITHMKLVHMDGSSRFFTEEERNILLEMLSSKKEIKYAAVRKKLNLPLEEKFNTLNYNMKRKGKDNKEEEVDEAAIIAATEKATFISMSNCYEYRKRIGEYLETLPEEEQQDLLDEIGTILTCYKNDDSRMNRLTEAGLSKELADSLLELTPAKFQHLSIKAMKKIMPYMKEGMVYDKACEAAGYDFKNDNHGKKMKLLKGENITEIINEITNPVVKRSVSQTVKVINAIILKYGSPQAVSIELAREMSKNFEERKKAEKQIEENRKKNEMAKKEIQELGKLSPNGQDILKYRLWHDQQGICLYTGKKIPLEELFQPGYDIDHILPYSITFDDSYRNKVLVTSQANREKGNRTPYEYFGQDEVHWSAYEARVNHFIKDYKKRRNLLKQGFTKEDRREFKERNLNDTKYITRVIYNMIRQNLEMEPLNREDRKKQVFAVNGSITAYLRKRWGLMQKDRSTDTHHAMDAVVVACCTDGMIQKISRSTQYREVLYKGQYHPDYEILDVDTGEIISLEDLSREEWDKRYGAQIPPPWNYFVEELKVRMGSDPKNDLDTHPDMYQLFRYPEDVYNNIRPIFVSRMPNHKVTGAAHADTIRSPRHYKDGGEIFADGGYVLSRTNIEDLKLDKDGEIKDYYNKDSDRLLYEALKARLAEYEGDGKKAFAEKFYKPKADGTQGPVVKKVKTYKKMSLGVEINKDENGMGRGIAENANGGMIRVDVFRENGKYYFVPIYIADALKKRLPNKAAMQNKPYSEWKEMKDENFLFSLYSRDLIGFKNPKGKKVKCKDGKEIVLTNEIVYYVGANINTASISCKAHDNQYEFGSFGIQSLQELKKYQVDVLGNITEVRQEKRRGFH

SEQ ID NO: 17461 - protein, 1161 aa, unidentified
  REGION 1..1161: note = Cas Enzyme sequence
MGEMSKTNMDRHRSYRIGLDIGIASVGWAVLENNSQDEPIRILDLGVRIFEAAEDSQTGAALAAKRRDARTAGRRIRRRRHRLERIKWLFEREGLIQIDSFTERYHSPNLPDVYELRYEGLERKLSNEEFAQVLLHIAKHRGFRSTRKAELKEGDNGKVLKATEENRKRMEEHGYRTVGEMIYKDAYFHTECAWADNGYLLTPRNKADDYSHTMLRALLEEEVHILFDSQRKFGNEKATEKLEQEYLEIMLSQRSFDMGPGQQADGTPSPYAMEGFGNKVGYCTLERESGERRAAKATYTAELFVALQKITHMKLVHMDGSSRFFTEEERNILLEMLSSKKEIKYAAVRKKLNLPLEEKFNTLNYNMKRKGKDNKEEEVDEAAIIAATEKATFISMSNCYEYRKRIGEYLETLPEEEQQDLLDEIGTILTCYKNDDSRMNRLTEAGLSKELADSLLELTPAKFQHLSIKAMKKIMPYMKEGMVYDKACEAAGYDFKNDNHGKKMKLLKGENITEIINEITNPVVKRSVSQTVKVINAIILKYGSPQAVSIELAREMSKNFKERKKAEKQIEENRKKNEMAKKEIQELGKLSPNGQDILKYRLWHDQQGICLYTGKKIPLEELFQPGYDIDHILPYSITFDDSYRNKVLVTSQANREKGNRTPYEYFGQDEVHWSAYEARVNHFIKDYKKRRNLLKQGFTKEDRREFKERNLNDTKYITRVIYNMIRQNLEMEPLNREDRKKQVFAVNGSITAYLRKRWGLMQKDRSTDTHHAMDAVVVACCTDGMIQKISRSTQYREVLYKGQSHPDYEIVDVETGEIISLEDLSREEWDERYGAQVPPPWEHFKEELEVRMGSDPKNDLDAHPDMYQLFRYPEDVYNNIRPIFVSRMPNHKVTGAAHADTIRSPRHYKDGGEIFADGGYVLSRTNIEDLKLDKDGEIKDYYNKDSDRLLYEALRARLAEYDGDGKKAFAEEFYKPKADGTQGPIVKKVKTYKKMSLGVEINKDEAGVGRGIAENANGGMIRVDVFRENGKYYFVPIYIADALKKRLPNKAAMQNKPYSEWKEMKDENFLFSLYSRDLIGFKNPKGKKVKCKDGKEIVLTKEIVYYVGANINTASISCKAHDNQYEFGSFGIQSLQELKKYQVDVLGNITEVRQEKRRGFH

SEQ ID NO: 17462 - protein, 1019 aa, unidentified
  REGION 1..1019: note = Cas Enzyme sequence
MGEMSKTNMDRHRSYRIGLDIGIASVGWAVLENNSQDEPIRILDLGVRIFEAAEVPKTGAALAAERRDARTARRRIRRRRHRLERIKWLFEREGLIQIDSFMERYHSPNLPDVYELRYEGLERKLSNEEFAQVLLHIAKHRGFRSTRKAELKEGDNGKVLKATEENRERMEEHGYRTVGEMIYKDAYFHTECAWADNGYLLTPRNKADDYSHTMLRALLEEEVHILFDSQRKFGNEKATEKLEQEYLEIMLSQRSFDMGPGQQADGTPSPYAMEGFGNKVGYCTLERESGERRAAKATYTAELFVALQKITHMKLVHMDGSSRFFTEEERNILLEMLSSKKEIKYAAVRKKLNLPLEEKFNTLNYNMKRKGKDNKEEEVDEAAIIAATEKATFISMSNCYEYRKRIGEYLETLPEEEQQDLLDEIGTILTCYKNDDSRMNRLTEAGLSKELADSLLELTPAKFQHLSIKAMKKIMPYMKEGMVYDKACEAAGYDFKNDNHGKKMKLLKGENITEIINEITNPVVKRSVSQTVKVINAIILKYGSPQAVSIELAREMSKNFEERKKAEKQIEENRKKNEMAKKEIQELGKLSPNGQDILKYRLWHDQQGICLYTGKKIPLEELFQPGYDIDHILPYSITFDDSYRNKVLVTSQANREKGNRTPYEYFGQDEVHWSAYEARVNHFIKDYKKRRNLLKQGFTKEDRREFKERNLNDTKYITRVIYNMIRQNLEMEPLNREDRKKQVFAVNGSITAYLRKRWGLMQKDRSTDTHHAMDAVVVACCTDGMIQKISRSTQYREVLYKGQYHPDYEILDVDTGEIISLEDLSREEWDKRYGAQIPPPWKHFKEELEVRMGSDPKNDLDAHPDMYQLFRYPEDVYNNIRPIFVSRMPNHKVTGAAHADTIRSPRHYKDGGEIFADGGYVLSRTNIEDLKLDKDGEIKDYYNKDSDRLLYEALRARLAEYDGDGKKAFAEEFYKPKADGTQGPIVKKVKTYKKCLLVWKSIRMKPELDAELPKMQMAV

SEQ ID NO: 17463 - protein, 1159 aa, unidentified
  REGION 1..1159: note = Cas Enzyme sequence
  REGION 1115..1118: note = misc_feature - Xaa can be any naturally occurring amino acid
MGEMSKTNMDRHRSYRIGLDIGIASVGWAVLENNSQDEPIRILDLGVRIFEAAEVPKTGAALAAERRDARTARRRIRRRRHRLERIKWLFEREGLIQIDSFMERYHSPNLPDVYELRYEGLERKLSNEEFAQVLLHIAKHRGFRSTRKAELKEGDNGKVLKATEENRKRMEEHGYRTVGEMIYKDAYFHTECAWADNGYLLTPRNKADDYSHTMLRTLLEEEVHILFDSQRKFGNEKATEKLEQEYLEIMLSQRSFDMGPGQQADGTPSPYAMEGFGNKVGYCTLERESGERRAAKATYTAELFVALQKITHMKLVHMDGTSRFFTEEERNILLEMLSSKKEIKYAAVRKKLNLPLEEKFNTLNYNMKRKGKDNEEEEVDEAAIIAATEKATFVSMSNCYEYRKRIGDYLETLPEEEQQDLLDEIGTILTCYKNDDSRMSRLTEAGLSKELADSLLELTPAKFQHLSIKAMKKIMPYMKEGMVYDKACEVAGYDFKNDNHGKKMKLLKGENITEIINEITNPVVKRSVSQTVKVINAIILKYGSPQAVSIELAREMSKNFEERRKAEKQMEENRKKNEMAKKEIQELGKLSPNGQDILKYRLWHEQQGICLYTGKKIPLEELFQPGYDIDHILPYSITFDDSYRNKVLVTSQANREKGNRTPYEYFGQDEVRWSAYEARVNHFIKDYKKRRNLLKQGFTKEDRREFKERNLNDTKYITRVIYNMIRQNLEMEPLNREDRKKQVFAVNGSITAYLRKRWGLMQKDRSTDTHHAMDAVVVACCTDGMIQKISRSTQYREILYKGQSHPDYEIVDVETGEIISLEDLSREEWDERYGAQVPPPWEHFKEELEVRMGSDPKNDLDTHPDMYQLFRYPEDVYNNIRPIFVSRMPNHKVTGAAHADTIRSPRHYKDGGEIFADGGYVLSRTNIEDLKLDKDGEIKDYYNKDSDRLLYEALRARLAEYDGDGKKAFAEKFYKPKADGTQGPVVKKVKTYKKMSLGVEINKDENGMGRGIAENANGGMIRVDVFRENGKYYFVPIYIADALKKRLPNKAAMQNKPYSEWKEMKDENFLFSLYSRDLIGFKNPKGKKVTCVSGETMTVTEDIVYYVGADIHTAXXXXHDSGYEYRGLGIQSLQELKKYQVDVLGNVTEVRQEKRRGFQ

SEQ ID NO: 17464 - protein, 1161 aa, unidentified
  REGION 1..1161: note = Cas Enzyme sequence
MGEMSKTNMDRHRSYRIGLDIGIASVGWAVLENNSQDEPIRILDLGVRIFEAAEVPKTGAALAAERRDARTARRRIRRRRHRLERIKWLFEREGLIQIDSFMERYHSPNLPDVYELRYEGLERKLSKEEFAQVLLHIAKHRGFRSTRKAELKEGDNGKVLKATEENRKRMEEHGYRTVGEMIYKDAYFHTECAWADNGYLLTPRNKADDYSHTMLRALLEEEVHILFDSQRKFGNEKATEKLEQEYLEIMLSQRSFDMGPGQQADGTPSPYAMEGFGNKVGYCTLERESGERRAAKATYTAELFVALQKITHMKLVHMDGTSRFFTEEERNILLEMLSSKKEIKYVAVRKKLNLPLEEKFNTLNYNMKRKGKDNEEEGMDEAAIIAATEKATFISMSNCYEYRKRIGEYLETLPEEEQQDLLDEIGTILTCYKNDDSRMNRLTEAGLSKELADSLLELTPAKFQHLSIKAMKKIMPYMKEGMVYDKACEAAGYDFKNDNHGKKMKLLKGENITEIINEITNPVVKRSVSQTVKVINAIILKYGSPQAVSIELAREMSKNFEERKKAEKQIEENRKKNEMAKKEIQELGKLSPNGQDILKYRLWHDQQGICLYTGKKIPLEELFQSGYDIDHILPYSITFDDSYRNKVLVTSQANREKGNRTPYEYFGQDEVHWSAYEARVNHFIKDYKKRRNLLKQGFTKEDRREFKERNLNDTKYITRVIYNMIRQNLEMEPLNREDRKKQVFAVNGSITAYLRKRWGLMQKDRSTDTHHAMDAVVVACCTDGMIQKISRSTQYREVLYKGQSHPDYEIVDVETGEIISLEDLSREEWDERYGAQVPPPWEHFKEELEVRMGSDPKNDLDAHPDMYQLFRYPEDVYNNIRPIFVSRMPNHKVTGAAHADTIRSPRHYKDGGEIFADGGYVLSRTNIEDLKLDKDGEIKDYYNKDSDRLLYEALRARLAEYDGDGKKAFAEEFYKPKADGTQGPIVKKVKTYKKMSLGVEINKDEAGVGRGIAENANGGMIRVDIFRENGKYYFVPIYIADALKKRLPNKAAMQNKPYSEWKEMKDENFLFSLYSRDLIGFKNPKGKKVKCKDGKEIVLTKEIVYYVGANINTASISCKAHDNQYEFGSFGIQSLQELKKYQVDVLGNITEVRQEKRRGFH

SEQ ID NO: 17465 - protein, 1168 aa, unidentified
  REGION 1..1168: note = Cas Enzyme sequence
MSGEATELTTTPISYRLGLDIGANSVGWAALRLSDESADAGRVQGLLAAGVRIFEAGVEGSIEQGKDGSRAVARRLARQQRRQTWRRQFRKRQLFVLLQRHGLLPEAEDSSSAGRDAVLKPLDQELTGRWCSAGDLESHQKLPYLLRAAAAERILEPFELGRAIYHLGQRRGYKANRRTPEGDDEQQGAVSGGISLLDQARLRDPADPASLRTLAQTVVEEFRFSGGHFAIRSEAAESSRRGRVRGHYTSRQMYIQEFEAIRNFQLANGGPLSAKTWTLLEKVLFRQRPLKSQSHLVGRCTLEKDRFGRGRRRSLMALSDFQEFRLLQSLNHLMIVQDDRTEKPLMPGQKEILYDHLMREGDLKLRTRAARGKTAAASVISLLGLAKNTQFSLRSPEESEEDDVRLIGHRTNAKIRAVLGGEWDDMAESQQEKLILQLVYAADPERLSLWLTLHFGFNEPLARQVAGITLEEQHASLSRRAIRRLLPRLRAGESYAAARQAVYPDSLRATAAAEKLPPVTTWNREINNPAVIRALTEVRRVVNSLIQRFGKPAAIHVELARDLKRSRKERTQLWKQNEDNQKLRDRAKVEIVEQLGYSSPSRADVEKWLLAEECNWQCPYTGRPISAATLKHFDVEHIYPRQYLDDSFGNKTLSDPEFNRARKRNRLPSEVLEGAEWADVLTRVRHFKGRFAEAKLRRFQAESVPEDFVSRQLNDTRYNSRLAAQFVSLLYGGRNDADRQQRIVTPTGGLTWLIRRGFGLDRILSDGDYKERSDHRQHAVDAICVALSSQKVIQRLSGLAEQVSQSSQRFNAFLSEFAKELPWPTFHEDAVQAIQGIIVSHRPQRAIGGPLHAETYYSKPLPAPAPVESDGARGKGGRSKVTEHRVRKSIDSLKKKDIEGDAIVDLAVRAAVQRKYAELASAAGSASAADPKKLWGNRADTRRFPRLPPSRAKSGRSGEAGGSIIFKVRVRTSVNAKTVGKGVTQRYVAAGVDANFAAMVYEIASADGRSLRWVHEVVTRLDAHQKLVERRRLLRESSSKGEALGAIGQTVSESFGELILLPRTRDDFATMSNPPFAVSPDDSIRFVCAFRKNDLLELDVSDGRLIYRVQNFSTGEIQLCEHFRQIVDKKDRNTSNRITATDALRRRRLRVVHVTPSGEIRNVETLQH

SEQ ID NO: 17466 - protein, 1046 aa, unidentified
  REGION 1..1046: note = Cas Enzyme sequence
MTNQHAPYVLGIDLGTNSIGWAMIRFDDTRPVELVDMGVRIFEAGTTGDIESGKDESRAIERRAARQRRRQTDRQSRRLRSLALVLQEHGLLPEGELKTGSDRHAFFLQLDGELRNHYAEQGIALNCAAGLREFPYYLRAKALDEKMPLHATGRALYHLAQRRGFLSNRKTDSNDKETGPVKEGISDLAQKIKQANMRTLGEYLFNIDPVHEKRIRGRWTARSMYEEEFNLIWEAQSRWHPQLNNENIRGNIHKAIFYQRPLKSQAGTVGYCDLEPFKKRAPKALVVSQQFRILQKINDLTVHFADGDVRPLNNDERVSLFEYMNERESVTFKQIRKRLSLPPDTEFNLERGGEKKLPGNVTEARLLKIFGKNWHSFNDAFHHEIISLIMGSEKAESVRKLGKNKYGLDDDQAEKFSRLQFENGYMSLSKKAMTKLLPLMKEGVSFKTAEKKLYDNPRNLCLDFLPPLHTHKNDRFSPQPDAGLDIRNPVVTRSLTELRRVVNNIIAKYGKPLRIHVELARDIKRNREQRKLISTENRDRQRSRESIVAQIKEKLGEHYMPSEQDIEKVLLMRECRCICPYTGRTINMENLLGDHPQFDIEHIIPFSRSLSNSFANKTLCYHEENRNRKRNKTPWEAYGNTDQWDQIVTRVKSFCGPTARIKLERFQLRDLSSLDEMSSQQLNDTRYASKIAARYLGLLYGENAMRHIQTSTGQITAYLRAGWHLNRILSTQGIKNRDDHRHHALDAIVIALTSRSAIQTLSKAAGSAYNAKGRTRTFLNQIEEPWEGFLPEVQEMADNLFISRRINRRVRGRLHEDTNYGYPRTDENGKQWHPIRKVLTETFKDTDIDNIIDPVVQDCVRTHFEANGSNPQKAFADPDNHPRMHDGTVIHKVRCKRTVSTTPIGSGDGTRFVATDTNHHMEIVETQNKNGEIIWEDHVVSLMEAVQRHKAGLPVIKRDHGPGSTFIYSLFKGDTCTITENDETIYCTVIGIAVGEVTLVRMYDARKQVEIRQTKSRIRCNANSLRKKQLRKLLITPLGEVIPAND

SEQ ID NO: 17467 - protein, 1024 aa, unidentified
  REGION 1..1024: note = Cas Enzyme sequence
MIRLEDTLPVELMDMGVRIFEAGTTGDIESGKDESRAIERRAARQRRRQTDRQSRRLRTLALVLQEHGLLPEGELKTGSDRHAFFLQLDGELRNHYAEQGIALNCAAGLREFPYYLRAKALDEKMPLHATGRALYHLAQRRGFLSNRKTDSNDKETGPVKEGISDLAQKIKQANMRTLGEYLFNIDPVHEKRIRGRWTARSMYEEEFNLIWEAQSRWHPQLNNENIRGNIHKAIFYQRPLKSQAGTVGYCDLEPFKKRAPKALVVSQQFRILQKINDLTVHFADGDVRPLNNDERVSLFEYMNERESVTFKQIRKRLSLPPDTEFNLERGGEKKLPGNVTEARLLKIFGKNWHSFNDAFHHEIISLIMGSEKAESVRKLGKNKYGLDDDQAEKFSRLQFENGYMSLSKKAMTKLLPLMKEGVSFKTAEKKLYDNPRNLCLDFLPPLHTHKNDRFSPQPDAGLDIRNPVVTRSLTELRRVVNNIIAKYGKPLRIHVELARDIKRNREQRKLISTENRDRQRSRESIVAQIKEKLGEHYMPSEQDIEKVLLMRECRCICPYTGRTINMENLLGDHPQFDIEHIIPFSRSLSNSFANKTLCYHEENRNRKRNKTPWEAYGNTDQWDQIVTRVKSFCGPTARIKLERFQLRDLSSLDEMSSQQLNDTRYASKIAARYLGLLYGENAMRHIQTSTGQITAYLRAGWHLNRILSTQGIKNRDDHRHHALDAIVIALTSRSAIQTLSKAAGSAYNAKGRTRTFLNQIEEPWEGFLPEVQEMADTLFISRRINRRVRGRLHEDTNYGYPRTDENGKQWHPIRKVLTETFKDTDIDNIIDPVVQDCVRTHFEANGSNPQKAFADPDNHPRMHDGTVIHKVRCKRTVSTTPIGSGDGTRFVATDTNHHMEIVETQNKNGEIIWEDHVVSLMEAVQRHKAGLPVIKRDHGPGSTFIYSLFKGDTCTITENDETIYCTVIGIAVGEVTLVRMYDARKQVEIRQTKSRIRCNANSLRKKQLRKLLITPLGEVIPAND

SEQ ID NO: 17468 - protein, 1024 aa, unidentified
  REGION 1..1024: note = Cas Enzyme sequence
MIRLEDTLPVELMDMGVRIFEAGTTGDIESGKDESRAIERRAARQRRRQTDRQSRRLRTLALVLQEHGLLPEGELKTGSDRHAFFLQLDGELRNHYAEQGIALNCAAGLREFPYYLRAKALDEKMPLHATGRALYHLAQRRGFLSNRKTDSNDKETGPVKEGISDLAQKIKQANMRTLGEYLFNIDPVHEKRIRGRWTARSMYEEEFNLIWEAQSRWHPQLYNENIRWNIHKAIFYQRPLKSQAGTVGYCDLEPFKKRAPKALVVSQQFRILQKINDLTVHFADGDVRPLNNDERVSLFEYMNERESVTFKQIRKRLSLPPDTEFNLERGGEKKLPGNVTEARLLKIFGKNWHSFNDAFHHEIISLIMGSEKAESVRKLGKNKYGLDDDQAEKFSRLQFENGYMSLSKKAMTKLLPLMKEGVSFKTAEKKLYDNPRNLCLDFLPPLHTHKNDRFSPQPDAGLDIRNPVVTRSLTELRRVVNNIIAKYGKPLRIHVELARDIKRNREQRKLISTENRDRQRSRESIVAQIKEKLGEHYMPSEQDIEKVLLMRECRCICPYTGRTINMENLLGDHPQFDIEHIIPFSRSLSNSFANKTLCYHEENRNRKRNKTPWEAYGNTDQWDQIVTRVKSFCGPTARIKLERFQLRDLSSLDEMSSQQLNDTRYASKIAARYLGLLYGENAMRHIQTSTGQITAYLRAGWHLNRILSTQGIKNRDDHRHHALDAIVIALTSRSAIQTLSKAAGNAYNAKGRTRTFLNQLEEPWEGFLPEVQEMADNLFISRRINRRVRGRLHEDTNYGYPRTDENGKQWHPIRKVLTETFKDTDIDNIIDPVVQDCVRTHFEANGSNPQKAFADPDNHPRMHDGTVIHKVRCKRTVSTTPIGSGDGTRFVATDTNHHMEIVETQNKNGEIIWEDHVVSLMEAVQRHKAGLPVIKRDHGPGSTFIYSLFKGDTCTITENDETIYCTVIGIAVGEVTLVRMYDARKQVEIRQTKSRIRCNANSLRKKQLRKLLITPLGEVIPAND

SEQ ID NO: 17469 - protein, 1046 aa, unidentified
  REGION 1..1046: note = Cas Enzyme sequence
MTNQHAPYVLGIDLGTNSIGWAMIRFDDTRPVELVDMGVRIFEAGTTGDIESGKDESRAIERRAARQRRRQTDRQSRRLRSLALVLQEHGLLPEGELKTGSDRHAFFLQLDSELRNHYAEQGIALNCAAGLREFPYYLRAKALDEKMPLHATGRALYHLAQRRGFLSNRKTDSNDKETGPVKEGISDLAQKIKQANMRTLGEYLFNIDPVHEKRIRGRWTARSMYEEEFNLIWEAQSRWHPQLYNENIRWNIHKAIFYQRPLKSQAGTVGYCDLEPFKKRAPKALVVSQQFRILQKINDLTVHFADGDVRPLNNDERVSLFEYMNERESVTFKQIRKRLSLPPDTEFNLERGGEKKLPGNVTEARLLKIFGKNWHSFNDAFHHEIISLIMGSEKAESVRKLGKNKYGLDDDQAEKFSRLQFENGYMSLSKKAMTKLLPLMKEGVSFKTAEKKLYDNPRNLCLDFLPPLHTHKNDRFSPQPDAGLDIRNPVVTRSLTELRRVVNNIIAKYGKPLRIHVELARDIKRNREQRKLISTENRDRQRSRESIVAQIKEKLGEHYMPSEQDIEKVLLMRECRCICPYTGRTINMDNLLGDHPQFDIEHIIPFSRSLSNSFANKTLCYHEENRNRKRNKTPWEAYGNTDQWDQIVTRVKSFCGPTARIKLERFQLRDLSSLDEMSSQQLNDTRYASKIAARYLGLLYGENAMRHIQTSTGQITAYLRAGWHLNRILSTQGIKNRDDHRHHALDAIVIALTSRSAIQTLSKAAGNAYNAKGRTRTFLNQLEEPWEGFLPEVQEMADNLFISRRINRRVRGRLHEDTNYGYPRTDENGKQWHPIRKVLTETFKDTDIDNIIDPVVQDCVRTHFEANGSNPQKAFADPDNHPRMHDGTVIHKVRCKRTVSTTPIGSGDGTRFVATDTNHHMEIVETQNKNGEIIWEDHVVSLMEAVQRHKAGLPVIKRDHGPGSTFIYSLFKGDTCTITENDETIYCTVIGIAVGEVTLVRMYDARKQVEIRQTKSRIRCNANSLRKKQLRKLLITPLGEVIPAND

SEQ ID NO: 17470 - protein, 1031 aa, unidentified
  REGION 1..1031: note = Cas Enzyme sequence
VASDSNFSYILGLDLGTSSIGWGLIRTQPAPRDVLAAGVRIFPEGMDRTRGEKSLNQDRRLSRSLRRQICRRARRKAKLLHALQEIGLLPADESQLKLLLQNEDPYKLRALALDEKLEPWQVGRALYHLGQRRGYLSNRKTGSDKDGKVAAGISGLQNNIDAANCRTLGEYFHKVDPHQERIRGHYTSRAQYEHEFELIWATQARYHPAVLDIANKKRIKEAIFFQRPLKTQKFLVGGCEFEPGRKRAQKGSLAAQEFRLWQTINNLKILYSDGSERYLTDEERVSLHDELQARKNLSWAGVRTLLGLLESTRFNLERVRKSGLQGNITAATISSVLGKKTWKALGSQGQEQLVADLLNIENESALRNRLRRAYGVDSDKEDKLIAKSLGLPKGYLHVSAKAARKIAAELARTGHDNGRGLTYDQACSAAGYIHTKPLEKGNRNLLPFPGRPARDKRDRTVEHDPLVANSLVTVDNLRNPLVERAIYQLRRVVNAIIKKYGKPALIRIELARDLKSSKKQRENYEKQQKINEEANKRAAKALVDYGIPNPSRSDLLKYRLWEECGRTCPYTGKSISQDALFGDHPQFDVEHIIPYTRCLDDSYMNKTLCYRPENEAKGNLTPWEFYHQNEKSYEAVLQRAKKLPYPKFKRFARDALKDLDEFVSQQLNETRYISRKAVEYLSQLDGVRIETVKGGTTALLRRAWGLNNILDAGGEKTRMDHRHHAVDAIVCALTDRAAVQKISRYSAMSQGRLRISGYPEPIKDIRIKVENILNKVLVSHKTLRKVSGPLHDDTLYGKGLNEEGESRAVIRKKISELNEKDILGEGRSIIRDPAIRRLARAHLKKHGTFKNAFQNKDNPFGRTTRSGKFIPINRVRVLTDRSVVPIGKPGKKGRSGTLRYVWTRNNHHMEIFEVRKPSGETVWDARVISVLEAMRRLQRGEPLVRRDHGKDKKLVMVLHQNDMVKLSHNGEEVLCRVEKMDQNRNIVFRRHQDADKDWRSSIKKRPETLRQANPRKIEVNVLGEIIQESAV

SEQ ID NO: 17471 - protein, 925 aa, unidentified
  REGION 1..925: note = Cas Enzyme sequence
MLCFLNNIKIQTPKDKDLRPLTEEERKKVMPKFYRKSKPSFNFEDIAKELSGKGKYAYYKAPKGKPYLFNYHMDTSVAGCPVTSGLRDVFGEDWVDALCEVYDKALGKTRLQIINDIWHVLFDFSDEYKLIEFGKTHLQLSDEDAKKFSQIKVCSDYASLSLNAICKILPYLRRGMIYSLSTFFANMGAVVPANIWKEKTNRDKIIKEIISAIADKENNAADSRTTERVIKDYLISRYGVSEEETDKLYHPSMVESYPHVPENENKLGSPRIDSVRNPMAMRSLFRLRHVVNTLLAEGKIDRDTTIHIEFARDLNDANKRQALYRFVKENENERKKIKAEILQLYKDETGLTIEPTDTDILKYQLWEEQNHRCIYTDEQISITDFLGDNPKYDIEHTIPRSAGGDSTKMNLTLCNSKFNREIKQTLLPSQLANYKDILLRIQGWKDNYEELDKRIRKIRTSSSMSKEQKDSLIQKRNLLKLRRDYWYGKYQRFLMTEVPEGFSRRQGTDISVISKYGRLYLKSFFNRVFVVKGLATSDFRKIWGIQDIYSKKERVNHVHHCIDAIVIACLGPGEYGKLAEYYRDEENHEWYGASKGHIAAPWQTFQEDMRKIQKEIVVSHYTSDNIGKTGRHRILLNGKKVWADGDSARASLHNDTYYGAIERNGKVKYVVRKPLDNNFKDSDVDKIVDDMVKTHVKEAIQQYGSLKDAISHGIWMNKEKGIPIRKVRCFTPLKRPLDIRHHRDVSTKVYKQQFHVTSDTNYAMAIYVGQDKKGKEKRSFELISNLDACNYYRKSNDKEIVDNNLVPLAKNDFPLTYVLKKGTMVLLYENTPDEIRECSTEGLVKRLYKVTGLWSNVVSGHEYGIIVLLHSQEARPKGELKAKNGAYKQNEEFRSRIILQHTQFKALVAGYDFQINDVGEIEWLR

SEQ ID NO: 17472 - protein, 1248 aa, unidentified
  REGION 1..1248: note = Cas Enzyme sequence
MEKALNNNIRVILGLDLGVGSIGWALIEVDDADKPVRIVDTGVRVIPLTTEQSDGFVKGNGKSVNQGRTECRTIRKGYDRYQSRRADLKEDISGLGMDYGTELVALPPLTLWKLRADAATPGCRLALPEIGRVLMHINQKRGYKHAKSDLGDRKQTEYVASVNKRYKDIQDAGMTVGQAIYARLEASAVTGENGKVQCTYKAKGEVFPRAAYEAEFDAVMKAQQPFYEDVLTDEAIARLRNIIFYQRPLKSCKHLVSICDFEKRPYVGAQGSIVYSGPKVAPRTSPLAQLCAIWESVNNIVLKSRRNTSTGALFDTEAEGRYELSIDEKRDIVAFMNTHEKLTVTELLKILGLSKKHGFSAGEAVGKGLKGNTTYCRLKKALGNYSGAEDLLRFEVHNVDTGNVDEETGEIILETSNDLMEQPLYKLWHTVYSINDKEELRSALAKKFGIDDDEVVERLYAIDFTKDGFANKSARFMRRLLPYLQQGRMYSEACTYINVNHSNSLTSEEKLRRELKNRLEPLKKNELRQPVVEKILNQMINLVNAVFDRYGHVDEVRVELARELKRSKDERNKMWSDNTKRERENKQYAERILENSIAPSKNRIKKYRMWEESGKLCMYCGQPVNFKEFGEGNGAEIEHILPKSVFFDNSFSNLVCACRKCNQDKGNMTAFDYVKKMLPDKFDSYVEKVEELYENHKISKTKHDRLLMSHTDIPEDFLNRDLRETQYISKKAKELLFSVVRDVTVTTGSVTDFFRHVWGYDEILHNLNLEIYKRSDRTQMMEYIHNGQRHVEERITDWSKRLDHRHHAIDALTVALMKPAYINRLNRLNTERDRMYEELKEQSPEYRRKHSLLEDWSARQPHFSVNEVMEAVKRIAVSLKAGKKVVTPGKRLVYKNGKRVVKQTGILVPRGALTKESVYGKIKVLERNRPLKQLLISPEEIVDAAVRDIIIDALKQNGNDQKKTLNYLKKHPVVVNGREVKAADCYTERFVIKTDIKTLKCKDVESIVDEGVKRAVRRRMEECGNNDSAFQKSLVDRPVYVDKNNRYPVYTVRLFDSWRADAVAPVRKDLSGRPIGYAAKRNNHHVALYKSSGGEIHEIVVPFWDAVLRCRYNLPIVIETPDDVWDDIAGRSDEIPEEVLATLPQPGWKLFMSMQQNEMFILGLTDEEFMDAISEDNKALLTAHLYRVQKLATVNYYFRLHTQTTVDAKNELVDKESRMLYVVQSMKTLSLLNPIKVRINYLGEIIPI

SEQ ID NO: 17473 - protein, 1212 aa, unidentified
  REGION 1..1212: note = Cas Enzyme sequence
MLMSKHVLGLDLGVGSIGWCLIALDAQGDPAEILGMGSRVVPLTNLGDDKAFSKGKAFTASQERTARRTMRRGFARYQLRRYRLRRELEKVGMLPDAALIQLPLMELWELRERAATAGERLTLPELGRVLCHINQKRGYRHVKSDAAAIVGDEGKKKKDSNSAYLADIRANDEKLQDEHKTVGQYFAEQLRQDQSESPTGGISYRIKDQIFSRQCYIDEYDQIMAAQRVHYPDILTDEFIRMLRDEVIFMQRPLKSCKHLVSLCEFEKQEKVMRVQQDDGKGGRQLVERRVKFGPKVAPKSSPLFQLCRIYEAVNNIRLTRPDGSPRDITPEERDKLVAYLQTYEAPKPPKRKPAKAKPVKLAHPKLDLDKLKELLCIEEELLADKLLEEGLKGDATRIALSIILQPYPQYHHLLDMELETRMMTVQLTDEETGEVTEREVAVVTDSYVRQPLYRLWHILYSIEERDAMRRALITQLGMKEEDLDGGLLDQLYRLDFVKPGYGNKSAKFICKLLPQLQQGLGYSEACTAVGYRHSNSPTSEEIAERTLLEKIPLLQRNELRQPLVEKILNQMINLVNALKAEYGIDEVRVELARELKMSRKERERMARNNKDREERNKEVAAKIRECGLYPTKPRIQKYMLWEEAGKVCMYCGRTISLSQCLNGDDMEVEHIIPKSVLYDDSYGNKTCACHECNQTKGNRTALEYIRAEGREAEYMKRINDLLKEKKISYSKHQRLRWLKEDIPSDFLERQLRLTQYISRQAMAILQQGIRRVSASEGGVTARLRSLWGYGKILHTLNLDRYDSMGETERVSREGEATEELRITNWSKRMDHRHHAIDALVVACTRQSYIQRLNRLSSEFGREDKKKEDQEAQEQQATETGRLSNLERWLTQRPHFSVRTVSDKVAEILISYRLGKRVVTRGRNIYLRHGKKCVQSGLLVPRGPLSKETVYGQITVNGEQQIVCKYDLHSLKAKDVDYVVDLALRKRLKELLAQHGGKEKEAFAGDVYMDEAGTQGPIRSVRCFTGLDRDKMKAVKYDEQGDAVGFVSPRNNHHLAIYRTPKGKLEESIVTFWDAVDRARYGIPLVITHPREVMEQVLQREDIPESVLSLLPSSDWMFVESIQRDEMVLVGLSDEEIRQAVEAQDYCKLSEHLYRVQKIATGNYMVRYHLETDTDMNRSGRIPKLYQLSLTSYEEKNVRKVRVDLLGRISLL

SEQ ID NO: 17474 - protein, 1205 aa, unidentified
  REGION 1..1205: note = Cas Enzyme sequence
MSKHVLGLDLGVGSIGWCLIALDAQGDPAEILGMGSRVVPLNNATKAIEAFNAGAAFTANQERTARRTMRRGFARYQLRRYRLRRELEKVGMLPDAALIQLPLLELWELRERAATVGGRLTLPELGRVLCHINQKRGYRHVKSDAAAIVGDEGEKKKDSNSAYLAGIRANDEKLQDEHKTVGQYFAEQLRQNQSESPTGGISYRIKDQIFSRQRYIDEYDQIMVAQRVHYPDILTDAFIRMLRDEVIFMQRPLKSCKHLVSLCEFEKQEKVMRVQQDDGKGGRQLVERRVKFGPKVAPKSSPLFQLCRIYEAVNNIRLTRPDGSPRDITPEERAKIVEHLQSSASLSFAALKKLLKEKALIADQLTTKSGLKGNSTRVALASALQPYPQYHHLLDMELETRMMTVQLTDEETGEVTEREVAVVTDSYVRQPLYRLWHILYSIEERDAMRRALITQLGMKEEDLDGGLLDQLYRLDFVKPGYGNKSAKFICKLLPQLQQGLGYSEACTAVGYRHSNSPTSEEIAERTLLEKIPLLQRNELRQPLVEKILNQMINLVNALKAEYGVDEVRVELARELKMSREERERMTRQNGQRKEANDKVAERIRQCGLYPTKPRIQKYMLWEEAGKVCLYCGRSIEEEQCLNGDDMEVEHIIPKSVLYDDSYGNKTCACHECNQTKGNRTALEYIRAKGWEAEYMERINDLLKEKKISYSKHQRLRWLKEDIPSDFLERQLRLTQYISRQAMAILQQGIRRVSASEGGVTARLRSLWGYGKILHTLNLDRYDSMGETERVSREGEATEELHITNWSKRMDHRHHAIDALVVACTRQSYIQRLNRLSSEFGRGNKKMEDLEAQEQQAKETGRFSNLERWLTQRPHFSVRTVSDKVAEILISYRPGQRVVTRGRNIYRKKTADGREVTCVQRGVLVPRGELMEASLYGKILSQGRERIVKRYPLHDLKGEVVDPRLRELIAVYNQEITSKVKAKGTPLYLDAAEKQEVRSVRCYVDKPSVAKAIPIRFDECGRAITFVKSGSNHHLAIYRTPKGELVESIVSFWDAVNRARYGLPLIIKYPRKAMEQVIQREDIPESVLSLLPPADYEFVEVFQQNEMAVVGLPEEELRRAVDMQDYRTLSEHLYCLKGISSKDYEFHYHLDTDDPDETDSSKKKKKRVRNTSGRIPRIYRIRGIGSRQKKNVHKVRVDLLGRISLL

SEQ ID NO: 17475 - protein, 1181 aa, unidentified
  REGION 1..1181: note = Cas Enzyme sequence
MGSRVVPLTNLGDDKAFSKGEAFTANQKRTARRTMRRGFARYQLRRYRLRRELEKVGMLPDAALIQLPLLELWELRERAATAGECLTLPELGRVLCHINQKRGYRHVKSDAAAIVGDEGEKKKDSNSAYLAGIRANDEKLQDEHKTVGQYFAEQLRQNQSESPTGGISYRIKDQIFSRQRYIDEYDQIMAAQRVHYPDILTDAFIRMLRDEVIFMQRPLKSCKHLVSLCEFEKQEKVMRVQQDDGKGGRQLVERKVKFGPKVAPKSSPLFQLCRIYEAVNNIRLTRPDGSPRDITPEERDKLVAYLQTYEAPKPPKRKPAKAKPVKLAHPKLDLDKLKELLCIEEELFADKLLEEGLKGDATRIALSIILQPYPQYHHLLDMELETRMMTVQLTDEETGEVTEREVAVVTDSYVRQPLYRLWHILYSIEERDAMRRALITQLGMKEEDLDGGLLDQLYRLDFVKPGYGNKSAKFICKLLPQLQQGLGYSEACVAVGYRHSNSPTSEEITERTLLEKIPLLQRNELRQPLVEKILNQMINLVNALKAEYGIDEVRVELARELKMSRKERERMARNNKDREERNKEVAAKIRECGLYPTKPRIQKYMLWEEAGKVCLYCGRSIEEEQCLNGDDMEVEHIIPKSVLYDDSYGNKTCACHECNQTKGNRTALEYIRAKGWEAEYMKRINDLLKEKKISYSKHQRLRWLKEDIPSDFLERQLRLTQYISRQAMAILQQGIRRVSASEGGVTARLRSLWGYGKILHTLNLDRYDSMGETERVSREGETTEELHITNWSKRMDHRHHAIDALVVACTRQSYIQRLNRLSSEFGREDKKKEDQEAQEQQATETGRLSNLERWLTQRPHFSVRTVSDKVAEILISYRPGMRVVTRGRNIYRKKTVDGREVTCVQRGVLVPRGELMEASLYGKILFQGRERIVKRYPLHDLKGEVVDPCLRELIVKSKGAPLYLDAAEKQEVRSVRCYVTQPSVAKAIPIRFDERGRAITFVQSGSNHHLAIYRTPKGKLVESIVSFWDAVNRARYGLPLIIKYPRKAMEQVIQREDIPESVLSLLPPADYEFVEVFQQNEMAVVGLPEEEFRRAVDTQDYRTLSEHLYRLKRISSKDYEFHYHLDTDDPDETDSSKKKKKRVRNTSGRIPRIYRIRGIGPLQKKNVRKVCIDLLGRLSLL

SEQ ID NO: 17476 - protein, 1507 aa, unidentified
  REGION 1..1507: note = Cas Enzyme sequence
MKKILGLDLGTNSIGWALLNAQELENGNGFVFDHIERAGSRIIPMDAAILGDFDKGNSKSQTSERTRFRGVRRLRERHLLRRERLHRVLNLLGFLPGHYLREIDFENHPGKFIASVEPKLPWVKNISGQFEFLFNSSFEEMLNDFKNSQPQLVADGRKIPYDWTIYYLRKKALHEKISKEELVWLLLNFNQKRGYYQLRGEDEEEDRSKRVEFHALKVLSVKATDQKKGKDVWYEVTLENGWIYRRASSLPLDWEGKVKEFIVTTDIAEGGTPKMDKDGNVKRSFRAPKEDDWTLLKKKTEADIEQSNKTIGTYIYDTLLQDPFQKIRGKLIRTIERKYYKAELEAILRKQKEYHQELNSPDVYKKCIEHLYPNNEPHRENIANKDFVYLFLDDIIFYQRPLKTKKSLISDCPFEYRRYKDPKTGEEKISTIKCIAKSNPLYQEFRLWQFISNLRIYQREKEINGQLKIDVDITNEWLKSEEDYAALFEWLNDRKEIKQDTLIQSYFKQKKIKGQTTFPFRWNYVEEKIYPCNETRASILSRLENANISSGFLTKEREVALWHILYSVEDKYEIIKALRTFKEKNQLDDTFVDAFCKFPPFKKEYGAYSEKAIKKLLPLMRRGKFWSESSIDSYTQTRIEKIITGEVDATILERVRDKAIHLSNVTHFQGLPVWLASYVVYNRHAEAQEVIKWQTAEEMDVYINAFKQHSLRNPIVEQVILETLRTVRDIWKEAGQIDEIHVELGRQMKNPKDKRAQMTEQALENENTNLRIKQLLTEFLNPEYEIENVRPYSPMQQEIFRIYEDCALNNSMEVPDEILDVVKKFKEADVKKRPGKSEIMKYKLWLEQKYRSPYTGEIIPLGKLFTPAYEIEHVIPQSRYFDDSFSNKVICEAEVNKLKSNQLGYEFIKNHHGEKVTLGFGKSVEIFSVSAYEEFIKQNYNGLKNRGKMKKMLMEDIPEAFIERQLNDSRYISKVIKGLLSNVVREKDEQDAISKNVITCTGGVTDRLKKDWGINDVWNDIVLPRFERLNRLTDSKQFTRYNERIQKYIPDMPLDLQKGFDKKRIDHRHHAMDAIVIACATRNIVNYLNNESASKRSKFSRYDLQHLLCEKRHTDDKGNYTWLVKKPWESFTQDTRLALENIVVSFKQNLRVINKATNSYQHYDESGKKIFKKQIKGNNWAIRKPMHKETVFGNVNLRKVKYVRLSVALDTPAMIVDKLLKSKVKELLSLKYEKKKIEKYFKENVDDWKEYDFTKVAFYYYTNDTKDRLVAVRKPLDASFNIKKIEESVTDTGIRKILLKHLANNEEKADLAFSSDGIDDLNRNIRMLNDGKEHQPIYKVRVYELQGNKFNVGVTGNKSSKYVEAAKGTNLFFVIYETEEGKRSYESIPLNIVIERQKQGLLSVPEIDENGNKLLFWLSPNDLVYVPSEDEVVNGRIADCLDKNRIYKIVSFTGKRLYGIPYSVANVIVDKFEFSLLNKIEFIGEKEICIPVKISRLGRVLSVGKRL

SEQ ID NO: 17477 - protein, 1509 aa, unidentified
  REGION 1..1509: note = Cas Enzyme sequence
MKKILGLDLGTNSIGWAVVCHSDTDGQTERKWIEMAGSRIIPMDAAILGDFDKGNSKSQTSERTGFRGIRRLRERVLLRRERLHKVLKLIGFLPQHYIDSLDFSNHSGKFQLGTEVKLPWRKNEIGKYEFLFQNSFNEMLADFAKKQPELVAMGRKVPYDWTIYYLRKKALSEKITKEELAWILLNFNQKRGYYQLRGEEEEEKKNRLEDFYALKVVEVEQTDDKKGKDIWYNVHLENGWIYRRSSNVPLDWKDKIKEFIVTTELNEDGTPKVDKDGCVKRSFRMPKEDDWKLLKKKTEADIERSHKTIGCYIYDTLLQSPQQKIKGKLVRTIERKFYKDELRLILDKQQAFHPELQDRELYKACLDVLYPMNVAHKNNVANRGFVYLFMEDILFYQRPLKSKKSLIDNCPYEENQYIDVTTGEIKKAPIKCIAKSHPLYQEFRLWQFIANIRIYQKEKKVDGKLLTDIDVTTEYLSSKDDYVALYEWLCVRKEIEQKTFLKYPAFGLKKEIENYRWNYIEGKSYPCNETRSLILHYLEKAGISSTFLSTKIEESLWHILYSVEDRIELETALRTFASKYQLSCNFVEVFKKFPPFKKEYGAYSAKAIKRLLPLMRMGKYWKVDAIDGNTAERIEKILSGECDEKILNKVREKTIHLSETSDFQGLPLWLACYVVYNRHSEGKEVAKWKSPEDIDIYLKSFKQHSLRNPIVEQVITETLRVVRDIWKRVEQIDEIHVELGREMKNPSEKRRQMTERMLENENANIRIKALLTEFMNPEYEMENVRPYSPSQQEILRIYEDTVLNGVEDIPEDIEIILKKFKENDIKKRPGKSDFLRYKLWLEQQYRSPYTGEIIPLGKLFTTAYEIEHVIPQSRYFDDSFSNKVICESEVNKLKNNMLGYEFIKKHAGEIVELGFGKSVKIFSVEAYEQFVRENYYKAGSKKSKLLLDDIPEKFIERQLNDSRYISRVVKGLLSNVVREEDANGEYESEAISKNVIVCSGSVTDRLKKDWGVNDVWNNIVYSRFERLNRLTESQQFGHWENRGGKRFFQTELPLEYQKGFSKKRIDHRHHAMDAIIIACATRNHVNYLSNESASKHAQIARYDLQRMLCDKSKTDGGGNYKWIIQKPWTTFTQDVYRTLLDIIVSFKQNLRVINKMTNYYQSYDDGKKVFKKQKKGDSWAIRKSMHKDTVFGQVNLRKIKEVRLSVALESPEKIVDKKIKEKVLQLFAYQYDKKKIEKYFKENASLWKEVNLAKIPVYYFTDESSELLVAVRKNLDTGFTEKKIRESVTDTGIQKILLNHLSNKGDKPELAFSPDGIDEMNRSLVILNGGKPHQPIYKVRVCEPLGNKFKVGTNGNKAAKYVEAAKGTNLFFAIYETDAGKRTYETIPLNVVIEREKMGWLPVPEKNNKGEKLLFWLSPNDLVYLPTEEELMSRILSDKLDRSRIYKIVSFTGNRLYAIPYNVSNMIWDKNEYTQLNKVESTDMKESIKEICMPINVDRLGHITEIIIK

SEQ ID NO: 17478 - protein, 1511 aa, unidentified
  REGION 1..1511: note = Cas Enzyme sequence
  REGION 27..32: note = misc_feature - Xaa can be any naturally occurring amino acid
MKKILGLDLGTNSIGWAVVCHSDTDGXXXXXXKWIEMAGSRIIPMDAAILGDFDKGNSKSQTSERTGFRGIRRLRERVLLRRERLHKVLKLIGFLPQHYIDSLDFSNHSGKFQLGTEVKLPWRKNEIGKYEFLFQNSFNEMLADFAKKQPELVAMGRKVPYDWTIYYLRKKALSEKITKEELAWILLNFNQKRGYYQLRGEEEEEKKNRLEDFYALKVVEVEQTDDKKGKDIWYNVHLENGWIYRRSSNVPLDWKDKIKEFIVTTELNEDGTPKVDKDGCVKRSFRMPKEDDWKLLKKKTEADIERSHKTIGCYIYDTLLQSPQQKIKGKLVRTIERKFYKDELRLILDKQQAFHPELQDRELYKACLDVLYPMNVAHKNNVANRGFVYLFMEDILFYQRPLKSKKSLIDNCPYEENQYIDVTTGEIKKAPIKCIAKSHPLYQEFRLWQFIANIRIYQKEKKVDGKLLTDIDVTTEYLSSKDDYVALYEWLCVRKEIEQKTFLKYPAFGLKKEIENYRWNYIEGKSYPCNETRSLILHYLEKAGISSTFLSTKIEESLWHILYSVEDRIELETALRTFASKYQLSCNFVEVFKKFPPFKKEYGAYSAKAIKRLLPLMRMGKYWKVDAIDGNTAERIEKILSGECDEKILNKVREKTIHLSETSDFQGLPLWLACYVVYNRHSEGKEVAKWKSPEDIDIYLKSFKQHSLRNPIVEQVITETLRVVRDIWKRVEQIDEIHVELGREMKNPSEKRRQMTERMLENENANIRIKALLTEFMNPEYEMENVRPYSPSQQEILRIYEDTVLNGVEDIPEDIEIILKKFKENDIKKRPGKSDFLRYKLWLEQQYRSPYTGEIIPLGKLFTTAYEIEHVIPQSRYFDDSFSNKVICESEVNKLKNNMLGYEFIKKHAGEIVELGFGKSVKIFSVEAYEQFVRENYYKAGSKKSKLLLDDIPEKFIERQLNDSRYISRVVKGLLSNVVREEDANGEYESEAISKNVIVCSGSVTDRLKKDWGVNDVWNNIVYSRFERLNRLTESQQFGHWENRGGKRFFQTELPLEYQKGFSKKRIDHRHHAMDAIIIACATRNHVNYLSNESASKHAQIARYDLQRMLCDKSKTDGGGNYKWIIQKPWTTFTQDVYRTLLDIIVSFKQNLRVINKMTNYYQSYDDGKKVFKKQKKGDSWAIRKSMHKDTVFGQVNLRKIKEVRLSVALESPEKIVDKKIKEKVLQLFAYQYDKKKIEKYFKENASLWKEVNLAKIPVYYFTDESSELLVAVRKNLDTGFTEKKIRESVTDTGIQKILLNHLSNKGDKPELAFSPDGIDEMNRSLVILNGGKPHQPIYKVRVCEPLGNKFKVGTNGNKAAKYVEAAKGTNLFFAIYETDAGKRTYETIPLNVVIEREKMGWLPVPEKNNKGEKLLFWLSPNDLVYLPTEEELMSRILSDKLDRSRIYKIVSFTGNRLYAIPYNVSNMIWDKNEYTQLNKVESTDMKESIKEICMPINVDRLGHITEIIIK

SEQ ID NO: 17479 - protein, 1509 aa, unidentified
  REGION 1..1509: note = Cas Enzyme sequence
MKKILGLDLGTNSIGWAVVCHSDTDGQTERKWIEMAGSRIIPMDAAILGDFDKGNSKSQTSERTGFRGIRRLRERVLLRRERLHKVLKLIGFLPQHYIDSLDFSNHSGKFQLGTEVKLPWRKNEIGKYEFLFQNSFNEMLADFAKKQPELVAMGRKVPYDWTIYYLRKKALSEKITKEELAWILLNFNQKRGYYQLRGEEEEEKKNRLEDFYALKVVEVEQTDDKKGKDIWYNVHLENGWIYRRSSNVPLDWKDKIKEFIVTTELNEDGTPKVDKDGCVKRSFRMPKEDDWKLLKKKTEADIERSHKTIGCYIYDTLLQSPQQKIKGKLVRTIERKFYKDELKLILDKQQAFHPELQDRELYKACLDVLYPMNVAHKNNVANRGFVYLFMEDILFYQRPLKSKKSLIDNCPYEENQYIDVTTGEIKKAPIKCIAKSHSLYQEFRLWQFIANIRIYQKEKKVDGKLLTDIDVTTEYLSSKDDYVALYEWLCVRKEIEQKTFLKYPAFGLKKEIENYRWNYVEGKSYPCNETRSLILHYLEKAGISSTFLSTKIEESLWHILYSVEDRIELETALRTFASKYQLSCNFVEVFKKFPPFKKEYGAYSAKAIKRLLPLMRMGKYWKVDAIDGNTAERIEKILSGECDEKILNKVREKTIHLSETSDFQGLPLWLACYVVYNRHSEGKEVAKWKSPEDIDIYLKSFKQHSLRNPIVEQVITETLRVVRDIWKRVEQIDEIHVELGREMKNPSEKRRQMTERMLENENANIRIKALLTEFMNPEYEMENVRPYSPSQQEILRIYEDTVLNGAGDIPEDIEIILKKFKENDIKKRPGKSDFLRYKLWLEQQYRSPYTGEIIPLGKLFTTAYEIEHVIPQSRYFDDSFSNKVICESEVNKLKDNMLGYEFIKKHAGEIVELGFGKSVKIFSVEAYERFVGENYYKAGSKKSKLLMDDIPEKFIERQLNDSRYISRVVKGLLSNVVREEDANGEYESEAISKNVIVCSGSVTDRLKKDWGVNDVWNNIVYSRFERLNRLTESQQFGHWENREGKRFFQTELPLEYQKGFSKKRIDHRHHAMDAIIIACATRNHVNYLSNESASKHARIARYDLQRMLCDKSKTDGGGNYKWIIQKPWTTFTQDVYRTLLDIIVSFKQNLRVINKMTNYYQSYDDGKKVFKKQKKGDSWAIRKSMHKDTVFGQVNLRKIKEVRLSVALESPEKIVDKKIKEKVLQLFAYQYDKKKIEKYFKENASLWKEVNLAKIPVYYFTDESSELLVAVRKNLDTGFTEKKIRESVTDTGIQKILLNHLSNKGDKPELAFSPDGIDEMNRSLVILNGGKPHQPIYKVRVCEPLGNKFKVGTNGNKAAKYVEAAKGTNLFFAIYETDAGKRTYETIPLNVVIEREKMGWLPVPEKNNKGEKLLFWLSPNDLVYLPTEEELMSRILSDKLDRSRIYKIVSFTGNRLYAIPYNVSNMIWDKNEYTQLNKVESTDMKESIKEICMPINVDRLGHITEIIIK

SEQ ID NO: 17480 - protein, 1050 aa, unidentified
  REGION 1..1050: note = Cas Enzyme sequence
VDGKLLTDIDVTTEYLSSKDDYVALYEWLCVRKEIEQKTFLKYPAFGLKKEIENYRWNYVEGKSYPCNETRSLILHYLEKAGISSTFLSTKIEESLWHILYSVEDRIELETALRTFASKYQLSCNFVEVFKKFPPFKKEYGAYSAKAIKRLLPLMRMGKYWKVDAIDGNTAERIEKILSGECDEKILNKVREKTIHLSETSDFQGLPLWLACYVVYNRHSEGKEVAKWKSPEDIDIYLKSFKQHSLRNPIVEQVITETLRVVRDIWKRVEQIDEIHVELGREMKNPSEKRRQMTERMLENENANIRIKALLTEFMNPEYEMENVRPYSPSQQEILRIYEDTVLNGAGDIPEDIEIILKKFKENDIKKRPGKSDFLRYKLWLEQQYRSPYTGEIIPLGKLFTTAYEIEHVIPQSRYFDDSFSNKVICESEVNKLKDNMLGYEFIKKHAGEIVELGFGKSVKIFSVEAYERFVGENYYKAGSKKSKLLMDDIPEKFIERQLNDSRYISRVVKGLLSNVVREEDANGEYESEAISKNVIVCSGSVTDRLKKDWGVNDVWNNIVYSRFERLNRLTESQQFGHWENREGKRFFQTELPLEYQKGFSKKRIDHRHHAMDAIIIACATRNHVNYLSNESASKHARIARYDLQRMLCDKSKADGGGNYKWIIQKPWATFTQDVYRTLLDIIVSFKQNLRVINKMTNYYQAYDDAGKKVFKKQKKGDSWAIRKSMHKDTVFGQVNLRKIKEVRLSVALESPEKIVDKKIKEKVLQLFAYQYDKKKIEKYFKENASLWKEVNLAKIPVYYFTDESSELLVAVRKNLDTGFTEKKIRESVTDTGIQKILLNHLSNKGDKPELAFSPDGIDEMNRNLVILNGGKPHQPIYKVRVCEPLGNKFKVGTNGNKSAKYVEAAKGTNLFFAIYETDAGKRTYETIPLNVVIEREKMGWLPVPEKNNKGEKLLFWLSPNDLVYLPTEEELMSRILSDKLDRGRIYKIVSFTGNRLYAIPYNVSNMIWDKNEYTQLNKVESTDMKESIKEICMPINVDRLGHITEIIIK

SEQ ID NO: 17481 - protein, 1140 aa, unidentified
  REGION 1..1140: note = Cas Enzyme sequence
MKNILGLDLGSGSIGWSVIQEGENNRTILGMGSRIIPLSPDDTTQFTQGKSITKNADRTAFRTQRKGYDRYQLRRHYLTQYLHKLGMLPDERLIKLPQTELWEIRAKAVNEKIELPELGRVLYHLNQKRGYKSGKSDFQDKKSSKYLSEVSERYKELQERDITIGQKFYAELKADPTYRCKDWVYPRIAYIEEFDRIMECQRTHHDILTDEHIAHLRNHIIYYQRPLKSCKHLVGECSLAQMTYRLPDGSIKSRPIKVAPKSSPLFQVCKIWESINHINLQRDRERFEITPAHRQALFTHMNSKEKLKINDLYKILGIKKHDGWWGGKAIGNGLQGNTTVIALQNALTGYSRADELLRFELKTCEIEIADPETGEIATQLIIDPAFEQEPLYRLWHTLYSISDTDVLDRILERKFGIEDPEMREKLTQIDFTKSGYGNLSSIAMRRILPYLRQGYVYSEACFMAGYNHSNSITREENLARELAEHLRPITKGELRQPIVEKILNQMVNLVNALIDRYGRFDEIQVELARELQQSREERDKTYKKQLDNQKRNEEIRHHIEEMDLTPTRSRIQKYRMYEESHHLCIYCGQPVGLAAFLQGYDTEVEHIIPRSLYFDDSYNNKVCACRACNQAKNNRTAYDYMSSLPEETFHRYLDRIKNMHDNKEISDTKYKYLLTKGDEIPQDFLNRQMRESQYISRKAIAMLQEVCHHVYATSGSVTAYLRHVWGWDNVLHDLNRKRYRAGGLTEMREIDNRTVECIKDWNKRLDHRHHAIDALAIACTRQGYIQRINTLSTQAEEGDLVSLERYIRQQPHFSYDEVCAAAEKILVSFKAGKRVATKGKRYIYRGGKRILAQEDITVPRGALSEQSVYGQIAQYRKDKKGKVSFSYESVLKYPIESIDTKTLPDVVDAGIRRILQQRLDEHGGNAKKAFATPVYTASGHLIRTVRCFTRLKAIVPVKYDASGKAVGFVKPGNNHHVAIYIDRDGKPQEHIVTFWHAVERKKYGLPVIIERPGEAWDAATDAMPDPFLEQLPDATWQFRLSMQQNEMFILGMPDELYADALENRDYALLGKYLYRVQKIASKNYCFRLHTETSVDDKYNGKKNEMLSKQMGKVKIIQSIGTLDSLNPHKVKISLTGEICE

SEQ ID NO: 17482 - protein, 1552 aa, unidentified
  REGION 1..1552: note = Cas Enzyme sequence
MKNILGLDLGSNSIGWAIVKALKNEDGKEVLQSIDLAGSRIIPMDQATLGNFENGNSVSQTRERTGYRSARRLRERYLLRRERLLRVLNCMGFLPEHYSQNIDKYGKFFLDNEVKLSWKKDKMGKNEFIFLDSFNEMLEDFRHSQPQLLLDGRKVPYDWTIYYLRKKALTEKISKEELAWILLNFNQKRGYFQLRGEDEEVQGKKIEFYALKVVRVEDTGEKKGKDTWYNVYLESGLGDTDDYWVYRRASSVPIDEWEGQVKEFIVTTTLDNNGSPQIDKEGKVKRSFSIPKPEDWMLVKKKTEVDIKSSGKTVGTYIYDTLLQKPDQKIKGKLIRTIERENYTNELSLILENQKKFHLELQDRELYHQCIELLYYKNEAHKRVIGSWDFTSLFIKDILFYQRPLKSKKALIDNCPYEESFYIENGEKKSKPRKCIAKSHPLFQEFRIWQFISNLRIYQKVKEVDGKLQFNVDVTSDFLRDESAYVELFKWLNERAEVSQEDLLKHLGLKKTKTEDTVSLYRWNYVEDKKYPGNKTRSSILKKLLNDEKEALSEDIELKIWHLLYSVSAQSEIDKALSSKNVSTKGIYSELSVYFSDETIQKIKNVKLESGYGSYSAKAIGKLLPLMRRGKYWNLESIDNHTKERIEKILNGECDETIRARTREKSISLTDISQFKGLPLWLACYIVYDRHSELKTIKKWNGPEDIDKFLKEFKQHSLRNPIVEQVIMETLRVVRDIWRRVGSIDEIHIEMGRDMKQTAQERAKRSAIISRNENDNLRIKALLHEFMNPELGIENVRPYSPAQQEILRIYEDGVLSSVSEIEDEIKNILKKFNESEEGKRPTKNEIIRYKCWLEQKYRSPYTGEIIPLGKLFTPAYQIEHIIPQARFFDDSFTNKVICEAEVNAKKGDLLGYEFVKEKGGEIVELSGGRNVRIFSVEEYEDFVKEHYKSNKQKMQRLLAEDIPTEFSHRQLNDSRYISKYIRNLLSNIVREDDEQESVSKNVISCNGAITDRLKKDWGVNDVWNHIILPRFVRLEEIRADNGEKFTAFNQEGHLIPSMPLMYQKGFNKKRIDHRHHAMDAIIIACTTRDHVNLLNNECSNPQNNANKHQLSRKLRRYENVSYKQDGKLKEREVPKEFLKPWEGFTRDVEFALKNVIVSFRQNLRVLNKTVNYFQHWKDNSSEKEWKEQKSADHWSIRKPLHKETVSGEVFLWRTRFVSLSEVLTNLDPKRIVEKDLRSKILELQRKGYDIERIKKYFEDNKDVWQDVNLSKIEVRYYSREIVDPQTELPKNRYFATRFGKDLISLFSGVSNFERAKKIIESITDTGIQKILFRHLENKGNDPVLAFSPEGIDEMNRTIKTLNNGKDHKPIYKVRIYECSTMKFPLGSIGNKSKKFVEAAKGTNLYFAVYEKEVENDRGECHKERIFKTIPLNDVIRNLKQGLSIAPNDENGNPPAFILSPNDLVYLPTKEELETGSISQPLDRNRIYKMVSCTGNVAHFIPAFIAIPILQTIELGSKNKAQKAWTGEMIKESCIPIKVDRLGMLISINGKAV

SEQ ID NO: 17483 - protein, 1154 aa, unidentified
  REGION 1..1154: note = Cas Enzyme sequence
MKNILGLDLGSSSIGWSVIRENSEEQELVAMGSRVVSLTAAELSSFTQGNGVSINSQRTQKRTQRKGYDRYQLRRTLLRNKLDTLGMLPDDSLSYLPKLQLWGLRAKAVTQRIELNELGRVLLHLNQKRGYKSIKSDFSGDKKITDYVKSVKTRYDELKEMRLTIGELFFRRLTENAFFRCKEQVYPRQAYVEEFDCIMNCQRKFYPDILTDETIRCIRDEIIYYQRPLKSCKYLVSRCEFEKRFYLNAAGKKTEAGPKVSPRTSPLFQVCRLWESINNIVVKDRRNEIVFISAEQKVALFDFLNTHEKLKGSDLLKLLGLSKTYGYRLGEQFKTGIQGNKTRVEIERALGNYPDKEKLLRFNLQEVSSSVVDVETGEIIPTISPSFEQEPLYRLWHVLYSIDDREQLQSVLRQKFGIDDDEVLERLSAIDLVKAGFGNKSSKAIRRILPFLQLGMNYAEACEAAGYNHSNNYTKAENEARALLDRLPAIKKNELRQPVVEKILNQMVNVVNALMEKYGRFDEIRVELARELKQSKEERSNTYKSINKNQRENEQIAKRIVEYGVPTRSRIQKYKMWEESKHCCIYCGQPVDVGDFLRGFDVEVEHIIPKSLYFDDSFANKVCSCRSCNKEKNNRTAYDYMKSKGEKALSDYVERVNTMYTNNQISKTKLQNLLTPVDKISTNFIDRQLRESQYIARKAKEILTSICYNVTATSGSVTSFLRHVWGWDTVLHDLNFDRYKKVDLTEVIEVNHRGSVIRREQIKDWSKRFDHRHHAIDALTIACTKQAYIQRLNNLRAEEGPDFNKMSLERYIQSQPHFSVAQVREAVDRILVSFRAGKRAVTPGKRYIRKNRKRISVQSVLIPRGALSEESVYGVIHVWEKDEQGHVIQKQRAVMKYPITSINREMLDKGKVVDKRIHRILSDRLAQYNDNPKEAFAKPVYIDKECRIPIRTVRCFAKPAIKTLVPLKKDDKGNTVAWVNPGNNHHVAIYRDEDGKYKEQTVTFWEAVDRCRVGIPAIVTQPDTIWDNILQRNDISENVLESLPDVKWQFVLSLQQNEMFILEMKEEDYRYAMDQQDYALLNKHLYRVQKLSKGDYSFRYHTETSVEDKYDGKTNLKLSTQIGKLKRVQSLEALFNLHPHKVHISVLGEIKEIS

SEQ ID NO: 17484 - protein, 918 aa, unidentified
  REGION 1..918: note = Cas Enzyme sequence
VSRCEFEKRFYLNAAGKKTEAGPKVAPRTSPLFQVCRLWESINNIVVKDRRNEIVSISAEQRAALFDFLNTHEKLKGSDLLKLLGLSKTYGYRLGEQFKTGIQGNKTRVEIERALGNYPDKARLLQFNLQKESSSMVNTETGEIIPMISLSFEQEPLYRLWHVLYSIDDREQLQLVLRQKFGIDDDEVLERLSAIDLVKAGFGNKSSKAIRRILPFLQLGMNYAEACEAAGYTHSNNYTKAENEAHALLDRLPAIKKNELRQPVVEKILNQMVNVVNALMEKYGRFDEIRVELARELKQSKEERSNTYKSINKNQRENEQIAKRIVEYGVPTRSRIQKYKMWEESKHCCIYCGQPVDVGDFLRGFDVEVEHIIPKSLYFDDSFANKVCSCRSCNKEKNNRTAYDYMKSKGEKALSDYVERVNTMYTNNQISKTKLQNLLTPVDKISTDFIDRQLRESQYIARKAKEILTSVCYNVTATSGSVTSFLRHVWGWDTVLHDLNFDRYKKVGLTEVIEVNHRGSVIRREQIKDWSKRFDHRHHAIDALTIACTKQAYIQRLNNLRAEEGPDFNKMSLERYIQSQPHFSVAQVREAVDRILVSFRAGKRAVTPGKRYIRKNRKRISVQSVLIPRGALSEESVYGVIYVWEKDEQGHVIQKQRAVMKYPITSITREMLDKEKVVDKRIHRILSGRLAQYNDNPKEAFAKPVYIDKECRIPIRTVRCFAKPAINTLVPLKKDDKGNPVAWVNPGNNHHVAIYRDEDGKYKERTVTFWEAVDRCRVGIPAIVTQPDTIWDNILQRNDISENVLESLPDVKWQFVLSLQQNEMFILGMNEEDYRYAMDQQDYALLNKYLYRVQKLSKGDYSFRYHTETSVEDKYNGKPNLKLSMQMGKLKRVSIKSLLGLNPHKVHISVLGEIKKIS

SEQ ID NO: 17485 - protein, 1153 aa, unidentified
  REGION 1..1153: note = Cas Enzyme sequence
MKNILGLDLGSSSIGWSVIRENSEEQELVAMGSRVVSLTAAELSSFTQGNGVSINSQRTQKRTQRKGYDRYQLRRTLLRNKLDTLGMLPDDSLSYLPKLQLWGLRAKAVTQRIELNELGRVLLHLNQKRGYKSIKSDFSGDKKITDYVKSVKTRYDELKEMRLTIGELFFRRLTENAFFRCKEQVYPRQAYVEEFDCIMNCQRKFYPDILTDETIRCIRDEIIYYQRPLKSCKYLVSRCEFEKRFYLNAAGKKTEAGPKVSPRTSPLFQVCRLWESINNIVVKDRRNEIVFISAEQKVALFDFLNTHEKLKGSDLLKLLGLSKTYGYRLGEQFKTGIQGNKTRVEIERALGNYPDKKRLLQFNLQEESSSMVNTETGEIIPMISLSFEQEPLYRLWHVLYSIDDREQLQSVLRQKFGIDDDEVLERLSAIDLVKAGFGNKSSKAIRRILPFLQLGMNYAEACEAAGYNHSNNYTKAENEARALLDRLPAIKKNELRQPVVEKILNQMVNVVNALMEKYGRFDEIRVELARELKQSKEERSNTYKSINKNQRENEQIAKRIVEYGVPTRSRIQKYKMWEESKHCCIYCGQPVDVGDFLRGFDVEVEHIIPKSLYFDDSFANKVCSCRSCNKEKNNRTAYDYMKSKGEKALSDYVERVNTMYTNNQISKTKWQNLLTPVDKISTDFIDRQLRESQYIARKAKEILTSVCYNVTATSGSVTSFLRHVWGWDTVLHDLNFDRYKKVGLTEVIEVNHRGSVIRREQIKDWSKRFDHRHHAIDALTIACTKQAYIQRLNNLRAEEGPDFNKMSLERYIQSQPHFSVAQVREAVDRILVSFRAGKRAVTPGKRYIRKNRKRISVQSVLIPRGALSEDSVYGVIHVWEKDEQGHVIQKQRAVMKYPITSINREMLDKGKVVDKRIHRILSDRLAQYNDNPKEAFAKPVYIDKECRIPIRTVRCFAKPAINTLVPLKKDDKGNPVAWVNPGNNHHVAIYRDEDGKYKERTVTFWEAVDRCRVGIPAIVTQPDTIWDNILQRNDISENVLESLPDVKWQFVLSLQQNEMFILGMNEEDYRYAMDQQDYALLNKYLYRVQKLSKGDYSFRYHTETSVEDKYNGKPNLKLSMQMGKLKRVSIKSLLGLNPHKVHISVLGEIKKIS

SEQ ID NO: 17486 - protein, 1550 aa, unidentified
  REGION 1..1550: note = Cas Enzyme sequence
MKNILGLDLGSNSIGWAIVKALKNEDGKEILQSIDLAGSRIIPMDQATLGNFENGNSVSQTRERTGYRSARRLRERYLLRRERLLRVLNCMGFLPEHYSQNIDKYGKFFLDNEVKLSWKKDKMGKNEFIFLDSFNEMLEDFRHSQPQLLLDGRKVPYDWTIYYLRKKALTEKISKEELAWILLNFNQKRGYFQLRGEDEEVQGKKIEFYALKVVRVEDTGEKKGKDTWYNVYLESGLGDTDDYWVYRRASSVPIDEWEGQVKEFIVTTTLDNNGSPQVDKEGKVKRSFSIPKPEDWMLVKKKTEVDIKSSGKTVGTYIYDTLLQKPDQKIKGKLIRTIERENYTNELSLILENQKKFHLELQDRELYHQCIELLYCKNEAHKRVIGTWDFTSLFIKDILFYQRPLKSKKALIDNCPYEESFYIENGEKKSKPRKCIAKSHPLFQEFRIWQFISNLRIYQKVKEVDGKLQFNVDVTSDFLRDESAYVELFKWLNERAEVSQEDLLKHLGLKKTKTEDTVSLYRWNYVEDKKYPGNKTRSSILKKLLNDEKEALSEDIELKIWHLLYSVSAQSEIDKALSSKNVSTKGIYSGLSVYFSDETIQKIKNVKLESGYGSYSAKAIGKLLPLMRRGKYWNLESIDNHTKERIEKILNGECDETIRARTREKSISLTDISQFKGLPLWLACYIVYDRHSELKTIKKWNGPEDIDKFLKEFKQHTLRNPIVEQVIMETLRVVRDIWRRVGSIDEIHIEMGRDMKQTAQERARRSAIISRNENDNLRIKALLHEFMNPELGIENVRPYSPAQQEILRIYEDGVLSSVSEIEDEIKNILKKFNESEEGKRPTKNEIIRYKCWLEQKYRSPYTGEIIPLGKLFTPAYQIEHIIPQARFFDDSFTNKVICEAEVNAKKGDLLGYEFVKEKGGEIVELSGGRNVRIFSVEEYEDFVKEHYKSNKQKMQRLLAEDIPTEFSHRQLNDSRYISKYIRNLLSNIVREDDEQESVSKNVISCNGAITDRLKKDWGVNDVWNHIILPRFVRLEEIRADNGEKFTAFNQEGHRIPSMPLIHQKGFNKKRIDHRHHAMDAIVIACTTRDHVNLLNNECSNPQNNVNRHQLSRKLRRYENVSYKQDGKLKEREVPKEFLKPWEGFTRDVEFALKNVIVSFRQNLRVLNKTVNYFQHWKDNSSEKEWKEQKSADHWSIRKPLHQETVLGEVFLWRTRFVSLREALTKPKRIVEKDLRSKILELQRKGYDIERIKKYFEDNKDVWQDVNLSKIEVRYYSREIVDPRTGLPKNRYFATRFGNDLISLFSGVSNFENAKKIIKSITDTGIQKILFRHLENKGNDPVLAFSPEGIDEMNRTIKTLNNGKDHKPIYKVRIYECSTMKFPLGSVGNKSKKFVKAAKGTNLYFAVYEKEVENDRGECHKERAFKTIPLNDVIRNLKQGLSIAPNDENGNPPAFILSPNDLVYLPTKEELETGSISQPLDRNRIYKMVSCTGNVAHFIPAFIAIPILQTIELGSKNKAQKAWTGEMIKESCIPIKVDRLGILISINGRAV

SEQ ID NO: 17487 - protein, 1153 aa, unidentified
  REGION 1..1153: note = Cas Enzyme sequence
  REGION 220..223: note = misc_feature - Xaa can be any naturally occurring amino acid
MKNILGLDLGSSSIGWAVIRENSEEQELVAMGSRVVSLTAAELSSFTQGNGVSINSQRTQKRTQRKGYDRYQLRRTLLRNKLDTLGMLPDDSLSHLPKLQLWGLRAKAVTQRIELNELGRVLLHLNQKRGYKSIKSDFSGDKKITDYVKTVKTRYDELKEMRLTIGELFFRRLTENAFFRCKEQVYPRQAYVEEFDCIMNCQRKFYPDILTDETIRCIRXXXXYYQRPLKSCKYLVSRCEFEKRFYLNAAGKKTEAGPKVAPRTSPLFQVCRLWESINNIVVKDRRNEIVFISAEQRAALFDFLNTHEKLKGSDLLKLLGLSKTYGYRLGEQFKTGIQGNKTRVEIERALGNYPDKKRLLQFNLQEESSSMVNTETGEIIPMISLSFEQEPLYRLWHVLYSIDDREQLQSVLRQKFGIDDDEVLERLSAIDLVKAGFGNKSSKAIRRILPFLQLGMNYAEACEAAGYTHSNNYTKAENEAHALLDRLPAIKKNELRQPVVEKILNQMVNVVNALMEKYGRFDEIRVELARELKQSKEERSNTYKSINKNQRENEQIAKRIVEYGVPTRSRIQKYKMWEESKHCCIYCGQPVDVGDFLRGFDVEVEHIIPKSLYFDDSFANKVCSCRSCNKEKNNRTAYDYMKSKGEKALSDYVERVNTMYTNNQISKTKLQNLLTPVDKISTDFIDRQLRESQYIARKAKEILTSVCYNVTATSGSVTSFLRHVWGWDTVLHDLNFDRYKKVGLTEVIEVNHRGSVIRREQIKDWSKRFDHRHHAIDALTIACTKQAYIQRLNNLRAEEGPDFNKMSLERYIQSQPHFSVAQVREAVDRILVSFRAGKRAVTPGKRYIRKNRKRISVQSVLIPRGALSEESVYGVIYVWEKDELGHVIQKQRAVMKYPITSINREMLDKEKVVDKRIHRILSGRLAQYNDNPKEAFAKPVYIDKECRIPIRTVRCFAKPAINTLVPLKKDDKGNPVAWVNPGNNHHVAIYRDEDGKYKERTVTFWEAVDRCRVGIPAIVTQPDTIWDNILQRNDISENVLESLPDVKWQFVLSLQQNEMFILGMNEEDYRYAMDQQDYALLNKYLYRVQKLSKGDYNFRYHTETSVEDKYDGKLNLELSRQMGKLKRVSIKSLLGLNPHKVHISVLGEIKEIS

SEQ ID NO: 17488 - protein, 1379 aa, unidentified
  REGION 1..1379: note = Cas Enzyme sequence
MKRILGIDLGTTSIGWAYVLEAEAANEQSEIVRLGVRVVPLSVDEETKFEKGKSITTNADRAARKSMRRNIDRYQMRRDELIAVMREEGWITEETTLSEHGTRSTFESLRLRAEAVEKEVTLAQLARILLQINKKRGYKSNRKADSQEEGPVIDGMDVSKQLCERSMTPGQWVYERMQRGKMTVPAFFRSDLQQELDHIWTLQYACHSAWMTDELRVALTQADSRRAQQLMDAHGVIPETVKGKERRQILYGWRSAAAMGGLPAAQLAAVLIQIVRDINASSGYLGQIGDRSKELYFRHETVGQYMWRHIQANPHESLKTLVFYRKDYQNEFDALWASQARFHPELTKRLRKRLRHILFFQRPLKSKKGLVNRCELVHYSIPENAADGRGRRRDVGPKVCPKSSPLFQEFRMWQVLNNLMLIHVPTQEVRPLADEEKEMLAAELCYRVRMKKNDVLKLLCDHWREWDLNYKELEGNRTLAAFYKVYEQVIAQTGHGEYDFEKMRAAKVRELVGGVFGGLGFEVGLLSFDAELDGLAYEQQPLYRLWHLLYSYEGDSSATGDKCLLKRLCALTKMDEDVARLFLTVHFEDDYGSLSTKAMRRILPFLKKGYMYDVACEQAGYCHSVRSRTREELDKRTYKDRLDLLPSKSLHNPVVEKILNQMIHVVNGVTSAYGKPDEIRIEMARELKSCAAERERRTASIAKATKENAEIEKILRQEFGLSYVSRNDIVRYKLYEELKENGYKTLYSNTYIPKEELFSKAFDIEHIIPRARLFDDSFSNKTLEARQVNIEKKDRTAWDFVNDCYGSEGAALYRCRVDELFNKGIISKDKHKYLLMPGDKIPEDFINRDLRNTQYIVRKALELFEDFVPGVLATSGAITSRLREDWGLVNVMKEMNLPKYERQGVVETCSDREGHVFKRILDWTKRNDHRHHAMDALTIAFTKRAYIQYLNHLNTRKDVTSQAYAIQQKEMECDGDHRWRFKCPFGDRSRFRREAMRQLDQILVSIKSKNKVLTPSLNRSKKRGGYNRKIEWTPRGPLHKETVYGRIRRYVTKNVRVGSSFTQTEIEKVANTCFRRALLARLAEFGGDPKKAFTGKNSLEKNPLYCDEAHTQTVPLLVKLVELEEVGTIRKEITPDLKVEKVVDRRIRTLLEERLALYGQDAKKAFSNLGENPIWLNQEKGISVKRVTIIDKSDVVSIHEKRDVDGRLMHDEHGRTIPCDYVQTQNNHHVAIFCDAEGNLQEHIETFFDVVERVRQQRIEGRTVEVIDKNYKRDEGWRFLFSMKINEYFVFPDENTGFDPRSVDLTDPANYALVSPHLFRVQKLSSKYYVFRHHLETTVEDTKALKDVTWKRINTLEKLKNIVKVRVNHIGQIVAVGEY

SEQ ID NO: 17489 - protein, 977 aa, unidentified
  REGION 1..977: note = Cas Enzyme sequence
AALAALYPPDGKPFSNRYTRIRNRYTDRQMYIDEFEYIWSVQQPYYPDVLTEELKTALGGRRIDGYKRDGILFFQRPLRSQKHLVGRCSFEPSKPRCQKSHPLYERFRAYQTANNIRCNDLPLNADERENVVRLLLTKKQITFAKIRKALKKTSAEFIFNYDDTDTFVGSPTTAVLSSKNIFGARWFELSDDEQHKIWHALQSFDNVEKLAEHARTHFQLSDNAAQAYAQVRLVDGYASLSLKAIRLITPFLEQGYPYHIAYALAGVRRAFGNDQWNALDPTEKKTLCDSVESIISTSTTGGYIEKLRSFLQERYGLSERALQKLAHHSSIASAAQLLDRIPTDKNYTSTILSWRNPIVSNVMFALRRLVNELLERFGPFDQTVIELARDLKLSKKQRAAIRQEQKRNEYIRQNIKQLLENSGIEPTAENILRYRLWLECEKQCPYSGRTISFDQLYSGQVQIEHIIPYDRSLDDSYLNKTLCFSDINRKKGNRTPYEFFIQDYGPDHWNKVKEHLNKIFTPKRRWDIDDCLNYFPDRRRKYERFIAEKLPEGFATRQLNDTRIASRRAREMLELVCPSVHTALGPATAKLRRFWGLERVLSTNDNTADSKERSDHRHHALDAIVLACTRQSHIQMLSTASARQRNIEKPIHLPWNSFRQDVMDALAGCIVVHHRRDRVLTRRRVHVTIGTTTRTYRSIVACGQLHKETFYGLHTDPETGKQFYHVRVPLQELKKRKDVEEIVDPTIRKLVQQRIEELGGYRNDAVPNTFFETTPEGSPKPTIFLPNRRGDMVPVYKVRTRRTISNAIPHRKGINRYVDPSNNHHAIIYRLPNGALELNVVQFWEAVQRKLRGEPLYQVPPNCELVMTLHINDMVLLGCTDELLERIWQNYPPQERGREIMPYLHKVQKLSYSKNSGFELCFRHHTDARPSEEAKHDYVLIRNWGTGKQGWYTYNPIKLRITPSGLCFRWDELSATS

SEQ ID NO: 17490 - protein, 1214 aa, unidentified
  REGION 1..1214: note = Cas Enzyme sequence
VRAKASESLRHKALLRKGDKKSIFSLPKYTVRKCILRTCTTDFFSITLERALGLDVGANSIGWAVIESNGTDGRILGCGVYVFPEGVENLGQGEKEQSLNATRRGARQRRRQLYHRKLRKRALLKLMGDAGLCPPLSPEELRTWQNTGTFPERPEFLQWLKLNPYLLRQRATMEKVSLFELGRIFYHIAQRRGFPSKSRSAASDDRSVIEDGDPKSGKIGIAQTKKLLESNDHPTLGAALAALYPPDGKPFSNRYTRIRNRYTDRQMYIDEFEYIWSVQQPYYPDVLTEELKTALGGRRIDGYKRDGILFFQRPLRSQKHLVGRCSFEPSKPRCQKSHPLYERFRAYQTANNIRCNDLPLNADERENVVRLLLTKKQITFAKIRKALKKTSAEFIFNYDDTDTFVGSPTTAVLSSKNIFGARWFELSDDEQHKIWHALQSFDNVEKLAEHARTHFQLSDNAAQAYAQVRLVDGYASLSLKAIRLITPFLEQGYPYHIAYALAGVRRAFGNDQWNALDPTEKKTLCDSVESIISTSTTGGYIEKLRSFLQERYGLSERALQKLAHHSSIASAAQLLDRIPTDKNYTSTILSWRNPIVSNVMFALRRLVNELLERFGPFDQTVIELARDLKLSKKQRAAIRQEQKRNEYIRQNIKQLLENSGIEPTAENILRYRLWLECEKQCPYSGRTISFDQLYSGQVQIEHIIPYDRSLDDSYLNKTLCFSDINRKKGNRTPYEFFIQDYGPDHWNKVKEHLNKIFTPKRRWDIDDCLNYFPDRRRKYERFIAEKLPEGFATRQLNDTRIASRRAREMLELVCPSVHTALGPATAKLRRFWGLERVLSTNDNTADSKERSDHRHHALDAIVLACTRQSHIQMLSTASARQRNIEKPIHLPWNSFRQDVMDALAGCIVVHHRRDRVLTRRRVHVTIGTTTRTYRSIVACGQLHKETFYGLHTDPETGKQFYHVRVPLQELKKRKDVEEIVDPTIRRLVQQRIEELGGYRNDAVPNTFFETTPEGSPKPTIFLPNRRGDMVPVYKVRTRRTISNAIPHRKGINRYVDPSNNHHAIIYRLPNGALELNVVQFWEAVQRKLRGEPLYQVPPNCELVMTLHINDMVLLGCTDELLERIWQNYPPQERGREIMPYLHKVQKLSYSKNSGFELCFRHHTDARPSEEAKHDYVLIRNWGTGKQGWYTYNPIKLRITPSGLCFRWDELSATS

SEQ ID NO: 17491 - protein, 1001 aa, unidentified
  REGION 1..1001: note = Cas Enzyme sequence
SKESVGDPTSFVLGLDIGASSIGWAVLKTDSNDGAQSVVACGTRVFEAGVEGSIETGRDTPRGVARRDARLSRRQTARRVQRRRNVYRALMSAGLLPQLSSLDHSGVDGAIREIDTHLRRQWIAEGDHKGQLVFPYQIRAAAAQGPLDPQSLGRAIYHLAQRRGFLSNRRVDKKDEKIGVVKEGIASLAADMTAGNHNTLGQFFASIDPRDIRIRNRYTHRTMYQHEFDAIAAANTQVSAETWAAIRKCIFFQRKLKSSAHLIGRCSCIPKARRIPMWHPLFQRYRILEQISNLKVRDPSDGIWHPLPDQERAVLLSYLTENEKATPAKIKTLLKLKRRELSIETEGSSAMIGNRTGCAMRAVFGERWNGMSPDEQMKALLDVHSFEKDESLKRRGERRWNLSPESAAKLASTRLEPSYASFSAKAIVLLLPHLERGLNSRQAIDIVFPSRFAVAESCDRLPPVSEILPDLRNPAVGRALTEVRSLVNQIIGRWGKPTTVRLELARDLKKSRDQRDLISKENRSQERIREQAAVRVVQEAGIPRPSRGDIEKCLLAEECDFTCPYTGKKFGMRDLFGPHPTVDVEHIIPFSRSLDDSFVNKTLCVADENRQVKRNKTPWEAYGRMGERFSEIMGRVDKFRGGRASAKRERFLMKDVGEELLSEFASRQLNDTRFASTMAAKFVALLYGGVNDASGTKCVQASTGGVTARLRRAWRMGYALHDEGEKNRDDHRNHALDAIAIALSSPGIVKRMADAARRGAEAGRDGKLLEFSEPWSGFLEDVKAAISTAVVSHRPDRRLAGKLHEDTYYSRPLRVGNEWVHRVRKPTANSEAAQSTKTRGQVRHTRTEGDRTPVAIETQTGTRWVAPGSNHHMAIYEVVGKSKTSWEAETVTRLEAHRRKRCGEPIIRTDRGDGSRFLFSLRSGDTIRLRDQDGLAMLAVVRSASGKTIEAIGINDARSTKDVRDGGVSMGRLRLSLTKMRARGVEKVDVNPIGVLTVARD

SEQ ID NO: 17492 - protein, 1004 aa, unidentified
  REGION 1..1004: note = Cas Enzyme sequence
LKRSKESVGDPTSFVLGLDIGASSIGWAVLKTDSNDGAQSVVACGTRVFEAGVEGSIETGRDTPRGVARRDARLSRRQTARRVQRRRNVYRALMSAGLLPQLSSLDHSGVDGAIREIDTHLRRQWIAEGDHKGQLVFPYQIRAAAAQGPLDPQSLGRAIYHLAQRRGFLSNRRVDKKDEKIGVVKEGIASLAADMTAGNHNTLGQFFASIDPRDIRIRNRYTHRTMYQHEFDAIAAANTQVPAETWAAIRKCIFFQRKLKSSAHLIGRCTCIPKARRIPMWHPLFQRYRILEKISNLRVRDPSDGIWHPLPDQERAVLLSYLTENEKATPAKIKTLLKLKGRELSIETEGSSAMIGNRTGCAMRAVFGERWNGMSPDEQMKALLDVHSFEKDESLKRRGERRWNLSPESAAKLASTRLEPSYASFSAKAIVLLLPHLERGLNSRQAIDIVFPSRFAVAESCDRLPPVSEILPDLRNPAVGRALTEVRSLVNQIIGRWGKPTTVRLELARDLKKSRDQRDLISKENRSQERIREQAAVRVVQEAGIPRPSRGDIEKCLLADECDLTCPYTGKKFGMRDLFGPHPTVDVEHIIPFSRSLDDSFVNKTLCVADENRQVKRNKTPWEAYGRMGERFSEIMGRVDKFRGGRASAKRERFLMKDVGEELLSEFASRQLNDTRFASTMAAKFVALLYGGVNDASGTKCVQASTGGVTARLRRAWRMGYALHDEGEKNRDDHRNHALDAIAIALSSPGIVKRMADAARRGAEAGRDGKLLEFSEPWSGFLEDVKAAISTAVVSHRPDRRLAGKLHEDTYYSRPLRVGNEWVHRVRKPTANSEAAQSTKTRGQVRHTRTEGDRRPVALETKTGTRWVAPRSNHHMAIYEVVGKSKTSWEAETVTRLEAHRRKRCGEPIIRTDRGDGSRFLFSLRSGDTIRLRDQDGLAMLAVVRSASGKTIEAIGINDARSTKDVRDGGVSMGRLRLSLTKMRARGVEKVDVNPIGVLTVARD

SEQ ID NO: 17493 - protein, 1465 aa, unidentified
  REGION 1..1465: note = Cas Enzyme sequence
VSCFQICSKDISNLSYFQTSFSPLFKKILTKFGIDCKDIPMKHILGLDLGSNSIGWALIEQDFDNKQGKILGLGSRIIPMEQKILSKFEEGTTVSQTAERTKFRGIRRLRERHLLRRERLHRVLHLLGFLPPHYDAQIDFTKRFGKFIGDTEPKLAYNNEGFIFLESFNEMVEDFKKHQPQLFYIKSNGEESKIPYDWTIYYLRKKALYEKISKEELAWIILNFNQKRGYYQLREEEEEKENDFEIISSKVLSVVKKEKDKKYNKYWYDIILENGLVYTAAFYNDFVYSWVDQEREFVAKRTLLKNGSEKVELSYLPTFDEIAKMNKQQQDKFYQKIKIKTENSIGNKPVGAYIYDHLLQNPNQKIKGKLVRTIERKFYKEELKAILEKQVALQPELFTEELFVDCVRELYKNNEIHQNSLSSKDFEHLFLNDIIFYQRPLRSQKSNISSCSLEYRFCIDKETKQRRKTYLKVISKSNPYYQEFRVLQWLSNLKIYRKEDDKDVTSEFISSIEDKETLYEFLMSEKEVSNKSILEFLLMKSLREIYPFAKETELKKELKKEITKYRWNYVYEEENDNKKYPMNETGYEIKKRLKEVKNIPDNFLTKDIEYQLWHIIYSVTDKYEYEKALMKFAQKHNLDTESFVENFKKIKPYPSDYGAFSEKAIKKLLPLMRFGKYWNYSDISEPVQARISDIINGVDNESIKTIVREKADKYQLGQEVDFQELPLWLAQYVVYGIHSEAADIQHWTSPSDLEEYLKGFKQHSLRNPIVEQVVTETLRVVKDIWEYYGKVEQNFFKEIHIELGRELKKTAEERNRVTREINENEETNLKVKKKLQELFEDKSVENVRPYSPIQQEKYRLWQEQKERSPYTGQPIPLSKLFTDEYQIEHVIPQSRFFDDSLSNKVICEAAVNAQKGAQLGLEFIKKHGGEIIEIGLNKKVIILNEKEYKELVNKHFANNRAKKAKMLMEEIPEKMVERQLNDTRYISKFISQILSNIVRSPQEDNGVNSKNIIPCTGKITAALKQDWGLNDVWNDLILPRFERMNKLTQTELFTTYSEKYQKKIPTVPLEYAKGFQKKRIDHRHHALDALVVACATRSHINYMNNQNALDKHKTKEENQNARVDLRTVLCEKKYNDNAEDNYNWIFKKPWNTFTQDVRSALEMVVVSFKQNLRVINKATNYYEKWVEEKGKMVKKKVKQEGINWAIRKPLHKETISGKITLERVKVGKGKILTATRKSIDSSFTEKTIASITDTGIQKILLNYLAHKGSPELAFSPEGLEEMNKNIAKYNDGKDHQPIYKVRIFEEGSKFPLGEIGTKSQKYVETAKGTNLFFGIYQGKEKRSYATIPLDEVIERQKQGLTSVSEHNEKGEKLLFSLSPNDLVYVPMEGEDAESIDYANLSKEQRERIYKIVNFSKKRLYGVPNIVAIPIIDKMEYTQYNKIEFLKEKESCIKLKIDRLGNISKA

SEQ ID NO: 17494 - protein, 1485 aa, unidentified
  REGION 1..1485: note = Cas Enzyme sequence
MKYILGLDLGSNSIGWALIEQDFDNKQGKILGLGSRIIPMDQGILGEFERGNKVSQTAERTGFRGVRRLRERHLLRRERLHRVLHLLGFLPPHYDAQIDFMKRFGKFMGDSEPKLAYNNEGFIFLESFNEMVEDFKKHQPQLFYIKSNGEESKIPYDWTIYYLRKKALQEKISKEELAWIILNFNQKRGYYQLRGEEEEKSTKNVEFYSLEITDVIADTPNNKGEIWYSIHLENGWVYRRASKISLEDWKGKVRDFIVTTELNEDGSIKLDKEGKEKRSFRAPSEDDWNLIKKKTEQNIVFSGKTVGEYIYDHLLQNPNQKIKGKLVRTIERKFYKEELKAILEKQVALQPELFTEELFVDCVRELYKNNEIHQNSLSSKDFVHLFLNDIIFYQRPLRSQKSNISSCSLEYRFCIDEETKQRRKTYLKVISKSNPYYQEFRVLQWLSNLKIYRKEDDKDVTSEFISSIEDKETLYEFLMSEKEVSNKSVLEFLLMKSLREIYPFAKETELKKELKKEITKYRWNYVYEEENDSKKYPMNETGYEIKKRLKEVKNIPDNFLTKDIEYQLWHIIYSVTDKYEFEKALMKFAQKHNLDAESFVENFKRIKPYPSDYGAFSEKAIKKLLPLMRFGKYWNYSDISEPVQARISDIINGVDNESIKTIVREKAEKFQLNQEADFQGLPLWLAQYIAYGIHSEAADIQRWTSPSDLEEYLKGFKQHSLSNPIVEQVVTETLRVVKDIWEYYGKGEENFFKEIHIELGRELKKTAEERNRMTREINANEETNLKVKKELQQIFENKSAENVRPYSPIQQEKYKLWLEQKERSPYTGQPIPLSKLFTDEYQIEHVIPQSRFFDDSLSNKVICESAVNAQKGAQLGLEFIKKHGGEIIEIGLNKKVTILNEKEYKELVNELFANNRAKKAKLLMEEIPEKMVERQLNDTRYISKFISKILSNIVRSPQEDDGVNSKNIIPCTGKITAALKQDWGLNDVWNDLILPRFERMNNLTQTELFTTYSEKYQKKIPTVPLEHAKGFQKKRIDHRHHAMDALVVACATRSHINYMNNQHALDKHKAKEERQNARIDLRTALCEKKYNDNAEDKYNWTFKKPWNTFTQDVRSALEMVVVSFKQNLRVINKATNYYEKWVEEKGKKVKKKVKQEGINWAIRKPLHDDLPYGEIKYQTNYLKISENISKRKFIIDEFIRNQVERIYVENHSKNNLTKKYLKEYPVIDEKGKEVVSTDFRIEVIKYRKRKPISILSDRNSRTGITTIEKMLQAINKIADNVLKQELLLHLEQNNNDIDKAFTAEGIERFNSERKIPVYRLPFIEDGEKKIKLGSKGKYVEAAKGTNLFFGIYQGKEKRSYATIPLAEVIERQKQGLISVPELNEKGEKLLFSLSPNDLVYVPMEGEDTENIDFTNLSKEQRERVYKTVSFTGNQCFFVRQDVATSIVNKMEYSSLNKMEKGIDGIMIKDSCIKLKIDRLGNISKA

SEQ ID NO: 17495 - protein, 1172 aa, unidentified
  REGION 1..1172: note = Cas Enzyme sequence
MGSRVVPLTNLGDDKAFSKGEAFTANQKRTARRTMRRGFARYQLRRYRLRRELEKVGMLPDAALIQLPLMELWELRERAATAGERLTLPELGRVLCHINQKRGYRHVKSDAAAIVGDEGEKKKDSNSAYLAGIRANDEKLQDEHKTVGQYFAEQLLQNQSESPTGGISYRIKDQIFSRQRYIDEYDQIMAAQRVHYPDILTDEFIRMLRDEVIFMQRPLKSCKHLVSLCEFEKQEKVMRVQQDDGKGGRQLVERKVKFGPKVAPKSSPLFQLCRIYEAVNNIRLTRPDGSPRDITPEERAKIVAHLQSSASLSFAALKKLLKEKALIADQLTTKSGLKGNSTRVALAAALQSYPQYHHLLDMELEMRMMTVQLTDEETGEVTEREVSVVTDSYVRQPLYRLWHILYSIEERDAMRRALITQLGMTEEDLDGGLLDQLYRLDFVKPGYGNKSAKFICKLLPQLQQGLGYSEACAAVGYRHSNSPTSEEIAERTLLEKIPLLQRNELRQPLVEKILNQMINLVNALKAEYGVDEVRVELARELKMSREERERMTRQNGQRKEANDKVAERIRQCGLYPTKPRIQKYMLWEEAGKVCLYCGRSIEEEQCLNGDDMEVEHIIPKSVLYDDSYGNKTCACHECNQTKGNRTALEYIRAKGWETKYMERINDLLKEKKISYSKHQRLRWLKEDIPSDFLERQLRLTQYISRQAMAILQQGIRRVSASEGGVTARLRSLWGYGKILHTLNLDRYDSMGETERVSREGEATEELRIKDWSKRMDHRHHAIDALVVACTRQSYIQRLNRLSSEFGREDKKKEDQEAQEQQATETGRLSNLERWLTQRPHFSVRTVSDKVAEILISYRPGQRVVTRGRNIYRKKTADGREVSCVQRGVLVPRGELMEASLYGKILSQGRERIVKRYPLHDLKGEVVDPRLRELITTYNQELKSREKGAPIPPLCLDKDKKQEVRSVRCYVTQPSVAKAIPIRFDERGRAITFVQSGSNHHLAIYRTPKGKLVESIVSFWDAVNRARYGLPLIIKYPRKAMEQVIQREDIPESVLSLLPPADYEFVEVFQQNEMAVVGLPEEEFRRAVDTQDYRTLSEHLYRLKRISSKDYEFHYHLDTDDPDETDSSKKKKKRVRNTSGRIPRIYRIRGIGPLQKKNVRKVCVDLLGRLSLL

SEQ ID NO: 17496 - protein, 1020 aa, unidentified
  REGION 1..1020: note = Cas Enzyme sequence
MKQNKYTLGLDLGTNSIGWVLIEPGKSSKKHIVDLGVRCFEAGMNINEATGKRDSHALERRMARGRRRNLSRRQMRKETTRKRLAEANLLPLGKPNHKDDTWRGMLDLDPYSLRAKALDEKLERYELGRVFYHLAQRRGFLSNRKAGKSDKEEGVVKEGIKALSAEMEESRARTLGEYFNMLDPHAQRIRTRYTHRQWYLDEFNAIWQAQKMHYGDVLTDELHKKLKKAIFYQRPLKSVEKFIGHCALEKGRRRAPMACLAAQRLRYMQDLCHLRVVSPEYESRPITADEFELLRRELEVSSRLTFSQARKRLGIKRGFKFNLEGGDRKDLKGNTTVAKIMEAIGSRWLNLNSDEQNMMVEDLMSFTSEEALEKRARKFWKMAPEEAEAFSSIDLEEGYSSFSRKAISKILPLLKPGCSIAEAVNEAYPDRGNAAAVDILPPLEDLRNPVVQRTLAETRRLVNAIIAKHGKPARIHIELARDLKMPSKIREEQIRRMRAREKERKDAVARIIKEMDIVEPKRSAIEKVLLAEECGWECPYTGNPFKMSDLLGGQPTVDIEHIIPFSRSFDNSFANKTLCDVHENREVKRNRTPWEAYGSTDKYDDILERVRRFTGAFAKVKLERFSQKEVAAEDAFIEQYSSRQLNDTRYISSKAVEYLGQLYGAEWRKCITCVNGQTTAYFRNAWELNKLLNTENLKNRDDHRHHAIDAMVVALTNQHNITALNTASKYSTDRGDFYEYQPGRFRDMPEPWPGFLKEFSDALGRVIVSHRVSRRTNGQLHKDTVYGFIKSKEHNDELRPVVRTPLASLTEPDIRKKLIVDPVIRAKVEEVLAEKGQPPAKAFADRADHPVIVHPNGQKQVVHKVRVYQSVTPVEISDVPPRHMALGNNHHLAIYAGKNSKGEEVWNCEVVPLLEVKRRVASAEDAVRKTNERGEPLVFSLAINDTVKMMCQGEEVIAVVQAVSNVPAPDYLFKLHNDARMAKERKDDRIRIRSDAKLHKEFQIQKLAVTPLGEIHPAND

SEQ ID NO: 17497 - protein, 1556 aa, unidentified
  REGION 1..1556: note = Cas Enzyme sequence
MTKTTLGLDLGTNSIGWALVKSNAEDKSDFGTSIGKILGMGSRIIPMSQDILNNFSAGVSHSQTANRTAYRGARRLRERHLLRRERLHRVLNILGLLPTNYAKKIDFDKRLGKFLPNTEPKLTLDEEGKFVFMKSFLEMINDFPEGTKVPLEWTIYYLRKKALTDKISKQELAWILLNFNQKRGYYQQRGDIEEEVKDKLVEFHTLKITDVIDTGENRKNETWYNCKLENGWVYKRASKVPLNDWIGKTRDFIVTTSLDADGNPKVDDEGAVKRTFRSPKEDDWTLVKKKTEKMLEDSNKTVGAFIYDTLLEKKKGENIKQKVRGKLITTIERDFYKDELLQILNKQKEHHAELRDEDLYKKCVNELYKSNEAHRNMIANKDLTYLFVEDILFYHRPLKSKKHLIGTCRFEKRSFINAEGKKEEKGIRGVPKSHPLFQEFRIWNWINNLRIIQKQKEIDGKLKVDEDVTQLHLKNSKDKTHLFDFLNTKKQINEKQLLGHFGLEQKTHKWNYVRDDKVVKYYPCNETRYDLLKYFDKAGIEIILEEEEDAKSDNKPSLTYKQFETPLWHLLYSVDDLKQLKKGLTKFAGKNNLPDAFVDAFIKFPKLDKDYGSYSLKAIKKLLPLIRVGKYWSEEDIVHKFGLYYGNIKTVIKDKLKQQQKAKEENKHFNSDFLAKLQLLDDAPSAHQGLELHTACYATYARFAEADDTTKWKNPKAISDFLKNEFKQHSLRNPIVEQVISETLRLVADVWQQYGNGEKDFFDAIHIELGRELKNPKDVREQITASNLKNQNTNQRIRYLLAEFAKDPKIKGVVPYSTHQQEKLKIFEDNIVSNYEMPDDVKKIASAEQPTQKQIERYKLWLEQKYVSPYTREPIKLSDLFDRGKYEIEHIIPQATYFDNSFNNKVICEAEVNKLKDKELAYNFIENNEGTEVQVNGGMKTVKILSIEKYEKLVEQNFSGNDKKKKNLLRTEIPTKMIERQLNDTRYISKKIMGLLSNIVREPGELDHKAKRILNVNGAVTARLRNDWGLNNIWNELITPRFKRMNKITNSNNYGSINEKIKKFLPDVPIDEKKDFKKKRIDHRHHPLDAVLIACCTLNHTNLLNNETHLRAGKTKEEKKKIREDLKAKLMYHKKTTNHKTGKTEKETAFKKPWENFEQDVLTHLKKTVASFKQNTRVINKTTNYYQRFIKNENGQLKKKSVKQTKGDSWAIRKPLHKETVYGKVKVKVDNNKIITLNKALEQPYLIVDKQIRKHVLESIKTLNTTDVKLVKKHFKTNPIIIEGKKIERVKVWQWLEGTASRNLLDTSFNEKKIRNITDSGIQKILLRHLNKPNYQNQTDEEGKDIAPEKLAFTPEGITDMNVNIAALNNGKFHQPIYKVRTWEEGSRFAVGYKNSKSTKYVEAAKGTNLFYAVYQKDDKRNYTTIPLNEVIEHQKQMAEEKIKDALPIPIHPNNGQFLFYLTVNDLVYVPLENENINEIDFSNLNEHQINRIYKAVSFNKKQAFFIQANVAYPIKNKFEFSSLNKMERSINGDMIKAVCIKLNIDRLGNISLAKY

SEQ ID NO: 17498 - protein, 1014 aa, unidentified
  REGION 1..1014: note = Cas Enzyme sequence
SDIPAVHEGLVLGLDIGTNSVGWSLIELKKKKPADIKACGVRVFQTGVNIDAKSGKNESRNVERRLARQRRRMLDRRQQRKTITARLLRRAGLLPAGNPSHGTPEWKALLGQDPYVLRAKGLDQPLTPYQFGRAIFHICQRRGFQSNRKTQPKKDERGVVKEATSRLEAEMTAAGARTLGEYLNSLNPHEQRRRDRYTLRAWYRKEFNALWDAQAANEALKLDDSLRRDVERAIFYQRPLKKQKAHLLGYCELEKAAHKPRAALALLSTQRFRLLQDLNHTMVVSESGRARALTPSERALLLAELERCTAFKFSKAKKLLKLQRGDCFNMEEGGREAFQGDSTAAGIRSVLGERWDAADAHAKAQLVEDLMSIENPEALERRVKRVWQLDDVDAEALSDVSPEDGHASLSTKAINKILPFLEAGLSYAEARDKAYPERAEPPSVDKLPALENLRNPMVQRSLAEVRHVVNALVAEYGKPGRIRIELARDLKQNARKREETWQDMRRREKDRQRVAERIVKEAGLTQPKRSDIEKALLFEECEGTCPYTGQGISFRDLFGDSPRFDVEHIIPFSRSLDDSYANKTLCEVGENRSHKRNRTPCEAYGQTDRWKDILGRVRGFSGTYAREKLRRFMIEEVAGEDGFVEDFSSKQLNDTRYASLRARDFLAHLYPAAERKKRMQVSAGRTTAYLRSAWKLNGLLSDGDFKSRDDHRHHALDAVVVALTEPAVTKALATAAGQARRPGVFDRMPEPMPNFVEKVRKALEPIVVSHRVSRRLNGPLHEDTIYGLIKVEGTNCKAVIRKRLDALSDADIKKNAIVDKAVREAVHAKLAELGLPPAKAFQDVANRPCLKLKSGRLVRIRRVRIFKNELPERIGAEPGRLIIPGNNHHMEVFSVNDRKGNSTWKCEVISLLDAKGRQKLGQPVVRADDEHGNKLVFSLAIGDAVQMEWQGHQVVAVVLKLSDRDYCFRQHTDARLVGALGDDLIRITSESALFRSKCRKVSVDALGRTHACHD

SEQ ID NO: 17499 - protein, 1429 aa, unidentified
  REGION 1..1429: note = Cas Enzyme sequence
MKNILGLDLGTTSIGFAHVIESDDPLKSIIKQIGVRVNPLTTDEQTNFEKGKPITINADRTLKRGARRNLDRYQDRRANLIHALFKANVITKETKLAEDGKSTTHSTWRLRAQSVTEKIEKDDLARVLLAINKKRGYKSSRKAKNEDEGQAIDGMEMAKKLYEEKLTPGQFGYALLQAGKKNISDFYRSDLEEELDKVWAFQKNYYPEIFTDEFKKELEGKGQRATSAIFWVKYRFNTAENKGTREEKKVQAYKWRSEAISQQLEKEEVAYVITEINNNLNNSSGYLGAISDRSKELYFNKQTVGQYLFKQLLKNPHTQLKNQVFYRQDYLDEFELIWSEQKKYHPELTDEPKVEIRDIVIFYQRKLKSQKGLVSFCEFERKEIEIETGKKKIIGLKVAPKSSPLFQEFKIWQVLHNVLIKKKESKKRMEKKENQSSLVESEKEIFAFSLEERKHLFEELNLKGNLPSKTVFELLGHKIQDWEINYSVLEGNRTNKALYEAYLKILDIEGYDVKELLEVKSNKDEVELDDIQIAASEIKNMIKQIFEILKIDTAILDFDPELDGKEFEQQASYQFWHLLYSYEGDESASGNEKLYELLEKKFGFKREHSQILADVTLSDDYGNLSSKAIRKIYPYIKENNYSTACELAEYSHSASSLTKEEIANRPLKDKLEILKKNSLRNPVVEKILNQLVNVVNALIEKNSKRDESGNIVEYFKFDEIRIELARDLKKNAKERAEMTSSINTAKTNHEKIFKLLQNEFGVKNPSRNDIIRYRLYEELKNNGYKDLYTNSYISREILFSKQIDIDHIIPQAKLFDDSFSNKTVVFRKDNLEKGSKTAYDYISAKHGATQLADFETRIASLFEIGKKNKEEGISKAKYQKLQKKESQIGDGFIQRDLRDTQYIAKKAKNMLFEIARSVISTTGSVTNRLREDWDLINVMQELNFDKFKKLGLTEMVEKKDGTFKERIKDWSKRNDHRHHAMDALTVAFTRHNHIQYLNNLNARKQESNKLHRNIIGIETKETHVAIDDTGNKKRVFNLPIPNFREQAKAHLENVLVSHKAKNKVVTKNKNRTKLKTGEKIKVELTPRGQLHKETVYGKYRYYTSKVEKVGIKFDLPIIGRVANPRYKQALLNRLSESGNDPLKAFSGKNSPSKKPIYLNDEKTAILPEKVKLVWLEEDYSIRKDVTPENFKDEKSIEKVIDIGTKRILLGRLAEFGGDSKKAFSELDKKPIWLNKDKGISIKRVAISGVKNAEALHYKKDHLGNEILDKKGNQIPVDFVSTGNNHHVAIYINDKGEIQENVVALFEALERVNQGLPIIDKTYNQYLGWVFLFTMKQNEYFVFANTSTGFNPKEVDLLDSKNMLAISPNLFRVQKFTKKDYFFRHHFETTVEDNSNLKGTTWKREGLSGINGIVKVRLNHLGEIVKVGEY

SEQ ID NO: 17500 - protein, 1429 aa, unidentified
  REGION 1..1429: note = Cas Enzyme sequence
MKNILGLDLGTTSIGFAHVIESDDPLKSIIKQIGVRVNPLTTDEQTNFEKGKPITINADRTLKRGARRNLDRYQDRRANLIHALFKANVITKETKLAEDGKSTTHSTWRLRAQSVTEKIEKDDLARVLLAINKKRGYKSSRKAKNEDEGQAIDGMEMAKKLYEEKLTPGQFGYALLQAGKKNISDFYRSDLEEELDKVWAFQKNYYPEIFTDEFKKELEGKGQRATSAIFWVKYRFNTAENKGTREEKKVQAYKWRSEAISQQLEKEEVAYVITEINNNLNNSSGYLGAISDRSKELYFNKQTVGQYLFKQLLKNPHTQLKNQVFYRQDYLDEFELIWSEQKKYHPELTDEPKVEIRDIVIFYQRKLKSQKGLVSFCEFERKEIEIETGKKKIIGLKVAPKSSPLFQEFKIWQVLHNVLIKKKESKKRMEKKENQSSLVESEKEIFAFSLEERKHLFEELNLKGNLPSKTVFELLGHKIQDWEINYSVFEGNRTNKALYEAYLKILDIEGYDVKELLEVKSNKDEVELDDIQIAASEIKNMIKQIFEILKIDTAILDFDPELDGKEFEQQASYQFWHLLYSYEGDESASGNEKLYELLEKKFGFKREHSQILADVTLSDDYGNLSSKAIRKIYPYIKENNYSTACELAEYSHSASSLTKEEIANRPLKDKLEILKKNSLRNPVVEKILNQLVNVVNALIEKNSKRDESGNIVEYFKFDEIRIELARDLKKNAKERAEMTSSINTAKTNHEKIFKLLQNEFGVKNPSRNDIIRYRLYEELKNNGYKDLYTNSYISREILFSKQIDIDHIIPQAKLFDDSFSNKTVVFRKDNLEKGSKTAYDYISAKHGATQLADFETRIASLFEIGKKNKEEGISKAKYQKLQKKESQIGDGFIQRDLRDTQYIAKKAKNMLFEIARSVISTSGSVTNRLREDWDLINVMQELNFDKFKKLGLTEMVEKKDGTFKERIKDWSKRNDHRHHAMDALTVAFTRHNHIQYLNNLNARKQESNKLHRNIIGIETKETHVAIDDTGNKKRVFNLPIPNFREQAKAHLENVLVSHKAKNKVVTKNKNRTKLKTGEKIKVELTPRGQLHKETVYGKYRYYTSKVEKVGIKFDLPIIGRVANPRYKQALLNRLSESGNDPLKAFSGKNSPSKKPIYLNDEKTAILPEKVKLVWLEEDYSIRKDVTPENFKDEKSIEKVIDIGTKRILLGRLAEFGGDSKKAFSELDKKPIWLNKDKGISIKRVAISGVKNAEALHYKKDHLGNEILDKRGNQIPVDFVSTGNNHHVAIYINDKGEIQENVVALFEALERVNQGLPIIDKTYNQYLGWVFLFTMKQNEYFVFANTSTGFNPKEVDLLDSKNMLAISPNLFRVQKFTKKDYFFRHHFETTVEDNSNLKGTTWKREGLSGINGIVKVRLNHLGEIVKVGEY

SEQ ID NO: 17501 - protein, 1022 aa, unidentified
  REGION 1..1022: note = Cas Enzyme sequence
MKERILGLDLGTTSVGFALIEYDQANRNGEIIRMGSRIFPEGYEQSQTAVEPKNKQRREKRLLRRQVRRRKVRKIALCKRFYEVGLFPRFESEEWKDLMNTDPYVLRTKGVDEKLELYELGRSLYHLVQRRGFKSSRKTLEESSSEGEKERGVVKEAIEELRKDLKGDSLGKFLNKLSKEGDKKRNRYLARQMVIDEFELLWDTQKSYYPKILNDDLKSEIKGIAFTQRSTFWRLETLGKCNLEPGKSLCLKGSWLGQEFLMLQDLNNLKFNDTEEPLEEEQRTKLIEELNKQGQMRWGKIRKFLGIPGKLKFNLEVGKVTDKLQGNLVEAKLYQVLGDSFLNHPMKQRMLEEVPQRLWDIDYERLGKKKVIIRSDKEAEKSRAEFVQYAISEFKLKKKEAQGISEIALPQGWLAHSSEALNKLLPHMKEGTGYAEAKKAVYPDSAVMKGGDLEKLPSDQRHIEHIRNPGVKRTLNELRKVVNNIIRVYGKPDRIRVELARDLKKPGALRREIKFEMDKQKKKRDEAREDLISRGIPNPDRETVEKWLLWKESEEQCLYTGRDITFNDLFLNNKFQIEHILPRSETFDNRFSNKTLCEAEFNNHKDKRIPFEAFGKNEWGEFVMRVKKSKLPFYKKTKLMAKSLTDVFGEGFTDRQLIDTAYVAREARDFLLPLFEKKEGKALPVETSNGMITSQLRGLWRLNSLLNDENKKTRDDHRHHAIDALVVAMVSPGVAKQMSDFSKRYQKGNEAQFPPPWLTFRGDIEEAIDSIVVSHKVQSKISGGLHHETVYGYTKQTRKKQGIEYGIFYRRLNLNEAKEGIIKKLKEGSDEFIWDDGGRNKEVIIKHLKKYGDFKKYPEFRMKNGEKRKIKYIKEIVPQKQKLMTGIGKDNASYVIKQENHHMVIYETPEGDKKSEVVSLFDASKRLSKKQPVVQRDLSKGRFIMSLTKGDTLRVPDDKETDKNKYILVESIWESGQIVTTDVTDATGERKNKTQKMAHSWINEGGEKVTVDPIGRVYPKND

SEQ ID NO: 17502 - protein, 985 aa, unidentified
  REGION 1..985: note = Cas Enzyme sequence
RNAGSEKEDGVLQEGDSKTGKTGMNETRDAMNSGTLGTYLNSIHPKVGESFTSGLPRIRNRYTDRNMYTDEFDAIYTSQQKFHPVVLDEKLRQVLGGRLKEGSSIEGVLFFQRPLRSQKGLIGKCTFEPSKPKAHISCLEFQEARVLQFVNTIECNGEKLNESEKNQVTEFLICKVKVKFSEIKKLLKKVSSSENFNYEDDHQVVGSEVIKTLSSKNYFGKKWFDFNDKEKEDIWHVLYFFDDKTKLQQHAIVKWGLSEENALILSKYRLPSNYASLSRKALRNILPFLRLGLTYDLAVVLGGVKNAFGSKWDDLSEDKLQFIIDTTIDIARSGSKGGFIDLLKSFLTDEFKLTDKELTKLYHHSQTKTTGDILDKLPVGKEADKEIMSIRNPVVVQALFELRKVYNSVTGDFGKPDMVKVELARDLKSSRDQRYKIRRENQAIESMHDRIKDELRANNIQINHESILKYRLWEECQHTCPYTGKQIGLTQLYSGEVQIEHIFPWSRSLDDSFNNKTLCFAKFNLEKGNKTPFEYYSSLDEQSWIEVKNRALKLFHTSKEFPKRYNKFKRFVQESFDDDLASRHLNDTRYISLEAKSLLEKVAPKVMVAPGTLTAKLRHMWGLNNVLSDDNLKNREDHRHHAIDALVLACFKPQQLNVISRHNRYRASEEDTPQFKEPWKNFHTETTQAVNGILVSHKKSKKTITRRLNKAKKDSQVYANLGIAARGQLHKETIFGKRTNPNGEVAYHVRVPLESITSKNHIDKIVDQGIRRLIEERIEQLGGYEGSKFDKVPNSAFFTYDSDKNERIPMIWLNNSNGDKVPVYKVRKSESISNAVPLKEGKNQYVNPRNNHHVLLYKNAKGEIEEDVISFWTAVERKRKGEQLYQVPENTSLVSSLETNETFLLGLQDEKALAMSQHALLPHLFRVQKISSFDYNFRHVNESTILNNDESAMRRIRSLGEGKGGWLTHNPIKVKISASGKIEFL

SEQ ID NO: 17503 - protein, 1498 aa, unidentified
  REGION 1..1498: note = Cas Enzyme sequence
METTLGIDLGTNSIGLALVDQEEHQILYSGVRIFPEGINKDTIGLGEKEESRNATRRAKRQMRRQYFRKKLRKAKLLELLIAYDMCPLKPEDVRRWKNWDKQQKSIARQFPDTPEFREWLKQNPYELRKRAVTEDITRPELGRILYQMIQRRGFLSSRKGKEEGKIFTGKDRMVGIDEIRKNLQNRTLGAYLYDIAPKNGEKYRFRTERVRARYTLRDMYIREFEIIWQRQAGHLGLAHEQATRKKNIFLEGSATNVRNSKLITHLQAKYGRGHVLIEDTRITVTFQLPLKEVLGGKIEIEEEQLKFKSNESVLFWQRPLRSQKSLLSKCVFEGRNFYDSVHQKWIIAGPTPAPLSHPEFEEFRAYQFINNIIYGKNEHLTAIQREAVFELMCTESKDFNFEKIPKHLKLFEKFNFDDTTKVPVCTTISQLRKLFPHPVWEEKREEIWHCFYFYDDNALLFEKLQKDYALQTNDLEKIKKIRLSEGYGNVSLKAIRRINPYLKKGYAYSTAVLLGGIRNSFGKRFEYFKEYEPEIEKAVCRILKEKNAEGEAIRKIKDYLVHNRFGFAKNDRAFQKLYHHSQAITTQAQKERLSETDNLRNPIVQQGLNELRRTVNKLLATCREKYGPSFKFDHIHVEMGRELRSSKTEREKQSRQIRENEKKNEAAKIKLAEYGLKAYRDNIQKYLLYKEIEEKGGTVCCPYTGKTLNISHVLGSDNSVQIEHIIPYSISLDDSLANKTLCDATFNREKGELTPYDFYQKDPSPEKWGAGNWEEIEDRAFRLLPYAKAQRFIRRKPQESNEFISRQLNDTRYISKKAVEYLSAICSDVKAFPGRLTAELRHLWGINNILQSAPEITFSLPVSATENRREYYVITNEKNEALRLLPKQGDVPQTEKGELLLAGRVERKVFKCKGMPEFPTDASDGKYWRRIKLSSSVTWSPLFASKPISADGQIVLKGRIEKGVFVCNQLKQKLKTGLPDGSYWISLPVISQTFKEGESVNNNKLTSRQVQLFGRVREGIFRCNNYQCPASGADGNFWCTLDTDTAQPAFTPIKNAPPGVGGGQIILTGDVDDKGIFHADDDLHYELPASLPKGKYYGIFTVESCDPTLIPIELSAPKTSKGENLIEGNIWVDEHTGEVRFDPKKNREDQRHHAIDAIVIALSSQSLFQRLSTYNARRENKKRGLDSTEHFPSPWPGFAQDVRQSVVPLLVSYKQNPKTLCKISKTLYKDGKKIHSCGNAVRGQLHKETVYGQRTAPGATEKSYHIRKDIRELKTSKHIGKVVDITIRQMLLKHLQENYHIDITQEFNIPSDAFFKEGVYRIFLPNKHGEPVPIKKIRMKEELGNAERLKDNINQYVNPRNNHHVMIYQDADGNLKEEIVSFWSVIERQNQGQPIYQLPREGRNIVSILQINDTFLIGLKEEELEVYRNDLSTLSKHLYRVQKLSGMYYTFRHHLASTLNNEREEFRIQSLEAWKRANPVKVQIDEIGRITFLNGPLC

SEQ ID NO: 17504 - protein, 1019 aa, unidentified
  REGION 1..1019: note = Cas Enzyme sequence
MQNQLQMILGLDLGTTSVGWALVEYDPNTKKPSNLIDAGVRIFPEGMDRTRGEKSLNQDRREARSLRRQLCRRRRRKDKLKNCLIKAGLLPNDPDKFEILFENSDPYELRAGVLETRLEPWQIGRALYHLGQRRGYLSNRKTGQDKDGAVAGGIFEIEQAMQENGFKTLGQYFKSLDPRQHRIRGRYTSRKMYQKEFELIWEAQANYYPKELNVANKKAIYDAIFFQRPLKIQKHLVGECEFEPGRKRAPAASLIAQEFRLWSSINNLRILLGNGSERPLTDKERLMLHDNLANKKELSWDKIRDLLNLFETDRFNLERVRKSNLQGNKTAALVIAGLGAKNWKALGNRQQEDLVHDLVFLDDETLKNRLQRHWRFEPDVIDTLLKKSLELPKGYMHLSQKAMRNIVKHLSFAETEDNRGLTYDQACLVAGYVHTKPQEQKNLEALPFPGTPARKRGKHQESLITTAGLRNPMVERALFQVRRVVNSIIGTYGKPEIIRIEMARDLKNNAKQRSDIQKHQRENEQANQEGEKFLREEMGFSNPSGTDKLKYRLWQECGHVCVFSGRSINAHDLFVEPQFQIEHIVPYSRCLDDSYMNKTLCHVDWNQRKGNQTPAEAFTGDEYEAMLQRAKQLPYAKFRRFATDAIKSLDEFVSQQLNETRYIAVKTAEYLKQLGVRVDHVKGGTTAILRRAWELDGLLSDNGEKTRLDHRHHAVDAIVTALTNRNAVRKINTYSNRTHHGRIRTENYPAPITDVRKQTRELLDNMIVSHKQQRKIKGPLHKDFLYSLTGKVDASGTPIVAIRKKLTDMKADDLDHSRDPAIQELAKRHLAKSKNYNDAFKNPDNPFGMMSKKGKFIPIHKVRLIYNRSVTSIGKPLSAKNEKRRNVWTMGNHHAEIVEYKDQAGNAKWKAYVISTLEATLRCASKTNCSVIKTDYDNERFLLALHPNDTVKLTHKGEEKICRVQKMDINENIVFREHCDADIKDRKKQISYKANSLKHTCIRLLEIDPLGKILKEISI

SEQ ID NO: 17505 - protein, 1051 aa, unidentified
  REGION 1..1051: note = Cas Enzyme sequence
MQTTRNRILGLDLGANSLGWALLEPDGATCTVVAAGVRVFEAGHANFDTNKEASRNKERREKRLIRRVLARRVKRKTHLFHLLQDAGLLPAGPATAPAERTQILMNLDRELATMWAGGDHRVAQIVPYLLRAAALDRQLPPHALGRALYHLGQRRGFKSNRKSPPRADEKPGVVKHDIDDLYAQLKDTKSRTLGEFLAGCDPFERRIRQRWTAREMFVKEFDTIWAAQLDHHPTLLTKGLRSALRQALFFQNPLKSQRQFLGPCEFEPTRRRAPRACLAFQAFRILQKVNNLTVISEDTGEERRLHPDEREALVQHLNTKAKITFKGIARLLKLGKVQFNLELSGEKAFTGNTTVHKLRDLLGPHWDNLAATEQDRLVNEILAYASEQGLRRRLKREWGYDDATARKVAVVALEPGYANLSRVAMSKLLPGLEEGLHYAAAAEKAYPAHRRTKAILESLPPSVRVVGEVRNPTVLRSLSELRKVVNAVIRAYGKPTIIRIELARSLKRPRMVRMDMHRRNSQNQTAREDAAKRIIEETGIVAPTSADIEKHLLAQECNWTCPYTGRTITHNALFDKSQFDVEHIIPRQRSLNNSFLNKTLCWHEENRHHKRNKTPLEAYGPADSPAFNVILDRVRRFQGPKGLTRGKLRFFSMTSAQVVEEFDGFCDRHLRDTAYASRLAADYVAVLYGGRVDFRGTQRVQATSGQANGILRSAWRLNAILGDGPGKSRDDHRHHAIDAVVTALATPDQIRILSARSNYRNGRQTFTDVPLPYTNLVDEVRRVVGGIVVSHRLNRKLNGSLHEESNYSKAQYHPTGKNGFMEEWRHIRTPIQDLSTGDIERIVDARVRESVRHKLEALGRAGPKQAFAETANHPRLPTANGGEIPIHRVRIRKKVRVTQIGGSVTLRNVSLGSNHHLEILEVAATAASRSPKWVGRLVSRFEAMQRWQQGASLIGGPRSSEEKLLFTLRPSECVRMVHDGEEGIFVLKSISQALNQSPRLEFLTLTEARQQKDFRKKGEKARVIKSPDTLRTADASKVMISPLGDILPSRD

SEQ ID NO: 17506 - protein, 1080 aa, unidentified
  REGION 1..1080: note = Cas Enzyme sequence
MAVKSEELKGAPYILGLDLGAASLGWAIVGLADGKPARHIDGGVRIFPEAVKNLEQGRDEPKGAQRRSARQMRRQTDRRRRRVASAFRVLQKAGLLPPFPEGADPADSLARHDLINRLDRDLASAVPGLIDPALEHRSRSVFHYRLRALAIHQDLPPYAVGRAFLHIAQHRGFKSGRIEEASESGKGDERESKAKKERSEVKIRIESLPAEFERLGACTIGEYWSKLDPNQKRIRGLGNWSARQMHLDEFDLIWQRQAPRHPEIMTPALYRIVRRRIFYQRPLKSAAGLIGQCELEPQRRRAPLAHLLYQRFRILQTVNDLRIASSARLSRPLTPEQRAKALDVFSSRQTVTFGPLGKKLGLLPGESFSHEEGDRKDAPGNRTDCKLREVFGERWDALAEQDKNVIAGCVRSMDDSAALCRLAETRWELDHLQAARLSTVQLEQGYGRLSLAALRKLLPLMEQGLPYITAVEKVYPDRALAPMVELLPQVLDLKNVRNPAVVRALTELRKVVNGVIRLYGRPERIQIELARELKKPKDVRKSIASENRERDSLRKSAIEKIFKECGLGRPSEVDIQKAILWEECRHECPYTGASINFHDLFGSDARWEIEHIVPYSRSLDDSLTNKTLCSRETNRRKGNRTPFQAFGNTPEWEAMVERATKFQGDRRAMARKLARFTIEGGVDEILDEFTQRQLNDTKYASRLAMEYLGLLYGGVCDENGVRRVAAVSGGVTAQIRKGWRMHSILRDGPSQGEAKPRDDHRHHAIDALVVALTDAGAVQAISRASERSRLDHRHGFRVDDPWTGFLDEVRAVLGAIRVSHRPDHHLRGALHAESLYSPPRTEGGAEPRHRIRKWVSSLTPGQAGEIVDSAVRKAVEAKLKELGQADPRDAFKNNANLPALGNRHGDPVPIRRVRVFVSGSPQRIGAGASIRYVMSKDNHHLAVYRLPPGKKGTERWTGEAVNLLEAVARKQGGRPVIAPANELGAPLVMALYKGDMLEMTVPKSEPVERELFVVRGFSVERTGRPEINIVRHNRAAEIADLKGAGEWKRIRNWDEFRLLEPRIVRLDALGRVMPDGGQPN

SEQ ID NO: 17507 - protein, 1330 aa, unidentified
  REGION 1..1330: note = Cas Enzyme sequence
MRTLGIDIGTGSLGWAICEKEGRNGTPVLKEHGIMVFPEGIDRDQTGEKPKNQQRRLSRGTRRRYFRRKRRKQMLLKELIANGLCPLSKEALARWVKDDIYPDEEAFRTWFKTQPFELRAEATERAYTAHELGRVIYHMGQRRGFRSNRKGGDKGDQKALMEGDAKRGIKSVPETEALVSTHGSLAKAAVFLNKQAVIEPIRRRFIKRDTYTKEFEEVWLAQRELLAKGSAAQRALAERLTDKLKERIGHPFDGIIFFQRPLRSQKGSVGKCRFEPKKARAPQCSLVAEVFEVLQTVNNIKVDGKPLSDELRNLVINELFLKKDRFTAEDLNKALLKWKVDGRSNYAGTEAKNVKFKGAEAIKDLASLFNKDKKEIQAVARAIFDNPEDKLWLDRWAAIRDAENDDDITKEKAAGRDVGKKRDLFEYAKTQWGFNDDKLKQLMKMQAWKQGYANMSTKAMRKMIPWLRQGMIFSHAAFVANVDEAFGERWKTMTAEQQKNVVKGMQDIVESMRVEKGRVELLNGLIKQFKRHWDETKQAHGFWNDARRAAFDKSFNDWATKDLAEQLGDAQREELRGRVVAEFDKQVDEHGVRAPFITLERTDEKIAHYLTEHWQVDADGVGKLYHPADIELYPQAKGDKLGSPFHPALKNPVAIKALHALRMLMNALLGNGAIDRDTRIRIELARELNSTNERRAWQWYQNDMYERRRKAEAECKKWFDAHMPGASITEDAIQRVWLMQETEEVLGQAKCVYTDRSLEMDNVLGDRANVDIEHTWPIWRSLDDSLANKMLCDREYNRAPDGKHNSIPAELPNWKEAKNIGGRDYPALLANVEKFREMMERYKHLVEIRKQDSKHAADPDTKSKAIVQKHYYNHHYRYWKTKYEHFSLEAIPLGFTNRQQVEVGMITRYSRAYLRTLFPRVDSVKGSLVELMRREWMGEAYEEKNPKSPQYRSSHFHHLVDAVVLASTDKDLTDNLGHQLREKEKTGGKIKPKKPWENFSSDVLKLKDRVLVYHYSTDPLGRTSRYKVKIKGKQRIVTGSTVRGGLHKETIYGRILKKNAAGVYVPRIVLRSMLADLKPGDVANIVDKKLQDRIAAYGLEKAQTEGGYRWEITRKDGTTATHIVRKVRLFDRLDSPLEIKAHRDRAVGREHKHFQLAANEDNHFMAVYENDRGDRSFHILTLFELTQALRNGNRKNFPNALFPLTIEREVRGRKVPYQLMTRGGKPVVLHKDQMVLLFAEGPEEVAWSDKADLNARLYKIRSFEGDGRVMLMHHMEARPASKVDKASEFSKTVTDKRVRLSLNNLNGLFENVDFKSHPNEVVVRMDEAHI

SEQ ID NO: 17508 - protein, 1072 aa, unidentified
  REGION 1..1072: note = Cas Enzyme sequence
MSTSPTAQRILGLDIGVASVGWCLLEMDGDSPSRILGTGSRIFSPGVIGDFKNGRDEPKNQKRREARQMRRQLWRKRRRLVKLHRALIRSKLLPDPGAFDPESIDLSLKQLDRQLAAQDPLMSDRRGAQVFHYRLRARCVTGKVEPYELGRALYHLAQHRGYLSNRKTKKKEGEAEDDGAVAKGIGELSAKITASGLPTLGAYFASIDPEIERIRSRWLGRNEFIVPEFNAIVAEQVKHHRHLTDEHWEVIRDAIFRQRPLRDQSHLIGKCSIEPTERRCPVAYLPAQRFRILTSVNHLRILTMDGEVSRASRPLTPVERTLLLEALETESSLGWAKARKLLNLKAKEAKFSIEIDGEKGLIGSRTAAMMRVAIGARWDTMLANEQQSMIDDVLQYESQDALAKRGILHWKLSKEDAKSLAETNLEPARLNLSLRAIQNLLPHLELGLSVMEAKIAAYPSQSGAGEPWDLLPPIRPDRVWQGHCSGGRSYQGIEIRNPAVERSLSEVRKVVNAIIRGWGKPDQVRIELARDLKKPRQERKEETTRMREQQGRRDQALSKMVQEGFANISERNSRSDVEKVLLWEECGGVCPYTGKSISFEDLFGASPRFEVEHIIPYSLCLEDGFGNKTLCEVNENRNIKRRSSPFDAYHSTSKWEQIITRVKQFKSRSASKKLKLFQSDKNGTEIFGDFVDRQLNDTRYASVLAANYVGLLYGGQIDVTRKSRVCVSAGGATAIVRRKLGIEGVLGGGEKNRKDHRHHAVDAIAIALTGPREVRAIALASESAILRGEASHRLKIEAPWEGFADDVKRSIDGVVVSHRVDRRLSGPMHQETNYSRPICDAKGVVKDALLRHSRCRLDSLKSGDVEDIVDPRVREAVRRQLMALGQTDPKIAFKGGQNLPTMRHGDGREVEIRKARIKLRKTVDAVGRGSATRYVAPGSNHHMAVVDVLGPNGKMLSRELEVVTLLEAFRRKQRGEPIVQQDWGVGRRLAFTLRSGDMVEMDLGGTLAACVVSSISNGLVEMKIHKDARPATEIKKAGVAGGRLKFATRAFLQGLQRKIEVQFLGAVSLAND

SEQ ID NO: 17509 - protein, 1062 aa, unidentified
  REGION 1..1062: note = Cas Enzyme sequence
MPIGLLNASDAMDNRPTLGVRIFERGVDNYEQGEKEQTRGVARRLARQQRRQTARRARRIRRTFKILVEAGLLPAVTAEDVRAAGSPEAARDGVLKRLDARLATESRFGPEQARHQLLPYLLRTQALQASLSPYELGRALYHLAQRRGFQTNRKSGRSDEDVGEVKKAITKLAVEIEATGCKTLGAYLFRAGCSGATVRRQWTARKMYLAEFDAIWDAQRRFHGALLDERLRRRLHSAIFHQRPLRSQRDTVGLCEIEDGGEHLDPRTGEVCRVRKRRRAPECFLVSQRFRLLQAVNNLRILPAHGEPQPLNEEQRALLAAELERRDHLTFAAISELLGLPKRTKYNLQEGGEKRVLGNRTHSALLEIFGARWSSLESSAKHAIVLELWGAESDDSVAKRAAAAAGPWASLRPTAAEVKNLGSISLSSDYMALSATAMQRLLPEMERGARYDEAVKLVYGVRVASTACDQLPPVLTALSELRNPVVTRALTELRRVVNALVRMYGKPELVRVELARDLKRNKLDRQKLAKQMRDNEKERETARDQIRRCQDAGITNPTATDILKMRLHAECGGVCPYTGRPIGMAQLFRGDVDIEHILPLSMSLDDSFLNKTLCFADVNRSVKRNRTPFQAFGSREDDWRAMLRRMELSVESKRMSPEKLRRFALRDDELAQHLEQFSTAQLNDTRYASRLARRYIALLFGGQLATGVDASGRTRVQVGNGQLTALLRTGLGMGRALITESGDKRDDHRHHAIDAVATALSVPALLKRVSDHAEHEWRKRDRLGPVPAPWSTFTSDLTDAIERVAVSHRVDNRVRGALHAETLYSEQRDGHGKLSDEGSFTHKRELLEKLKPKDFERIVDPVVRSIVERHFGARAPAEVLNPDDPSTWPHLPNARGAPIPIRKVRVRKSMLGKPLGAGPRRRLVATDENHHLELVEGVDRRGTPTWSARVVPLLAAHERLAARRRGRRVDVVERSGGFQFALAKNDCVTMLDGDGQTRLFVVRGFSQFNNGTVQVALLGNTDARPVSEVPKEGRTAVPNVLRQRNCRKVTVSPIGVVRPCRA

SEQ ID NO: 17510 - protein, 1054 aa, unidentified
  REGION 1..1054: note = Cas Enzyme sequence
MSERLTILGLDLGAASIGWALLSAREEGDSLRPDALIAAGVRIFQAGMEGDMAAGREESRAKGRRDARLARRQTERRARRLRTVFNALRNAGLLPTYPGLDPSTSAGRHQSILRLDEEVCRSDRLDRLAQKIGVRGAADKLPYVLRAAALDHPLEPHELGRALYHLAQRRGFLSNRRSPRREDDEGIVHSGISQIRDDMARTGSRTLGEHLSRIDPHQQRIRSRYTARAMLIDEFEAIWASQQRFQPSLLTPELKKRIHHLIFHQRPLKSQSDKIGRCELEPKRRRAPWALLVAQRFRMLQSVNNLRIRNESGVEFELTPEQRQVLIAELDKKKEVTFDRIRRLLRMPDVTFNIERGGEKRLRGNETNAILAKVFGSRWWEFGHDTRNAIVDDLLSIHKAETIERRGREVWGLDAEKAREFANSRLPDGHCRFSRRALVKLLPHLEEGLTTQLAIERAYPDNRLVGRARDVLPPVKEVLPDLRNPAVTRTLTELRRVTNAIISRYGRPARIHIELARDLRRGKDERKRLQSENRKQEAIRKAAAEEIREFRQGEEPTRQDIERLLLAKECEFTCPYTGKKFSMAALFGPEPQVDVEHIVPFHMSLDNSFANRTLCFAEENRNVKRGRTPFEAYGDTPRWNYILERVRNFKSRLAGEKLFRFQLHGDELNQWLADFSSRQLNDTRYASRLALRYLSLLYGGTTDGVDPAGKRRITVVTGQTTAHVRNWLQLGSILNDGGEKTRDDHRHHAVDAIAIALTSQRTVQLLSTASRNQLLRKGRLYGDPEPPWPTFLEEVQATISGLVVSPRVERRVRGPLHAETFYSPRTEEGVKSPEGRHVYYTKRLADLSPSMVAKIVDPTVRRLVTDALGGGEPKDVFKDESRLPRFVRRNGKTVPIRKARIRDRVTVTPIGNQDRQRFVQTSGNHHLEVFELTDARGRTRWEGRVVSMLDAYDRIRKDVPVVNREYVPGSRFLFSLVGNPGGDVIELDEPDGTRGLYVVESIWMTDDLARVRIRPLNQARQGKVRIEPVINILGRRHCRKVAIDLLGNVSYAND

SEQ ID NO: 17511 - protein, 1073 aa, unidentified
  REGION 1..1073: note = Cas Enzyme sequence
LGIDLGSNSLGWAIVLEENEKPTGLVDAGVRVFEAGVDESRGTIERGKDASRAKARRDARLQRRQLMRRARRVRLAFRILQQSGLLPGGADPADSKQRHELLNQLDKDLAAKHLPESDRIAGHLLPYRLRAKAIHERLEPHELGRALLHVAQRRGFKSNRKTGKRDDEGVVKKGISQLEQEMKDAGAETLGEFYAKIDPEARRIRTRYTSRKMYENEFERIWTTQAAFHPVLLTDQVKRRLYRAIFHQRPISSQKGLVGRCELEPKSRRAAAARLVHQWFRLLQRVNDLEFICPDGEVLRLTDERMTAERQRLIDALETLGDIEFSGKKTKTKKQDEQPQRPKKPKKDSRPTVRSLLGLSDEHEINLERGGEKKLPGNRTNAAMAEIFGPRWFEFSDAERDRIIDDVLSIQNDAVLERRGKGVWGLSEEDAKAFAEVELEPDYASLSCRAMTKLLPALKNGEQYATARRRLYPERFQADVALGKLPPALKAVPQLRNPAVARALTELRTVINAIIRVHGKPELIRIELARDLKRPRKVRERIWEQNRENQTAREGAKVRFLQEMGIAQPRGDAIEKVLLAEECNWKCPYTGRPISMRALLGDSPEFDVEHIIPFSRSLDNSFMNKTLCYHDENRNRKRNRTPFEAYGVHESLANQWHEIMVGVRNFQGSAGKAKLRRFEMEEIPDDFAASQLNDTRYASRLSADYLGLLYGGRVDESHEQRVQPNTGGVTAFLRAEWGLNFILNDGPRKERKDHRHHAVDAICIALSSAKIVKMLSDAASRAVPGRRFDPVEPPWPTFDADARKAIEAINVSYRVSRRVSGPLHEETNYSPPFKVVNEDHKLVEYRHVRKPLDMLSRDRLDAIVDPVIRQRVLDKLTELNETDPKKAFKLPENHPVTAARDGRKIPIHKVRIREKVAAITVGGDTKEPDRKTGRERYVSPGSNHHMEILAVQSKNAEVEKWEGVLVSMFDAAKRVLDKRPVVKRDHGDGKRFLFSLGLHEIVRMDENGTRMLCRITGISEGLIELRPHTEARPGSVLKKIKGGRIFRTADTLRKSHAEKVTVDPLGRVHVARD

SEQ ID NO: 17512 - protein, 1032 aa, unidentified
  REGION 1..1032: note = Cas Enzyme sequence
VADSTILGLDLGTNSVGWCLLAASDGHPTGIIASGSRIFDAGMDGDVASGRAEPRNLARRQARQQRRQTFRRAHRLRKVYGLLQQAGLLPAGNAATALPALDALLRQQHCTAGVECLDHVLPYWLRAQGLDRPLSPHELGRTLYHLAQRRGYLTNRRTPRKADDDAGVVEAGIQSLQAEIAQSGSRTLGEHFSRLDPHKRRIRQRWTSREMFVREFDAIIARQAPHHPQLAAEFCQRLRKAVFRQRPLKSARRLVGRCSLEPARRRAPIALLALQRFRVLQQVCNCRVITADGVQRPLTDGERATLIERLHRAGDATFTQAKKLLKLPGASFSIEEGGEERFVGNRTNAKLADIFGERWWSLSDQQRDQVVTDVRSFRSAEALARRAMRIWGLDEPQASRLAQLELEPGYASISLAAARKLLDLMERGMAYSTAVKQLYGGCGQGPAVELLSPVNTLPNLRNPVVSRVLTELRKVVNAVIRHWGKPGCIRVELSRDMRRTKQQRVLATKRNRANERSRAAAATRLLRELGIQNPRDNDIQKVLLADECNWLCPYTGRAISMSDLCGPNPQFDIEHIIPFSRSLDDSFVNKTLCHHEENRHRKANRTPHEAYAADAQRWEEILQRVGRLKGDAAAEKLRRFKMTDIESVEDFAARLLSDTRYASALAADYLASLYGGLWDVGGVRRIQAGRGGVTAYLRAALGLNGLVGGGPVKTRDDHRHHAVDALVVALTEPGLIAALSRAAQEPWGPDGRRRRFESLPAPWPTFAADAAAAVGKIVVSHRVSRKVAGALHEETNYARVVVADGHEFRTRKPLAALSPREVGRIADPAVRAIVADALKASGLFPKDAFADPAKHPCRPAGDGRQIPIHSVRIACPVAARPIGRDGFTRYVATDSNHHLEVVAVLNAQGNEKKWIGCVVDRLEAARRLRAGLPVVQTDHGAGKQFKFSLCPGETIRLTHPQGQEPTLGVVRSISRGKTGAIKVEFVPATDARKGELIKAAGLWFTRSPDSLREAGAQKVAVSPLGEVRDAAD

SEQ ID NO: 17513 - protein, 1102 aa, unidentified
  REGION 1..1102: note = Cas Enzyme sequence
MEQKESYILGLDLGANSIGWALLEAHPDPEEKGRLKAHGIKQIGVRIFEAGVEGEIEQGKDQSRAVDRRDARLARRRLDRISRRLSHLFYLLMSAGLLPEHPAYKTELGKKKSAKERKQERDLKAKARHEVINQLDQDLVKKWREKEPLAKETLPYILRAKALDEKLELYELGRALFHLAQRRGFLSNRKAKAKDDEELGKVNQGILELEGKIEGAGARTLGEYFSKLNPKEERIRSRWTSREMYLKEFEQIWNAQEKHYPKILTPEFKKKIWRCIFYQRPLKIQHHLIGECQYEKGKKRAPSACLAFQRFRMLQQLNNSYLISPDGEILNDGRLTNEQRERLIEVLEKKAELKFSKAKKILGLTKEYRFNFEKEDGKGEFLGNETAEKLIKVFGEERWSRFSEQEKNEIVQDLISIQHKSGLVKRGKNKWGLDDENAEEFSKINLEEGYCGLSRLALSKLIPLMETGLTYMEAVKQVYPDRLQNEAFDQLPMVINQMPELKNPVVKRVLTELRKIVNAIIRKYGKPEQIRIELAREMKKTRQQREEIWKKNKQNEEKRKQAAQAIIKEAGENPKPGDIEKYLLWDECNGICPYTGKSISLKQLFSGEVDVEHIIPYSICLDNSYFNKTLCFHDENAKVKNNKTPWQAYGSDEKKWNEILERVKRFKGDAAKEKLKKFQIKDLEELDDFISSQLNDTKYASKLAKKFLGLLYPGQEALSRVQATKGGITANLRDVFNLNSILKDGDSVERDGYEPKKTRADHRHHAIDAICIALTEPSTVKMLSEASSRALKERKRRFGKVQPPWENFWEDVKKAIDNTIVSHRVSKKVNGPLHQETFYSPPKEVQGKIICHVRKPLENLSAGDIEDIVDPVVKKKVQEKIKELGGGDPKKLFAGSSTLPPEKLPCMTAKDGRVIPIRKVRIKCVMTPFQVGDKGRERFVTSDTNHHLEIFETKDKKGNVRWDGAIVSQYEAMRRLRAGEPIVKREHGKGKEFKFSLALNECVKLLDEKGQEIVCVVKGISQLSAGPIVITLRHICDARPTSEYQKQIKMRKELKKNYDKKLAEEIEKMLPVFIFKGPDSLREAKGQKILITPLGEIRTAND

SEQ ID NO: 17514 - protein, 1029 aa, unidentified
  REGION 1..1029: note = Cas Enzyme sequence
MSNENLKKKVVLGLDVGSSSLGWVLMNEEEVLDIGSRIFEAGMDGNIEKGTDESYNVQRRDARLTRRRLQRRTRRLIKLALYLQRVDLLPESNIEDSKIRHEFFNTLDRSLSEKYNMPHALPYLLRAKALDEKLTQHELGRVLYHICQRRGFLSNRKSPIKDKEEHGKVKDGIKSLREKLSENDSKTLGEYFSKFDPDDRIRTQYTARDMYDDEFNLIWDKQAEFYPDILTDDFKDKIYHVIFDQRPIKFKKSTIGMCELEKTKRRAPALLLDAQRFRLIHMINGTKIYVDNVERELTDEERETLINKLETEGDLAFTKAKKLLGLKMKKDKFNWEGGPEKRFIGNRTSAALIEIFGEEKWNLLSKVMKDQVVEDIHSIQKNETLLKRGLNKWELSEEKAIELSEIALEPEYLKLSRAAIAKLLPRMEKGEHYSTLVKEFYGDTKDVEEHDILPPLFQVEKYISNPAVIRSLTELRKVVNTVIREHGKPDEIHIEFARELKQGKKSRQAVTKRISENEQSRSKAAKRIIDELKIQNPTRTDILKVQLAEECNWECPYTGRSFSIGDLFKPTPQFDIEHIIPFSRCLDNSYLNKTLCWSEENKNVKRNMTPFEAYSNTDKWDEIIQRVKRFKGDVARFKLARFMMDSKGVKEKFEDFSARQLNDTSYVAKLSQQYLRLLYGNEWRKHIVPTSGGVTSFLRNVWGLNSILQDGGPKKERTDHRHHAVDAVVIAMTNRRTLQMLAYANSRRIKPERLFNDKEIKPPWETFWDDVKEAIDGIVVSHRVSNKVSGQLHEETFYGLGPDEDGDGKPDYYTITRPLTALKKTEVDKIVDPYIRQLVKDKLGDDDPKNVFQEKENRPFIIKPDDTVVFVNKVKVKVRVTPFQLVEGEDSRYVTPKSNHHAEVIEYTDKKGRTKWDFVVVSMLEACLRKKDKLPVINRDYGEGKKFLFSLAPGDIIELDNDKGGRSLYRIRTVPMSKQLSYVSINNAMKQKDAKEAKRWYSKKPDKLREANCQKVTVNVIGRVRRAND

SEQ ID NO: 17515 - protein, 1067 aa, unidentified
  REGION 1..1067: note = Cas Enzyme sequence
MMAEIARERTEGAYRLGIDMGSGSIGWSAVLEKRDGKPSIILDMGVRRFEAGVLGDVESGKDESRATARRDARGPRRLTWRRQYRLRKVFRLLQQMDLLPASADDSHDERHRVLAELDRQIRAQFQGEDGRLAHRQLPYLLRAQALDRKLARHELGRALYHLAQRRGFLSNLKAAKRDEDVGVVKQGISELQQHIDRAGARTLGEYFAGLDPEQEQRIRGRWTARRMYEDEFQAIWTAQAEHHEDLGEEQKQQLYEAIFFQRALKSQRGVIGMCRLEPFKRRAPAACLAFQEFRIVQKVNDLDVFEPDGEVRPLRPDEREKLTTALSEKDMITFGDVRRLLGMKKSGEYGRNYTFNFEQGGEKELIGNRTAVKMANALGDAWSELTSEEQKHLVDEILSFESEEPLIGRLKSGWGLDELRARAVAHTRLEPGYGSLSRKAIARVLPGMREGHRYATVREDLYGITQKTDDPLDGLPANHETAVLRQLRNPAVARALSELRKVVNALIRRYGKPRRIYIELARDLKHGRKRRQQMADQNKRNQKANDNAKQKILQEMDNDERFCTVTNLLKVRLAEESNWECPYTGRQISMAALVGDHPQFDIEHIIPFSRSLDNSFANKTLCYHDENRKVKGKKTPYEAYHGTAKWDDILPRVRRFKADPRMAARKLALFLTEHPIDPDEFNDRQLNDTRHMAKLAGEYLGLLFGGQIDEEGTRRIRVSPGRVTHYLRQRWNLNSILGHPDKKERADHRHHAIDALVVAVTDAAQISALSRAAEEAEELFLDGLFPRGGDFEPPWDGFMADARECVEGIIVSSRVTRRLNGRLHKDTIFSKPIRSQDSGGKPVDVHHVRKPIKTLSTLEVEAIVDDRVRELVKEQLARIGGTPDKAFKDDANHPYFKTKDGRVIPIHKVRIRKSDHPMEVGHGSKRRYVNPGSNHHMEIVAVLDKNGNEKKWEGPIVSTFNAVRRRREGEPIIRRDHGEGKRFKFSLAGGEHVLMCYDGQQEQLYRVTTVTGKEVEFVLHSDARPITLRKKIREKGARPRGAPEKLRKCGARKVSIDPLGNVLPAND

SEQ ID NO: 17516 - protein, 1177 aa, unidentified
  REGION 1..1177: note = Cas Enzyme sequence
MTAAGVRTFEAGVEASYDQMMQGKQKSKAANRRSKRGPRRQFWRRAWRRYKVMKCLIDNHLMSDPGERDIRKPEDQDGFIKSIDDNLRKRLRPAKGDPRRHLWEQVWLYELRASALERKLDPLELARALYHLAQRRGFLSNRKTDAPDDDDKPKKPKRAKKDKSNRTPLTVDESEQPGAASSDGDKEDPKKVKAAITKLGQDMEQAIPDPRFRTLGFYFARHVNPEERRIRQRWTGRAMYEAEFKAICDAQSAYYPGLAEKGDFRQELDDAIFFQRPLKPCGHLVGHCDLEPTRKRAIQAIPIAQRFRLLQKVNDLTVLDPGGTEYRRLTDEQRKDLLNALSTQGDMTFKQIRTLLRFIEPKINKDTKAIERVGHQFRHEAGGEEKLPGDRTAAKILARDNDAPGVAQLWHDLSDGREELVLALVNFENNEALAENLIKRFSISPDQATALSGIRLEESRCSLSRRAMEKLLPLMERGIHFKTAEKEVYGSAVERRTAVQDLLPRLLATDQKHVPLSAARPAFRRRRDLPNPAVARALAELRKVVNAIISRYKKPARIHVELAREAKKTPLRREIAWKNSRLRQDERVAAQTAIKMCNEIGISEPKRDAVDKWLLWEECGGVCPYTGQCIPVASLFGPSPQFDIEHIVPLSLSRDNSFDNLTLCDAEYNRNVKRKQIPYVVEAGNPGRWNDILERVKRFKCQKRAVRNPNRKAKNRVIIEDRPNSKADRFAWTPEQVKEFYGDEFTPRQLNDTQYASKLAGEYLGMLYGGVIDETGKRRVQVSSGAVTATLRAEWNLNGVIPSLPDSPAHKAPSDIRHDEKVRTDHRHHAIDAIVIALSSPKAVKELSDAARRVEQAELCRQDIRDSQGKRRTRYAEMNPPFGLTRDSFVQVVKSTIADINVSHRPERKLRGPMHEGTDYSEPFDDGAGGKEYRTRRALKDLKETEVGEIVDDRVRELVKKSLAGKEPKSVFASDSALPVLGHTPDGRAVFVKSVRIRVKAKPVVVRDRSGRERYVKPGSNHHMTVHARLGADGKDKEWVQGKLVSRLDAMRCKRDFDAGERRKGNKKRSGSQVAIDRSASAGIRFVFTLQPGDMLQMTRPNDRQRLFVIRSISRKRIEYVSANDARKKDAKKVEEKKNTIKGAKEWFVMTTIDYLRQYKACKVIVSPIGEIVPAND

SEQ ID NO: 17517 - protein, 1163 aa, unidentified
  REGION 1..1163: note = Cas Enzyme sequence
MNHETSNDQREAVSLGAESILGIDLGTNSVGWALLASPAGPLIAANARIFPSPITGNVEAGEAKSSSQGRTQARGQRKNTWRRAWRLFKFFRLLQDNGMAPPSKLPSGTLAVVFDKSKPNRARRTAFREIARERHEFLKELDRKLADALPGPSRDCPAPAHVVPFLLRAKGRKERLSLEELGRALFHLAQRRGFKGRIEDAEEDSEGEESGNAKQKKKPGPVKQQVTLTTALMKRKGLETYGEFFSSLNPEVFDPERKKNRIRAPLYALRKECEQEFLDIWREQARHHPHLTEDLRKTLRTLIIKDRDLKSQKHLIGLCELFPKKRRARMVLLIAQRYRILEQVNNLRLAKPVKRALTPQERQRLIKVLEQSAHVTPAQARKELGLPRGYTFSIEDDEGENEAVTELVGNRTAAGLREILGARWDELAPNDKDQLVEDIVSMGEDSDKLTARATREHRIVKNRHGNDKVYGWGLTPDQADKLCAYAKDLPKARSAFCRTALRELAKRMEDGTPSATVKKAIRDELGLSKPKPPLQFLPPVTQVFRDLRNPAVVRSLTELRHVVNEIIRKHGKPAFIRVELARAFKKTMAAKKRLRLENKEREALNKKAADVILKERGVKNPSRFEKQKVLLWLECDRRCPYTDDPISPTQLLVSGEVQVEHIIPHPICHDSNMRNLTLCFAQANQMKGKQTPFDAYGQSPRWPTILQRVEAFKGPFMEEKLKRFQMSTKEAEAEYSDFTNRHLSDTSYAAKLAKEYLGLLYGGEVDASGTRRVSAIRGALTYQLRKLWGLGTLFGRAARDGSGRVDGREQEKKYRGDHRHHALDAIVVALTDDATIKAMSDAAARGLAEHGAAGYARLQWRWPTFRDDIREHLSELNVSHRMDNSFCSAAPHAETFYSPPVPADHERYPGCKTKTVVFLRKTLGKTGPTGLKKDDVSRIVNPVVRARVEDKLKALGNDDPAKAFKDPATHPLHPSGKPIHRVRVWEPDFTKTIGGGEHARRVLSGDNHCLAVLREQDGAWAGQIVTRLEALRWKQAAEEAKRRTVAPPPLLANESRPLEFMLFKNDTIELDDVGGRGLFVVRFISQEKDTLKAPKVEYTPVNEARDSGDIKDAQKATGRRGAKILKTTGPEGLQKLRCEKVHIDPLGNIIFREGDGKRVRVQP

SEQ ID NO: 17518 - protein, 1079 aa, unidentified
  REGION 1..1079: note = Cas Enzyme sequence
VGWAALTCECAGEDERAHPLGLLGTGARVFEAGVQGTEMDIASGRDEPKGQQRRQARLARRGLERRGRRLMVLYLRLVDGGLLPSTETDPRGLSNREPRAAPRREARLAAARERDAALKALDAELWEQWRERLAPGAVPAEERHRLAQVLPYALRAHALDGKLDPLALGRALYHLGQRRGFLSNRKAPKKADEKPGAVEAGIGAIRQGMADTGSRTLGEYLFRCDPFSLRIRERYTARELYKAEFEAIWEAQAEHHPALLTDEARRRIERAIFDQRPLRNQKHLVGYCELEPRSRRAPIACAEFQRFRLLGQLNKTRLVSPDASVRRPFTPEERAALFAVLEAKGDQTFTAAKHVLKPFGVNRRWSFNFESGGEKRFVGNRTAARLRAVFGARWDELTARLQEDVVADLLSIQRPETLRRRGERVWGLQGEPLRDFAAIELEEGHAALSRRALRKLLPLLEQWDDAKGQWMDVTTAKERAGYRAPAREPLPLLPSLEAAVAARLLPAVRNPAVTRTLTELRKVVNALIQRHGRPAVIRVELGRDLRNPRDRRVRMAQEMRKREREREAAARTILKESGDAHPSRDDKEKVLLWEECNRECPYTGRPITLHALLGPTPHFDVEHIVPFSASLDDSFLNKTLCEASENRARKRNRTPWEAYHNDPQRWEDMLTRVKAFKGDGARAKLERFQLRDVSALLSEFTSRQLNDTRYASRLAREYLGLLYGGTTDADGTLRVQVAQGRITAYLRGALRLASILRDGGAEQKRDDHRHHAVDAVAVALTNPAVVKAMSDLAGARALEGRKGIGQLNAPWEGFLEEVRVGIEAAKVSHRPSLRVRGRLHEDTFYSPPRRGADGKEYVHVRKRVDAISKNDLEGIVDPHVREAVRAKLREIGSDDPKKLDVAANPPVLRTKAGGTVPIRKARVRRPAGVFAIGSGPHRRHVVSDANHHAEIVEVTDAKGRVKWEGHVVSLFEAYRRRRAKEPVVRRENGDGKRFLFSLAPTDTIELDKEDGQRAHYHVRSIWLESGALRMRYAPLNDARKAEEMKKAKASQVKMIEPLRKLGMRKVTITPLGEVRNAND

SEQ ID NO: 17519 - protein, 1043 aa, unidentified
  REGION 1..1043: note = Cas Enzyme sequence
MAAENLRERTDGAYRLGIDMGTGSIGWAAVLETDDQPTEIIAMGVRRFEAGVLGDIESGRDESRATARRDARGPRRLTWRRQYRLRKVFRLLQKMDLLPSGDDSHDERHRVLAEFDKQFRESPDCPDPQAANQMLPYLLRTRALDEKLSRHELGRALYHLAQRRGFQSNLKAAKKDEDIGAVRQGITELEQYMQEAGSRTLGEYFAGLDPEQQRIRGRWTARRMFEDEFEAIWAAQAEHHDDLTAEHKEKLHEAIFFQRPLKSQKGLIGMCDLEPYKRRAPAACLAFQEFRIVQKVNDLEVIQPDGEIRPLQPDEREKLIAALNEKEKITFGGIRTLLGMKRSREYARNYTFNFEQGGEKDLVGNRTAAKMAKALGDRWQQFTAEEQIRLVDEILSFESEEPLIGRLTNGWGFDETQARAVAETPFESAYGSLSRKAIAGVLPGMREGKRFASVRKDVYNVEERTGDPADSLPANHDTGVLRQLRNPAVERALSELRKVVNALIRRYGKPSRIYIELARDLKHGRKLRKDMADLNKRNQKAKDDAKGKILQEMNNDERFCTERNYLKVRLAEESNWECPYTGRSIPPSALVGDSPQFDIEHIIPFSRSLDNSFANKTLCYHEENRKVKGNKTPYETYHGTEQWDEILARVRRFKADPRLAARKLALFQTEKLPDQEKFDDRQLNDTRYMTKMAGEYLGLLYGGQIDEGGTRRIRVSPGRVTHYLRQRWNLNSILGHPDKKERADHRHHAIDALVVAVTEAAQVSDLSRAAAEAEDMDLDGLFPRGGDFEPPWDAFLDEARRHVEKITISSRVARRLNGRLHKDTIFSKPIGALSKQEVEDIVDDRVRELVKQRLAKLGGTPDKAFKDKADHPYFTAKDGRIIPIHKVRVRKSDKPMKVGRGTKQRYVNPGSNHHMEIVAVLDKDGKEKKWEGHIVNTFDAFQRYRRGEPIIQRDHGEGKRFKFSLAGGEHVEMEHEPGKRQLYRVLGISAKMIEFRLHSDARPSTVVRKISRARTIRSAGALLDAHAWKVTVDPLGNVFPAND

SEQ ID NO: 17520 - protein, 1073 aa, unidentified
  REGION 1..1073: note = Cas Enzyme sequence
MSSSKNGNPSLSRKREQFTMKDVGTSKPYVLGLDIGVQSIGWALIGLDDGDRPFALRRTGVRCFDSGVGSETQIQLGNDESTNAKRRQARQQRRQLFRRAQRQRRVFRILQRAGLLPGSSAAAVDRHELLQRLDAELATQFGVPGDRVADHVLPYRLRARALGEALPPFALGRAIYHLAQRRGFLSNKKAQGDDKEEGEVKQAISKLHAEIERTGARTVGEYFSRLDPEDTRIRKRWTHRQMFLDEFEKIWAAQAPHHPRMDDGLKQKLQRAMFFQRPLRSQKGMVGRCELEPDCRRAPLASLQAQRFRYLQKINDLEITTPDGEIRTVTAEQRAVLSAAFEEKGELTFAGIRRVLGLKKTKGDEHDYEFNLERGGEKKLFGNRTGEKLARALGDRWRNLSASEQETLVHEMLCFQHEDALARRLEKAWKFDPATAAAVAAVRLEPGYSAYSRRALEQLLPKLADGVRLNTIRKDLYGDRLAESKVWDLLPPVREAFGSLRNPVVCRALTELRKLVNAIVRHYGKPKMVRIELARDMKRSRRQREDATKEMRKNEKQRDAAKAKILAELGISDPSRSDVLKFLLAEECNWECPYTGKPITPRQLVGQSPQFDIEHILPFSRSLDDSFANKTLCYHEENRNVKQHRTPWEAYHGDVQRWHEILMRCRRFRGSMAGEKQRRFQMEELPEDFAERHLNDTRYASRLAAEYVGLLFGGQVDREGKRCVQVSAGRVTAFLRDEWALNAILSGGREKTRDDHRHHAVDALVIALTEPRSIKLLTRAALRAQELGRRLLVPLDPPWGEHESFLADVRSSIETVNVSYRVDRRVSGALHQETLYSPPHHAIDGKGKPAEYHHIRKPLVNMSADEVEEIVDQSVRAAVKAKLEQIGGEPKNIFAEPANHPYFRTKDGRLIPIHKARIRKKVSVIPVGDDRRRRYVAPGSNHHIEIVANLDAQGHEESWGGLLVSLYEATRRVDAGEPVVQRDHGPGKKFLFSLTGGEYVLMRQESGENHQLCRVVVITDGQVEFRLHTDARPSTVTKKSPGARIRVSPGAMKRRGARKVAVDPLGNILPAND

SEQ ID NO: 17521 - protein, 1004 aa, unidentified
  REGION 1..1004: note = Cas Enzyme sequence
LQEAGLLPAFKDGAWDACGGQDPARDQLLKTLDEELGRTLAASDSAFAPECFERLPYLLRGRALDFPLRPHELGRVLYHLAQRRGFKSNRKADSADDESGVIKSAIGELGRAMEEVDPATGKPQARTLGEYLLGLDPRVERLRSRWTARRMYEEEFDAIWSAQAPHHPESLTDDFRKRLRRALFHQRPLKSQRHLIGLCEFENGKDRHDIETGEIMRTKKSRRAAACLPLAQRFILLQKVNDLTILTDVPGNPGTALDEGQRKRLAAELETTARMSFAQVKKVLGLPREARFNLQAGGEKGLPGNRTNTELRDLFGDRWGNLTPTHQEQIILELWSEMPDKSLIRRATERRGIWKELAPTKEEASKVPGIAISHDYSNLSRRALFRIVPLMEEGIPYVTAARKVYGLAVSRSTCDSVPSVQDAFGDLRNPVVMRALTETRKVVNALIREHGKPDMIRTELARDLKANAEQRMQMSKSMRENENRRVRAAEKIVQEAGISDPRPGDILKARLWEECAGVCPYTGKSIGFRQLFGEEIDVEHILPFSRSMDDSYINKTLCFASYNRTVKGNKTPFEAAGGDEAKWTEMVNRMERSVDQHGMPAHKLVRFQLAGSELEDHLDGFVNRQLSDTRYASKKSREYLMSLYGGQLERGVDGEGRERVAAGNGQATALLRRGWGVSRFLGGGEKTRDDHRHHAVDALVTALTTPSRLQVLTREWQEAQKLGYRWPRLQHPWEGFEGHVRSALDAIWVSQRTSSRVRGPLHAETMYSAPRDEGGRIAKSDTAGKTYSHVRVALEKMRAADIDRIVDPIVQAAVRAKLVELGKTDPGKAFDPENPDTYPLLGKSRPTRVRKARLRKANSTRQIAAGHRRRHVENSENHHIELVEYVDAKGREKWDGVVVSLPEAVRRKAAGEPIVQRDHGPGRAFQFSLVNGDVFEAESSEGVLDRFRVKVITPGQVKFQRMFDARVYAGISKAGLVSSPNALRGRFHRKLTVSPAGTRTTNRA

SEQ ID NO: 17522 - protein, 1062 aa, unidentified
  REGION 1..1062: note = Cas Enzyme sequence
MVTDSGYLLGLDLGVSSLGWAVIDLDPDTKEPCQIRAAGVRIFEAGVEGDVEQGKDSSRAVERREARQPRRQHWRRQYRIQTLFCLLQRHALLPPTPESAPDHRKAVIDQLDAALTARLISPGDHQAHQKLPYLLRAKAARQKVEPYELGRALYHLAQRRGFLSNRKTQDDDEREGVVAGGISEMGQAKGNKTLGQFFAEDVEVFAHRAKPGTDQRDPRTGRIRRRYTARKMYLEEFQAIRAAQSPHYPSLDAQAWKDIERAIFFQRPLKSQRHLIGRCSLEPRRRRCPEALPTFQEFRILQQVNNLVLQLADGSQRPLNADERQTLIAALSNQAEMKCTAARKLIHAPKNSTFNIERWEPRLVGHKTNARMVSVFGDRWHSFSQEEQERIVLEVLHYRKPEALEKRAMMRWGLDRDSAQLLANTRLEEGYANHSKTALCKLLDRMRDETPYATARCKLYPEGPRADPPVDCLEPVYKWNRELRNPAVQRALTEVRKVVNALVRKYGKPTRIHIELARELKASRDERERQWKTADENRQRREKAAKEILKETGIQNPTRRDVEKWLLAEECRWCCPYSGKAIDARALLGSQPEFDIEHIYPRKYLDDSFRNKTLCHVSVNRDRKRDMLPSQAFSGREYDEILKRVANFTGPHAAEKLRRFRATEVPEEFVARDLNDTRYNARLAADYVAKLYGGRVDADGIMRVYVPSGGLTWMLRNGWLLNGILSSEDEKQRDDHRHHAVDALIIALTDAARVKALQEAAADAAKKLCRAFVRAMQPPWNNFPQEARAAVLAISVSHRPTRTISGALHAESIYSKPHRNPDGTLEYRIRKELHKLTEREITSDQIVDPAVRAAVQQKYAELKAADPKATPKQFWSNRDDVAKFPLLKSKDGGGGGSPIFKVRLRVDTQPRLIGKGVRQRYVASGKDSNYAAMIYALVDDNGNETKWVHEIITRLDAHQRLAASRGKPGDRVLLPDEQNGRRRFKFALVKNDMLLLEGPDGQDELFRVQNLSQGEIQLCPHHRTSIQGAERNSTNRITSIDRLRHRKARKVTVSPIGEIRPC

SEQ ID NO: 17523 - protein, 1051 aa, unidentified
  REGION 1..1051: note = Cas Enzyme sequence
MKHYDYVLGLDLGVASLGWALIEIDDNAQPISLLDAGVRCWDLNNNTAEDVTRGKEVSPNKERRDARLQRRQIYRRAKRYKKTFRILQELGLFDQGPRDSLARKAYIDKIDQQAKLWLVAHVPEAANDPWLHHNYVYRLRAAALDHPLPPELLGRVFYSLAQRRGFLSNRKGTISSDEKGVVKQAITQLEKDIQQVGARTLGEFLTKLNPHEQRIRGHYTSRSMYIAEFELIYNAQRRHYPKLLTSRARKLLYEAIFYQRPLKSQRSRVGRCELEIYLKQDADGKVTVLHPFRRAPKASLEAQRLRYMQRINDLEIISPDGEIRPLTAEERQKLYDLAEHRPELKFNDIRKALGLPAGKQSEWRFNLEAGGENKLPGNTTAARIRNILGDAWDSLGEKQKKLVDDLLAFTQDDALYKHLQKVWGFDAQTADLLVNMPLEEGFAAFSRRAIRRLLPLLEQGMRLNAAIKVAYGGHNRSTEVHDLLPPVREVFREINNPFVIRTMTQLRKIVNGVIRKHGKPARIHIELARELKEPRKKRKLEYTRQRQRQQEREEAAIQIRKALGREPKSWEIEKYLLAEECNWECPYTGRTVPGASIQERIRALFSEPSDFDVEHILPFSRSLDNSFSNKTLCYHSENRSVKQNLTPYEAYSHDPVRWKEILSRVSKFKGPYAEDKLKKFQLEEIPEDFAQRHLSDTRYASRLAADYLGLLYGGRVDAEGQQRVFTVSGKLTALVRNAWKLNSVLGSDQKNRNDLRNHAIDAIVIALASPSLLYHYRKLACVLARTSCNFVTLDPPWESFHQDVNRRIETMIATFSPNRRMSGALHEETFYSLSGENTVTVRKALKNMSIHEVEKIVDPAIRAKVKNKLKALGKNDPKIFTDEKNLPAIRVRKKGSKIKRFPIKSARIFVHQRVVPIGAGHRLRYVIPGNNHHAEVYAILDANGNELKYRVKAVSLLEAWERKRKGKPIICTNHGPGTRFKCVLRKGDYIKFVKDNRLLRVVSVSDNYIAGKDVNDGRKITDIKKNKELIVVCRKRMLWSAANERTGTPKA

SEQ ID NO: 17524 - protein, 1035 aa, unidentified
  REGION 1..1035: note = Cas Enzyme sequence
MSYTLGIDLGTSSIGWALLEYKGKKPVRIVDLGSRIFPAGMEGEVEQGREESRNKERREARQRRRQLRRRNERKVKAAEILAGAGLLPQAKWKNSRERDAVLKEVDKITQEKYDANGDAEFIVGTEALPYYLRARALHFPLDPHEVGRVFYHLAQRRGFQSNRKTAKKDEEEGIVKAEISGLETAMASTGSATLGEYLANTDPHGERRIRSRYTHRSMYDREFNQIWEAQQRHHPDLLTDSLRKKLHHAIFFQRPLKKQKHLVGFCELEHGRRKAPWSLLDAQRFRYLQRVNDLLVIHADGTSRQLTPDEREALIEVFETSEDVKFTDMRKRLKLKGTEFNLEQGGEKKIPGNRTAARLRKVFGNRWDELSQEEQQQVVEDVRSIVKEETLARRAKDHWGLDDEAAEQLAGTHLEDGYCAHSRQALTKLLPLMEDGVSYATAKDQAYPNHDALRNVCEFLPPVFETEVTLKNPTVLRSLTELRKVVNAIIRKHGKPDMIRIELARDLKQPRDRRKKQWSKNRARQKEREKAAQAITKQTGNPKPSRADIEKYMLAEECNWICPYTGKQISMASLFGDSPRFDIEHIAPFSRSLDNSFLNKTLCDNEENRTRKGNKLPREAYSDEEMHQIIERVKRFKSDVATVKLQRFQMDEIDTLEEFTARALGDTRYASTQAAKYLGWLYGPHWRKHIQSSTGQVTGFLRNAWRLNGILNDGGMKTREDHRHHAVDAVAIALASPYMIKTLSSAAEQCLLEKGRDRGWWKFMQEPWNGFFEEVRDAVEDIVVSHRVNHKLSGPMHEETNYGLLSKDGKGKSLVRIRRPLKALSKTELNQIGDREVARLVKEKMDELGESDPGKAFADPKNHPFITSKGGKRTPIHCVRVHKKASVVRVGKEDHRARYVAAGNNHHAEFYETTDKKGNIVWKENVVSLYEAMQRYMRGEPVIKRDFGPGTKFLFSLAKDDMVELDDEQGGRMLCVVRVISEHDYNFAPIIDARRKDDMKKTGDWVRIQSMKRMQSLNLVKKTIGPLGEVYPAND

SEQ ID NO: 17525 - protein, 1525 aa, unidentified
  REGION 1..1525: note = Cas Enzyme sequence
MTKILGLDLGTNSIGWALIDQNFTEKQGTIIGMGSRIIPMDQGTLGEFERGNSVSQTKVRTGFRSVRRLRERHLLRRARLHTVLNILGFLPEHFANAIDFEIHYGQFRDESEPKLVYKPTGKNDKPEFIFKDSFNEMMKDFSRKHPALVEGNLKVPYDWTIYYLRKKALTDRIEKQELAWLLLNFNQKRGYYQLRGEEEENKENELVEFYALQVVDVVDSGDRKGKDEIWYNVILENGWVYRRTSKTLLDWIGKIKEFIVTTDLNDDRTVKKDKDGKEKRSFRAPKPDDWTLIKKKTEFEIGNSNKTVGCYIYDTLLEDPSQKIKGKLVRTIERKFYKEELRLILEKQKEFHSELHDRQLYNICIQKLYKSNESHKNSLNGKDFTHLFIDDIIFFQRPLRSKKSLINDCRYEKRVYKSKDGTIVMEPVKCIAKSHPRYQEFRLWQFLQNLKIYRKDAEVDGKILPELDVTSEFLRSEEDWVALFDWLNAKKDIQQEIFLKYPPFNLKKNIVNYRWNYVEDKTYPANETRAQILSKIEKIKNVSDGFLTREIEESLWHILYSVEDNLEIIKALKTFADRYGLDEEFVEHFKKFPRFKKDYGAYSAKAIKKLLPLMRRGKYWNEDEISQVVKNRINAISERLISVEHDRTKITEITDDDIPKQVLKSFIECQNPMQALNTYQACYAVYGRHSEEGEITRWKNPEEVDHFLKTVFRQLSLRNPIVEQVIVETLHVVKDIWNEYGNGKENFFDEIHIEMGREMKNPADRRKKMTEQISANENTNVRIKALLAEMSQDSAMENVRPYSHAQQDILKIYEDGVLNSGLELPEDILKISRNAQPSKTELIRYKLWLEQKYRSPYTGEVIPLGKLFTTAYEIEHIIPQSRYFDDSLNNKVICEAEVNKDKDNCTGYEYIKANSGKIIQLSMGKTTRLFTVDAYQDYVKNHFLGNRGKMKRLLMDDIPEGFIARQLNDTRYISKFVKNLLSNIVREEGEQETTSRNVCASNGSITSKLKQDWGLNDVWDKLISPRFIRLNQLTNTNQFGEWVNKNGKNIFQNRVPLELQKGFSKKRIDHRHHAIDALVIACATRNHINYLNNEYAKSDFRYDLRSKLCFKNKTDGNDHYKWSFCKPWDCFINDVKDKLETIVVSFKQNTRVINKTVNWYQKWQVNEDGKLQKVFIRQDKGDHWAIRKPMHKDTVAGAVSLRFKKHIVLSAAIDKWEMIVDKLLKEHIKALLNEGNDKKAILKYFKSVNNSFKERDVSRVEVYYFDNDNVATRVSVDESFTSSVIEKITDSGIRKILLKHLAKYNEYRDDKSVEHPELAFSPDGLDELNKNIKTLNDGKEHKPIGKVRKFESKGNKFRVGYRGNKKSKFVEADKGTNLFFAIYIDKNKKRSYESIPLSVVIERQKQGLSAVPEENDKGFQLLFYLSPNDLVYVPSIEEKEDLNLCYKDALSKLQTARIFKMLSSSGTQSFFIRNDISTVIWNKVEFSPLNKMERSMDGVMIKGCCWKIKTDRLGNIVDIIGRHNT

SEQ ID NO: 17526 - protein, 1060 aa, unidentified
  REGION 1..1060: note = Cas Enzyme sequence
MDQKQPVILGIDLGAKSIGWAVMAADVDEAGHLEPVGLLNAGARCFEAGVDGNLEQGKDEARAVARRMQRGMRRQLYRRAQRLRRSLRALAECGFLPGAVASPPEARHDYLSKLDERLKALMLADGEPAGPVQDSPIYQIRRRCLEGKRTLEEIGRAFFHLAQRRGFKSNRKDTSKDDEKGKVKSGIANLAKEINTIPEPRTLGKYLSTLDPHQTRIRNRWAARSMYEDEFNAIWTAQAHHHPQVMTGEAKTKIHHAIFHQRPLKSSADLIGFCELETRRRRAPMGCLIFQRFRIVQKINDLTWRDENGAICGPLSIDDPRRAALIDCLDRDGDLTMAAAKKMLGLHKKATFLLEEGAAKILPGNRTVVRLKPALGQHWENWTAGQREAFVNELISDIEQSEWEDRLVKHWKLSKEEAGRVADLGLQSGYASLSRRAMRRLLAEMEAGVPYATAVKKLYGDRAKGRPALEKLPGVLEPGTRKYLGKINNPAVVRALTELRKIVNAIVLKYGKPVRIRIELARDIRNTRKQRQNITQTIKDRTGEREDFKKSMATKLPGLFGGRDASRSDVEKWALAEECNWVCPYTGKCITPETLFGAHAEFDVEHIIPRSRRPDDSFANKTICHVDENRAKKGNKTPFEAYHGGTGWNDILARVKRFQGSGARGKLRLFEVETIDEGFTNRDLNDTRYASRLAKDYLGLLYGGGDGIDPSGTRCVQACCGQITATLRNEMGLNKILSDDGEKNRQDHRHHAVDAVAIALAGPRAVQILATAAARAAEEGRRRYAYLPEPWAGFRSNVQEVVERIVVSHRVNQTLSGAMHEGTNFSAAKSRANSKTGKVEEVRHVRKKLIGISPGQVENIVDPRVRKAVMDFLDGRDPKAVFKEGSKFPTLLNRNNIDRPVPIRRVRVWEKNRVISIGKGGATRHVAPGENNHLEIVASTDKRGKENWDISNIVSRYEAYLRLSAGEPIVKRNWNEGHELVLTLRRGDCLELDIVGIRQVMRVTSIGVDWIQTQPLSYGAPKMEKEERNSWLFRSGKGLQAANPRKVSISPIGEVRPCNE

SEQ ID NO: 17527 - protein, 1071 aa, unidentified
  REGION 1..1071: note = Cas Enzyme sequence
MGSERYILGLDLGANSVGWAMLKINEEYKPIGIIKTGVRIFDAGVTGYGTSMEESRNAQRRNARQSRRQTERTSNRLNDLFAILQKSGLLPIDDVPLDSRLSRKEISQYKDRLLKKLDAKLIARWKEKLANNGEDEYTIHIKTHHNLPYLLRSTGLDEKLELYEIGRALYHLAQRRGFSKTNKKRKRKKEKEDEGKVMVETHFLQVEMEKTNARTLGEYFVQFNPFSDSLNKIRDRYTLRDMYKKEFNFIWDKQAEFYPEQLTPALKESIYQIIFFQRPLKSQKHLIGDCQFEKGHKRAPWASLQAQQFRMLQNVNNIRIIMPDGSVREMSSKERITLIARLENEGDLTITDAKKLLNLPHRAKINLENSGETRLIGNRTAAGFYKILGDIWTSWSDEQKQRIVAEVMNCQENERGLSEKIIAEFDLDEKTALSLSKINLQPGYCSLSKKAIKKILPLLKNGTPYASAVKEIYGDRPKYLPCDMLPPVIDYTDDIRNPVVIRALTELRKVVNAIIKEYGKPDAIRIELARDMKKSRKQREEIWKISRRRETERKRAADAFVQKTGQTPTPQDILKVMLAEEANWRCPYTGTPISFSTLGNFDIEHIIPFSRCLDDSYMNKTLCLAEENRKVKSGKTPFEAYSSNAERWSEIIERVKAFKCDKGMKQAKLHRFLMESPADWDGFVSSQLNDTRYVSKVAMDYLGLLYGGVIDENGTRRVQASRGGITAHLRNVLKLNNILGDGGKKERTDHRHHAIDAVVIALTDHQIFKTLSEASKRAITERRRLFGSVAEPWDGFLEDVRQSINALIVSHRMSHRIRGALHEETIYSKPIRSSDGKEYVHVRKKVSSLTPSDIKNIVDDKIKEIVINRLQELGCNPEKIQERDIQKAFGSEENLPFILAMDKKTGKQRKIPIKKVRVRKSETVIPIGTGPTERYVTSGLNSHIEIFEEIQKNGKTKWTGRTVSLFEAMQRLKKHKPIINREQTDNRKFVCSLALGDIIELEEDHNKKELFVIKTITVMRDNGKEYARIKYVPINEAKPKKLESSLLEPLKKLNCRKVIITPLGEVRQAND

SEQ ID NO: 17528 - protein, 942 aa, unidentified
  REGION 1..942: note = Cas Enzyme sequence
MRKAHVRSLLFKNNLAPDRKTDTEGWRQFESYNPYELRARGLDQPLLPHEFGRVLFHLAQRRGFLSNRKAPIKKDEKPGALKKATDSLSADMQTAQCRTLGEFFFKLDPHQRRIRGNYTLRRWYIEEFGLLWEKQASFDPEKFNPALRKKLCDAIFDQRPLRVKEGTVGKCDLEHGKRRCRVAHLEAQRFRLLQQINNLKIEEEIGKERFLTKEERSKLINELVAMEKLKFTTARKVLKIKNKFNLERGGAETLIGDVTSARIRAHIGITWDELDCFEREQFVNDMQSIESPEVLKRRLMQRWQVDESAAELLSEVPLEDGHLAHSLAAIRKMLPFMEDGAPYTTALMQAYPDKAQWKAADEVPKFPNLRNPLVQRALAETRRVVNALVKQHGKPDLIRVELARDLKKAAKERESEWTRMRAREKERSNARENIQRLKEYNIANPRASDIEKWLLFQECGGICPYTGKAISHAALFGDHPQFDVEHIIPFSRSLDDSFANKTLCHVDYNRNFKKNKTPFESSGGTEAWKEIIKRVDMFTGGYKDTKLKRFVMENVADEDGFLDEFSQRDLAVTRYATKAAYNALSRLYDPAVAKSRVQATQGKATSYLRRAWRLNDILGLANEKTREDHRQHAIDATVVALTTSSTIKSLADSAVIGRAGAFDPIPHPWEGFKEDLQSIIESITTSHRVDKRTNGPLHKETYYGIITDPSDLKTNRAVVRKEVASLSEKDVAGENIVDPAIREAVRTRLKEIGMSDPTKAFKERDQHPYMVANNGRKIPIHKVRIYQSCDPVSIEATPGNRNVVLGNNHHVEFFHATDKNGNPTLRSIVVSQLDTLRRVAQARREGKPAQIVRQRDEYDNKLAFSLAIGEMVEIDWKGRKVRCVVQKLSEMYYVFRPTNDARKVKSIPSEEVIRLRSDSALYNSNLQKLICDPIGQTYRTRD

SEQ ID NO: 17529 - protein, 1053 aa, unidentified
  REGION 1..1053: note = Cas Enzyme sequence
MLNQPDRFTLGLDLGAASIGWAIVKQGHNGSPEAVVDTGAHCFDAGVEGSMEDAKDEPRAKARREKRLPRRQHWRRAARKRKLVHLLQRADLLPPGVTNTPELLHTLIADLDLKLREKYVRPGDSREAHLLPYLLRKRALDEKLDAYALGRAIHNLGERRGFRSNRKTQNADEDPGAVEKEISDLEVEMSAASARTLGEYFASIDPTKVRLRRRWTARQMFIDEFNAIWEAQSPHHQALTPELRDALYDTLFFQRPVKSQKHLIGRCSLMPERRRAPIALRVAQRFRILQAVNNLSMTFPDGETRVLDEHERRKVLKELDRHDKRTFSQLRQKRVLALPKGVTFNLEEGGETRVVGNLTDAKLAPIFGERWSELSESERDQIVEDLLTIEDPDAMARRAVRHWGLGQDAARELAHSRLEDGYARHCRVALGALLMRMEEGASYATARKELFPESMETKEALDVLPPVVEFDEALRSPAVIRALTELRRVVNAVIRRYGKPEFIRIEVARDLKQPRKERERRSKKGRANQKLREAAADRIVKELKGVPPTRSAKEKVLLADECDWTCPFTGRHICMNTLLGPTPQFDIEHILPLSRSLDNTFVNKTLCYHEENRAVKGNRTPFEAYASRRDRWAEIMERVSRFKGDLAREKLRRFKMEEIPEGFQDRLLQDTRYTSRLAGNYVALLYGGRVDQHGKLRVQVSPGAVTFHLRHAWQADAILGGPQKNRNDHRHHAIDAVMVALTTPAMVKRLADAARQTTRRKYPFSSLEDPWPGFSDELKRVVDRIVVSFRPDRRIAGPLHADTIYSKEIHRRNGDHGPHLRKQLHKLTPRDINNEAIVDPVIRAIVTDKLAELGGTPDKAFATRDTHPVMTTGDGREIPIHRVRVRVQEKPWTLGRGGKARRVVPGSGTNHHVVIVAELGGGEDPAAGGRSERRWVDKVVSRFGAYRRLAACKRAGRQPQVVRRDWGRNRVFKFSLVPGDFVEMEAQSGRRRVYRLSSVSKGDLEFRLHCDARRMKDIKAAKERIRCKPERLRRRKARKVRVTHLGEVVPAND

SEQ ID NO: 17530 - protein, 1043 aa, unidentified
  REGION 1..1043: note = Cas Enzyme sequence
MSQEKGNILGLDIGTNSVGWALVKADSDARPVELLATGVRVFPAGVKDDIESGRDSSRAVDRRNARQRRRMLDRRARRLGKLARLLQSAGLLPEGDLSTSESRHAFFQKLDAAIFPENARRETPHTLLYGLRARALDEAITCHELGRAIYHLAQRRGFLSNRVTKEVEEETGENEGKVKEGIAKLSAEMQATGARTLGEYFARLDPEKERIRKRWTSRQMHLDEFEAIWQAQREHHGDLLADSLKKTIHRAIFFQRPLKWDRSTIGTCELELGKKRAPWALLDAQRYRFLQKVNDLRLLGADPKTGEMWPSEKLDEDRRAKLVNALESEGDLTFAAIKKLLALPKWITFNQEGGESKLIGNRTASKLRAVFGPRWSEMSAEEKDRAVEDLRSIRSEKALRGRAERFWHLDAEAALAFSRIVLESDYCSLSRQALKKLLPLMEKGVPCATARKELYGDRPAPEPFTFLPSLDKAPLSPIRNPAVLRALSETRKVVNGIIRQYGKPAFIRVELARDLKRRRKERQVIWKENQANRKKREEAGRRLLEEHGITHPSRQDIEKWLLADECGWRCPYTGLTISGDQLFGPTPQFDVEHIIPFSRLLDDSFLNKTLCQMDENRHVKQNRTPWEAYGLNREKWDGILQRVKQFNGPARTEKLRRFQLDSLDSLDDFTNNQLSDTRYASKLAIEYLALLYGTGAQGVDADHTRRVQVGRGGVTKYLRDEWGLNRILGDGGGKSRDDHRHHAVDAVCIALTDARAVQMLSKAASSALQEGRRRFGKTAPPWPGFYDQARGLIEKTVVSHRPARKVSGPLHEESFYSPPKENGPGQPAVHLRKPLNKLSKNEVAAIVDPKVREIVSAALNGGDPKKVFADPSTHPRMESGVPIHAVRIRKAERTEAIGSAGRQRHVMTRSNHHLEVVEARDKKGRVRWEGKLVTMLEASERLRRHEPIVQRGHGEGERFLFSLSPGDTIELDQGTARGLFVVRTIYLQGAAGTIEYVDARDARQKEETRKAKTRHKSAVESLRKLHCRKVTVSPLGEVRYAND

SEQ ID NO: 17531 - protein, 1058 aa, unidentified
  REGION 1..1058: note = Cas Enzyme sequence
MGQEKMEQFILGIDLGANSIGWALIKCLVSENEERIKSFGIERAGVRIFEAGVEGELEQGREESRAKTRREKRSIRRQIDRRARRITRLFNILVNAGLLPVPQNPSTQLNLAYRQKSAFIRHKTINDLDKELIEKWKKKLEEENAAKLEIYLLPKRFPYLLRARALDEKLTPYELGRAIYHLGHRRGFLSNRKSEDEKELGKVKSEILQLEGEIENINARTLGEYFSKINPEEKRIRGRYTSRQSYEDEFEKIWEAQKKYYPELLTDELKKEIYHCIFYQRPLKIQSNKIGECEYEKGRKRAPWAILSAQRFRLLQRVNDLKIYTPEGEELDLTPEQREKLIQALEMEGDLTFARIRKILGLSKAHKFNLERGGENRLPGNRTQAKLIKIFGKERWEKFTEQEKNQIVEDLLTIQNYKALKRRAVEVWGLDPESAEKFCETILEDGYCHLSRRAISKLLPYLEQGKPYMSAVKEVYPERTPEEKYEYLPPVKEVMPNITNPAVMRALTELRKVVNAIIREYGKPDMIRIELLRELKINRKARENIWKENRQQEKERKKAVEEILKKTNIKSPSGQDIEKYLLAEECGWRCPYTGRSFSWAELFGDPPQLDIEHIIPFSRCLDNSFANKTLCYAEENRNVKHNRTPWEAYGHNPERWQEIIKRVKTFKGKFAQEKLRRFQLKDEELEKFLDNFTHSQFNDTAYASRTAKQYLGLLYGADANKKVQASKGRITSYLRGLWGLNRILGEDGEKTRTDHRHHAIDAIVIALTEPSMVKKLSNASKKALPGKSWIFAGVNFPPPWENFYQEVKQAIQTIVVYYSPSREAPDGKFYHYVRKPLDEFASAKDLNQFEKKIQQIVDPAVREAVRKKVFEDLEGDFKKLNDRENHPYLEGKDGRKIPVHKVRIKVPIDKKSLAIIQSPIQNRYVITGSNHHIEIFEYKDKKGNLRWDGEVVSTFEAMRRKRMGEPIIKRDYGEGKRFVFSLAINESVLMKDENGKEQLYRVQKISQNKQIFFIKNTDARPAKDIPPKGRSRTPESLRKSLAKKVLITPLGDVRWAND

SEQ ID NO: 17532 - protein, 1213 aa, unidentified
  REGION 1..1213: note = Cas Enzyme sequence
MPMQRHTDVPLSPTLKPLRQPNHITLQHPIAPRQKLHILNNPKRPRTRNRTHIQRNKDRNTQQNITQHFPPNPISKPLQPAKPGETKYTSNPPRATRALRRNKKETPLRQNRARRYNAPQGVACGTKVPYYELKGNRRSGILNSHYTYSRTNVKEKKRGGLSAMAAKTGEQTILGLDLGANSVGWALIRTSNGEPEQCLAMGVRIFDAAVGGTLLDLQAGKEQSPNVKRRNARMLRRQTERRARRRIKVAHLLQEARLLPSGDLDTLAQRHEFFLSLDRAICARHMAEAPTQFLHTFPYWLRARALDIALAPDELGRALYHLAQRRGFLSNRKSTAKEDEDSGTVKPAIEELASQMAESGARTLGEFLSRIDPADPHQRRIRERWTSRQMYKEEFNAIWQAQQPFHPELLTTDIRNRLFQAVFFQRPLRIQKHLIGMCQFEFRGYYPRRRAPLALLAAQRFRLLQKVNDLCVVAPDFSERPLTAAERELLLDKLETHDEYKFDQIRRLFKLSKDYTFNFERGGEKRLFGNRTAARLAKIFGEQWCRFSPEQRDAIVDEIRSYDSETGLAERGIRHYGLDAEAAKKLGSVKLQPGYCGLSRQALSKLLPLMEKGIPYMTAVKEIYKEDETMTAVACLPSLRNAVEQRLMSEIRNPVVTRVLTETRKVVNAVIQKYGKPELIRIELARDVKKSRDERKRIWTKNRNREKQRISAALEVLRETGNEHPNAKEVELVLLHEECGGICPYTGQSITIKNLLSGQSRFDVEHIVPFSRCLDNSFGNKTLCLHEENRSVKKNKTPWEAYGESPERWDEIVERVKHFKGDGRDGKLRRFLMKDLADFDEFSTRMLNDTRYSSRLAGQYVSLLYGSEHRKHIQVSSGMVTAYLRDLWKLNKILSDGGAKNRDDHRHHAIDAVVIALTGPALVKSLSDAAKSAPIENRRRPGIVPPPWDSFLEDVQQFADGIVVSHRVARKVNGRLHEDTFYSPQPAGEEGKPRVHVRKRLESLSPDDVKNIVDPMVREAVIRKLEQTGVDPKKAFAQRENHPSLRTRDGRTIPIHKVRVCKNQEPFQVGRDGRERFVTNDSNHHMEVVEIKGPGGRVKWEGAMVSQYEALRRHKSGLPVINRDHGEGKRLLFSLAPGETFQIDDDKSGEQQTYIVRSISNGNVEIVSLTDSRKALDIKKAKEWLKRSADKLRQLNCRKVVVTPLGEIRRAND

SEQ ID NO: 17533 - protein, 1236 aa, unidentified
  REGION 1..1236: note = Cas Enzyme sequence
LDADDQPCSILDAGVRTFEAGVEASYDEMLQGKQQSKAANRRSKRGPRRQFWRRAWRRYKILKCLVSGGLLRDAEGPNPDEFDLHDPADQDRFLKGVDELLRKRLRPAKGDSRRHLWEQIWPYELRASALERGLDPLELGRAFYHLAQRRGFLSNRKTDTTDDNDPPKKRKKKTKADNAPSDADADDRTATADAKEAKEDTKKVKETITRLGQEMEKTIPDPRFRTLGFYFARHVNPEEQRIRGPGRWTGRLEMYEPEFKAICDAQAAYYPELAEGGSFRKELHDAIFYQRPLKPSGHLVGHCDLEPGRKRAIQALPIAQRFRLLQKVNDLKVRAPDGTAELPLDAGQREKLIKTLTDEGDRTFKQIRKLLDFIEPKISKETKAVEVSGHVFNLERGGEDRIPGDRTAARIHACDKTAPGIKQRWTDMSERLKGELVVALVDYERADALVEHVQERFGFTAEQAAALSKTRLEESRCAFSFRALHGLDKGPNTIKGLVSRMNDGTSLETARRAYLDDRAKLWESRHPAQQFPRPQAFDLLPRVLATDWKHVPPTDKHGRGRRRRGKRKPLEPRPEIVRIAAPAFKNARDLRNPAVTRALAELRKVLNALIRRYGKPARIHVELAREMKKTPLQREVVWTNNRLRQEDRKAAKSAIRMCQEIGISEPTDDDAVKWLLAEECNWQCPYTGKTITARTLYSSPQFQIEHIIPRSVSLDNTFENLTLCDVDYNERIKRKQTPFQAAGNTSSWPEILARVKRFKNRRRAVKNPNRKAKKRVTVEERANPKAERFAWTPEQVKKFYDDEFTPRQLTDTQYAARLAMQYLGMLYGGETDRRGVTDERGVRRVQPSSGGVTAILREEWGLNAVIPGLPDSPAHKEPVNIRLDEKLRTDHRHHAIDAIVIACTGPKTVQLLSDAARRVELAELRREDLRDGQGRRRKRFDVLNPPWGTQQSFSGAVKAVVGGLNVSRRPERKIQGPLHAETNYSKEIKLDAVACRRQRVPLTALSEKDILADNVIADTRVKQAIRAKWEQLGRGKPKDAFKSEASHPRMLPSRKRPNAPPGPPIHTVRINVPDRPLPVGHGSSRRFVLPGKNTIHHAVIVEGQTRQGPRWRVETVSRLDVQRRRRRGLPVIQKDWHPDQLRMWLCKDDCIEMDDGAGTRRVFIVKMISKSGSATDIKVRLHHDARTDDHINQAGERAKFRIRSADTLRQRDARKVLVTPLGEIVYEDKQHRNAND

SEQ ID NO: 17534 - protein, 1049 aa, unidentified
  REGION 1..1049: note = Cas Enzyme sequence
MQVTADEVVALGLDLGSNSVGWALVAENKTGTARILRAGVRVFDAGVEGDIESGRDESRNAKRRTARQQRKQLDRRNRRHVKVILLLQRHGLMPDGELAIDAERDRILKQLDRALFEKYRGFAAVDETLRPRIAQLPYFLRARALDYALEPLELGRVLYHLAQRRGFQSNRKSAPKDEDEGVVKADIAKLTAAMKDSGARTLGEYFSKLDPHEHRIRARWTSREMYRSEFERIWEAQAAHHPGILTTELKVALCDAMFFQRKLKSQKHLVGKCELEDQRKRAPLALLESQRVRYLQKVNDLRIVEDGTERPLTDEQRRLLIDALESQDEMKFTSMRTKFLKLGKSTTFNLERGGEEKIYGNRTAAKLKRVMGETWDSLSESERAQIVEDVLSIENEDALKKRGMSRWGLTEEDAIQFSGIRPEPGYGRFSRQALRKLIPLMQIGTPLQTAIKEIYGPARLQRPIVNLLPIVQESGLEIRNPAVQRTLTETRRVVNALLEGPLKSYGKPYFIRIELARDLKRPRKERENMWKRNRQREKIRNRALAEVKNKTGNEHPSRGDIERWLLAEECNWECPYTGQRISAGNLFGDSSQFDIEHIIPWSRCFEDSFANKTLCYHEENRNRKGKGTPWEVYGDTPEWDTIIARVKAFKSDFRDEKLRRFQLRELSSFDDFSARQLNDTRYATRLAADYLGLLYGGQIDSDGTRRIQAGRGQVTAALRNAWGLNGVLSEGPRKSRDDHRHHAIDAIAVALTNAKTVHMLSKSAQSAGPEHGRRRWWKHVPLPWDGFLNDVQSAIDGITVSHRVSRKVAGALHEETLYSRPRTDEDGKPCVHVRKKIEALSPNDVDNIVDAAVCACVKTKLEELGTNEPQKAFKTREDHPCLVTHDGRLIPIHKVRIRKREKTFEVGREARVRNVVPASNHHTEIIETTDKRGNVRWEDIIVDQYTALQRLRNGEPIIQRDHGERNRFVMSLAGGEIIEMDGEVGTRVLYAVRGVSKDIVTFVQLCDSRLKKDIIASKQWGSLRLNGLRQRNCRKVLVTHLGEVRNAND

SEQ ID NO: 17535 - protein, 1054 aa, unidentified
  REGION 1..1054: note = Cas Enzyme sequence
MSTHPSTRYVLGLDLGVASIGWALVRFDGKKPVTVEEAGTRIFQSAMTNEKGEISQGREESRNKERRDKRLMRRQLDRRARRHRDLAVLLQSHGLLPEGSINNSAKRHELLIELERTIAARHAESIPEEERNQFYNTLPYWLRARALQERLALDELGRTLYHLGQRRGFLSNRKTDRDEDEESGKVYGGIDELTGFMEESGCETLGQYFATVDPTDPAARRIRGRYTSRKMYMQEFDRIWESQRPHHPDLLTDPLKKQIHNAIFFQRKLQSARDLIGICEYECRAKGCDVDRKRAPWALELAQRFRIIQVVNNLTYELGSGEKYQLTETEWQSLVDKLDREGDLKFSQVKKLLDLPKSTSFNLEEGGETTLRGNRTSSKLRKVFEDHLDSLSPEDRFQIVEDLRSYEKVEALEKRGRDRWGLTPEKAREFSKINLEADYCNLSRQAMEKLLPLMEEGKHYMTAVTEVYGEQVYEWETEYLGPVAEAPFGELRNPTVFRVLTQLRKVVNRIIKTYGKPDEIRVELARDVKRSKKERQNLAKRMRDQEKERQAAANLILGFDKNFKFSRDDVEKVLLMQECNCQCPYTGKMISMSSLLGPNPQFEVEHIVPFSRSLDNSFFNKTLCHTEANRTKRNRTPHEAFHGTPEWDAMLERVKKFKGRGGAEKLKRFQLHGKALSESVGDFRSSQLNDTRYASRLALEYLRVLYGGDWRKRLLASKGGITAELRSAWKLNSVLNDGDAKTREDHRHHAVDAIAIALASPDMVQIVSQAAQTAEKQGHRRWWKLIQEPWEGFLSDCKTAIDRIVISHAPNKPVRGALHKETNYSPPKENSEGETVVHVRKSIEALSESEANNIVDDTVRDAVLEKMKEVGKNKPADAFKNGMNTPFHKNGKPIRKVRIASKTPVIPVGEAERVRFVSPGNNHHIEIFEQTDKKGKIKWVGRVVSLYECYRRQTKGLPVIDRVHPDGGRFVFSLCGGDMVEMNDEHGKRVTYVIRGMSAFTNGTIQLVFLRHNDARDITKVPKQGRTKVPNVMQQLECRKVSVTPLGEIRYAND

SEQ ID NO: 17536 - protein, 1436 aa, unidentified
  REGION 1..1436: note = Cas Enzyme sequence
MKRILGLDLGTNSIGWALVNEAENKDERSSIVKLGVRVNPLTVDELTNFEKGKSITTNADRTLKRGMRRNLQRYKLRRETLTEVLKEHKLITEDTILSENGNRTTFETYRLRAKAVTEEISLEEFARVLLMINKKRGYKSSRKAKGVEEGTLIDGMDIARELYNNNLTPGELCLQLLDAGKKFLPDFYRSDLQNELDRIWEKQKEYYPEILTDVLKEELRAKKRDAVWAICAKYFVWKETYTEWNKEKGKTEQQEREHKLEGIYSKRKRDEAKRENLQWRVNGLKEKLSLEQLVIVFQEMNTQINNSSGYLGAISDRSKELYFNKQTVGQYQMEMLDKNPNASLRNMVFYRQDYLDEFNMLWEKQAVYHKELTEELKKEIRDIIIFYQRRLKSQKGLIGFCEFESRQIEVDIDGKKKIKTVGNRVISRSSPLFQEFKIWQILNNIEVTVVGKKRKRRKLKENYSALFEELNDAEQLELNGSRRLCQEEKELLAQELFVRDKMTKSEVLKLLFDNPQELDLNFKTIDGNKTGYALFQAYSKMIEMSGHEPVDFKKPVEKVVEYIKAVFDLLNWNTDILGFNSNEELDNQSYYKLWHLLYSFEGDNTPTGNGRLIQKMTELYGFEKEYATILANVSFQDDYGSLSAKAIHKILPHLKEGNRYDVACVYAGYRHSESSLTREEIANKVLKDRLMLLPKNSLHNPVVEKILNQMVNVINVIIDIYGKPDEIRVELARELKKNAKEREELTKSIAQTTKAHEEYKTLLQTEFGLTNVSRTDILRYKLYKELESCGYKTLYSNTYISREKLFSKEFDIEHIIPQARLFDDSFSNKTLEARSVNIEKGNKTAYDFVKEKFGESGADNSLEHYLNNIEDLFKSGKISKTKYNKLKMAEQDIPDGFIERDLRNTQYIAKKALSMLNEISHRVVATSGSVTDKLREDWQLIDVMKELNWEKYKALGLVEYFEDRDGRQIGRIKDWTKRNDHRHHAMDALTVAFTKDVFIQYFNNKNASLDPNANEHAIKNKYFQNGRAIAPMPLREFRAEAKKHLENTLISIKAKNKVITGNINKTRKKGGVNKNMQQTPRGQLHLETIYGSGKQYLTKEEKVNASFDMRKIETVSKSAYRDALLKRLYENDNDPKKAFAGKNSLDKQPIWLDKEQMRKVPEKVKIVTLEAIYTIRKEISPDLKVDKVIDVGVRKILIDRLNEYGNDAKKAFSNLDENPIWLNKEKGISIKRVTISGISNAQSLHVKKDKDGKPILDENGRNIPVDFVNTGNNHHVAVYYRPVIDKRGQLVVDEAGNPKYELEEVVVSFFEAVTRANLGQPIIDKDYKTTEGWQFLFSMKQNEYFVFPNEKTGFNPKEIDLLDVENYGLISPNLFRVQKFSLKNYVFRHHLETTIKDTSSILRGITWIDFRSSKGLDTIVKVRVNHIGQIVSVGEY

SEQ ID NO: 17537 - protein, 1503 aa, unidentified
  REGION 1..1503: note = Cas Enzyme sequence
MNKKIIGLDLGTNSIGWALVEKNTEQNEGKIVDAGSRIIPMPQDAISKYETGNLQSAASVRTDYRGMRRLYERAELRRSRLLRVLNILGFLPEHYREAIDFTNHLGQFKDHGEPLLPYKRNEEGKNEFIFKDAFHEMLEDMRTHHPELVANGKKIPYDWTIYYLRKKALSQSISKEELAWIILNFNTKRGYYQLRGKEEETATNDNQVYDVLEVSNVEETGPNNKKKGYNWYLIHFTNGKVQNRTWKEAPCHIGDKVECIITYQVKKDGSPKLDENGEQLYKITAPDPNDWTLRKKRTESIINNEHVTVGAYIYDHLMEHPEDKIRGKYVHTIERKYYKEELRIILDKQKEYIPELRDKDLLSQCISELYQNNEAHRKALNDQDFTRLFVDDIIFYQRPLKSKKSLIADCPLEFYPYRDKDGVWKHRPIKCTPRSNPLFQEFRLWQFIQNLRIFLREQKQENGKLKLDVDVTNQFLSTPEDYCDLFDWMKQKSDITQKQLLAYPAFHLGKKAKDYRWNYVDDDKHTYPLCSTHHDICQALKNVDGAPSLSTGQEENLWHILYSVDDRYELEKALCHFAEKCSLDSESFVNAFMTFKPFDNSYASYSEKAIKKMLPLMRTGRYWNVEGIDSHTLQRIEHLITGEADDNISNSVREKCQGLDQIEKYQFLPVWKVCYVVYNRHSEAIDTGRWSSPEDIDNYLKSELRQGSLRNPVVESVLTESLRVVRDVWKQYGKPEEVHIEMGRDLKQNKAQRQKANSAMLANQQTNLRIRCMLQEFADPDFHIDNVRPQSPSQQELLKIYEQGVLDSTDNIPDDIQTIIDHIGDKNKGASRSDMLRYKLWLEQKYQSPYTGQPISLSRLFTSEYEIEHVIPQARYFDDSLNNKVICETEVNREKGSMLAYEFIKSKGGMIVKGTGGRQYKILDTVQYEEFVKSHYSSNKRKMRNLLLDDIPDSFISKQLNDTRYMARKALDIFSHLVREEFKDDSAVSKNVIACNGAITDRLKKDWGLNDVWNDIVAPRFERMNAITHSTDYGQWINKKGKRYFQINIPLALSKGFSKKRIDHRHHAMDAIVIACTTRNIVNYLNNASGADTEARHDLRNAVCFKNKNVDGSGNYQWTIKKPWCTFTQDAHTMLDHTVVSFKQNNRIITQSSNRYWHYSNGKKVLDRQVKGDHRAIRKSLHKATVSGALYMPEKKKVKLKVALEDINAICNAKARKVIRHIINDTYHGHVDNATLLKYFKARDYLINGINFNTLEIRIVPAQPNYTASRVALDSTFTEKDIEKVTDTGIQSILKRHLEHYIDDKGRYDCAAAFSPEGIDEMNEHLTELNGGKSHKPIYKVREKETIGLKFNIGTAGFKNKKFVEADKGTNLFYAVYADNEGKRSFESIPLNMAIERKKNKMDVAPAMNAKGDKLLFVLSPGDLVYLPQEGEHVALPLDERRIYKMVSCTEARSYFVPYSSACMISDKVEYGPQNKMERSLDGIMVKTTCVKLKIDRLGHISI

SEQ ID NO: 17538 - protein, 1507 aa, unidentified
  REGION 1..1507: note = Cas Enzyme sequence
MKKILGLDLGTNSIGWAVVTSVGEGQNENRLIELSGSRIIPMDAATLGDFDKGVTKSQTSERTTFRGIRRLRERGLLRRERLHKVLKILGFLPEHYANEIDFDHHPGKFKADVEPKLPWKKNEMGQWVFLFQNSFQAMLADFSHYQPEWVADSKKVPYDWTIYYLRKKALTEKISKEELAWILLNFNQKRGYYQLRGEDEEEPSNKLKEYCALQVVRVEATDEKKGKETWYNVHLENGWIYRRTSAVPLKWEGMVKEFIVTTDLNEDGTPKLGKDGSVKRSFSIPKEGDWTLIKKKTEADITKSNKTIGTYIYDTLLRNPGQKIKGQLIRTVERKYYKEELRAILLKQISFHSELQDNDIFKRCVEALYPNNEVHKRNIANRDFVYLFIDDILFYQRPLKTKKSLIDNCPYEENQYVDKETGEIKRASIKCIAKSQPLFQEFRLWQFIDNIRIYKREKEVDGRLQTDVDVTVDFLKTEGDYVALFEWLNDKGKIDQKSFLANPAFGIKKVTEQYRWNYVEDKSYPCNETRSLILSLLEKSEIPTSFLSEEGGREEALWHILYSVEDKQEIVKALTTFATKYNLPDRFVEVFCKCPPFKKEYGAYSAKAIKKLLPLMRRGKYWTDTAIDDKTTERIKKIINGEFDESICKQVREKCVNLSTLNDFRGLPLWLACYIVYSRHSEAKETTKWESPEDIDIYLRNFKQHSLRNPIVEQVVLETLRTVRDIWKKVGRIDEIHVELGREIKNSSEKRKQISEQIQANENANLRIKALLIEFMNPEFGVENVRPYSPSQQELLRIYEDGVLNSVEELPDDIAVFLKKFDVMRQPTHSEFLRYKLWLEQRYRSPYTGNVIPLGQLFTPAYEIEHIIPQARYFDDSFSNKVICESAVNKLKDNLLGYEFIKEHHGRKLSEHIQIFSVEAYEAFVKEHYAKSRNKMKKLLMDEIPEKFIERQLNDSRYISKLVKRLLSNIVREKDKDGEYEQEDISKNMVVCTGTVTDRLKRDWGMNDVWNQIVYPRFDRLNHLTDSCQFGGWEDKAGKRVFQTAMPLEYQKGFNKKRIDHRHHAMDAIIIACATRNHVNYLSNESASKNSKVSRTDLQRQLCDKKKTNDKGDYIWSIKKPWDTFTQDARKSLEHIIVGFKQNLRVINKSSNTYQCFDEHGIKVLKKQVHGDNLAIRKPMHKDTAFGSVNLRRVKEARLSVALDAPSMIVDKKMKKKVLELMSYKYDKKGIERYFKENIYLWKNLNLSKVPVYYFTDNTSEPLVAVRKPLDASFNMKKIKEAVTDTGIQKILLNHLSNNDDNPALAFSPDGISEMNKNLTVLNGGKLHQPIYRVRVYEPKGNKFNVGSVANKRSKYVEAAKGTNLFFAVYQTSSGDRVYETIPLNIVIERLKMRWTPVPETNAKGDRLLFTLSPNDLVYIPTVEECESGNISPEIDSRRIYKMVSSSGPQCFFVPHTIANPIVSTLELGANNKAEKSWDGEMIKSICVPVKIDKVGNIISIGGRKSL

SEQ ID NO: 17539 - protein, 1402 aa, unidentified
  REGION 1..1402: note = Cas Enzyme sequence
MKRVLGLDIGTTSIGWAFVNEAENEKEKSSIKKLGVRVIQYDDNLKVVDRKTGKVSDSKNPSKDFEGGKGLSPNAGRTQKRSARRNLDRYQLRRAALIKVLKENNFISNNSILNESGKQTTFSTYKIRAKAAHTQVSKEDFVKILLMINKKRGYKSSRKTKNQNEGESIDGMDVARYLYENNLTPGEYVYKLLLEGKKYLPDFYRSDLQNELDRIWEFQKTFYNNVLTDELKDEIKGKNKGATWKICEKQFEIKGIKQKGSRNEQKLERYYWRSTALRTKLDLEQFTIVLQEINSQINNSSGYLGAISDRSKELYFNNKTVGEYLYKQLKLNPQAKLKNQVFYRQDYLDEFEKIWEKQKEFYPELTEKLKSEIRDIIIFYQRPLKSQKGLLSFCEFESWEEEYFDENLGKKKTRIVGHRVIPKSSPLFQEFKIWQILNNVEIVNKTTGEILRLDQESKHNIFKKLNTVEKLSESEFLKFVFSKSKNYEVKNYKFIEGNRTNAALYNAYQKILEFEGQDFDFVKMEIDTVNKIIKDKFNELGISTEILNFDSEIEGNDFDKQPSMQLWHLLYSFVEDKSKLGNEKLLEKLNNKFGFNKKYAKLIEKIPLQDDYGSLSARAIRKILPHLKEGNTYDTACLLAGYNHSSSLTKDEIKSRKLKKYLELLPKNSLRNPIVEKILNQMVNVVNAIIDDAELGKPDEIRIELARELKKNADERKRMTEGINKATAEYEKIRKILHDDFGISKVTRNDIIKYRLWKELESYGYKTLYKKIYIPKEELFSNKFDIEHIIPQSKLFDDSFSNKTLSLRQVNIDKGNKTAYDYLKNELSDEEFEKYLFRIEKLMKEGKISKAKYNKLKMKGSNIPDGFIDRDLRNSQYIAKKAVQMLNEVFRKVNTTTGSVTKRLREDWQIINVLKELNLPKYEKLGLVKSIEGKNGQTEKNIIDWTKRNDNRHHAVDALIVAFTLPAHIQYLNNMNARGNKKHKKYHEVYGIEQKYLYKSDKNRLLFKPPIPLQQFRADAKNHLESILISFKAKNKVVTRNKNKIKVKGKNNYKTKIELTPRGQLHKETVYGKIERYKTKLEKVGTTFNTEKIKLVSNQKYRKALLFRLKNNNGDAKKAFGGKNSPSKTPIYLDKSETIKLPEKVKLVWKEEQFTIRKEITPDLKIDKVIDIGIKRILQNRLDDFNGDAKKAFVNLEENPIWINKERGIAVKRVTISGVINAIPLHYKKDHNGNFILDEEGNKLPVDFVSIGNNHHVAIYRDEEGNLQDEVVSFYEAVHRVKQGLPVINKNKNGYKFLFTMKQNEYFVFPSEDFDPNEIDLLNPDNAPIVSPHLFRVQKFSRVEYGNSVVRDFVFRHHLETQLIDRKETKNICYKQIKSLGKLKGIVKVRINHLGKIVRVGE

SEQ ID NO: 17540 - protein, 1517 aa, unidentified
  REGION 1..1517: note = Cas Enzyme sequence
MKKIVGLDLGTNSIGWALINAYINKEHLYGIEACGSRIIPMDAAILGNFDKGNSISQTADRTSYRGIRRLRERHLLRRERLHRILDLLGFLPKHYSDSLNRYGKFLNDIECKLPWVKDETGSYKFIFQESFKEMLANFTEHHPILIANNKKVPYDWTIYYLRKKALTQKISKEELAWILLNFNQKRGYYQLRGEEEETPNKLVEYYSLKVEKVEDSGERKGKDTWYNVHLENGMIYRRTSNIPLDWEGKTKEFIVTTDLEADGSPKKDKEGNIKRSFRAPKDDDWTLIKKKTEADIDKIKMTVGAYIYDTLLQKPDQKIRGKLVRTIERKYYKNELYQILKTQSEFHEELRDKQLYIACLNELYPNNEPRRNSISTRDFCHLFIEDIIFYQRPLKSKKSLIDNCPYEENRYIDKESGEIKHASIKCIAKSHPLYQEFRLWQFIVNLRIYRKETDVDVTQELLPTEADYVTLFEWLNEKKEIDQKAFFKYPPFGFKKTTSNYRWNYVEDKPYPCNETHAQIIARLGKAHIPKAFLSKEKEETLWHILYSIEDKQEIEKALHSFANKNNLSEEFIEQFKNFPPFKKEYGSYSAKAIKKLLPLMRMGKYWSIENIDNGTRIRINKIIDGEYDENIRERVRQKAINLTDITHFRALPLWLACYLVYDRHSEVKDIVKWKTPKDIDLYLKSFKQHSLRNPIVEQVITETLRTVRDIWQQVGHIDEIHIELGREMKNPADKRARMSQQMIKNENTNLRIKALLTEFLNPEFGIENVRPYSPSQQDLLRIYEEGVLNSILELPEDIGIILGKFNQTDTLKRPTRSEILRYKLWLEQKYRSPYTGEMIPLSKLFTPAYEIEHIIPQSRYFDDSLSNKVICESEINKLKDRSLGYEFIKNHHGEKVELAFDKPVEVLSVEAYEKLVHESYSHNRSKMKKLLMEDIPDQFIERQLNDSRYISKVVKSLLSNIVREENEQEAISKNVIPCTGGITDRLKKDWGINDVWNKIVLPRFIRLNELTESTRFTSINTNNTMIPSMPLELQKGFNKKRIDHRHHAMDAIIIACANRNIVNYLNNVSASKNTKITRRDLQTLLCHKDKTDNNGNYKWVIDKPWETFTQDTLTALQKITVSFKQNLRVINKTTNHYQHYENGKKIVSNQSKGDSWAIRKSMHKETVHGEVNLRMIKTVSFNEALKKPQAIVEMDLKKKILAMLELGYDTKRIKNYFEENKDTWQDINPSKIKVYYFTKETKDRYFAVRKPIDTSFDKKKIKESITDTGIQQIMLRHLETKDNDPTLAFSPDGIDEMNRNILILNKGKKHQPIYKVRVYEKAEKFTVGQKGNKRTKFVEAAKGTNLFFAIYETEEIDKDTKKVIRKRSYSTIPLNVVIERQKQGLSSAPEDENGNLPKYILSPNDLVYVPTQEEINKGEVVMPIDRDRIYKMVDSSGITANFIPASTANLIFALPKATAEIYCNGENCIQNEYGIGSPQSKNQKAITGEMVKEICFPIKVDRLGNIIQVGSCILTN

SEQ ID NO: 17541 - protein, 1536 aa, unidentified
  REGION 1..1536: note = Cas Enzyme sequence
LIIYFIFEKIVNTILVMKKIVGLDLGTNSIGWALINAYIDEYNKEHLYGIEACGSRIIPMDAAILGNFDKGNSISQTADRTSYRGIRRLRERHLLRRERLHRILDLLGFLPKHYSDSLNRYGKFLNDIECKLPWVKDETGSYKFIFQESFKEMLADFTEHHPKLIANNKKVPYDWTIYYLRKKALTQKISKEELAWILLNFNQKRGYYQLRGEEEETPNKLVEYYSLKVEKVEDSGEKKGKDTWYNVHLENGMIYRRTSNIPLDWEGKTKEFIVTTDLEADGSPKKDKEGNIKRSFRAPKDDDWTLIKKKTEADIDKIKMTVGAYIYDTLLQKPDQKIRGKLVRTIERKYYKNELYQILKTQSEFHEELRDKQLYIACLNELYPNNEPRRNSISTRDFCHLFIEDIIFYQRPLKSKKSLIDNCPYEENRYIDKESGEIKHASIKCIAKSHPLYQEFRLWQFIVNLRIYRKETDVDVTQELLPTEADYVTLFEWLNEKKEIDQKAFFKYPPFGFKKTTSNYRWNYVEDKPYPCNETHAQIITRLGKAHIPKAFLSKEKEETLWHILYSIEDKQEIEKALHSFANKNNLSEEFIEQFKNFPPFKKEYGSYSAKAIKKLLPLMRMGKYWSIENIDNGTRIRINKIIDGEYDENIRERVRQKAINLTDITHFRALPLWLACYLVYDRHSEVKDIVKWKTPKDIDLYLKSFKQHSLRNPIVEQVITETLRTVRDIWQQVGHIDEIHIELGREMKNPADKRARMSQQMIKNENTNLRIKALLTEFLNPEFGIENVRPYSPSQQDLLRIYEEGVLNSILELPEDIGIILGKFNQTDTLKRPTRSEILRYKLWLEQKYRSPYTGEMIPLSKLFTPAYEIEHIIPQSRYFDDSLSNKVICESEINKLKDRSLGYEFIKNHHGEKVELAFDKPVEVLSVEAYEKLVHESYSHNRSKMKKLLMEDIPDQFIERQLNDSRYISKVVKSLLSNIVREENEQEAISKNVIPCTGGITDRLKKDWGINDVWNKIVLPRFIRLNELTESTRFTSINTNNTMIPSMPLELQKGFNKKRIDHRHHAMDAIIIACANRNIVNYLNNVSASKNTKITRRDLQTLLCNKDKTDNNGNYKWVIDKPWETFTQDTLTALQKITVSFKQNLRVINKTTNHYQHYENGKKIVSNQSKGDSWAIRKSMHKETVHGEVNLRMIKTVSLNEALKKPQAIVEMDLKKKILAMLELGYDTKRIKNYFEENKDTWQDINPSKIKVYYFTKETKDRYFAVRKPIDTSFDKKKIKESITDTGIQQIMLRHLETKDNDPTLAFSPDGIDEMNRNILILNKGKKHQPIYKVRVYEKAEKFTVGQKGNKRTKFVEAAKGTNLFFAIYETEEIDKDTKKVIRKRSYSTIPLNVVIERQKQGLSSAPEDENGNLPKYILSPNDLVYVPTQEEINKREVVMPIDRDRIYKMVDSSGITANFIPASTANLIFALPKATAEIYCNGENCIQNEYGIGSPQSKNQKAITGEMVKEICFPIKVDRLGNIIQVGLCILTN

SEQ ID NO: 17542 - protein, 1536 aa, unidentified
  REGION 1..1536: note = Cas Enzyme sequence
LIIYFIFEKIVNTILVMKKIVGLDLGTNSIGWALINAYIDEYNKEHLYGIEACGSRIIPMDAAILGNFDKGNSISQTADRTSYRGIRRLRERHLLRRERLHRILDLLGFLPKHYSDSLNRYGKFLNDIECKLPWVKDDTGSYKFIFQESFKEMLANFTEHHPILIANNKKVPYDWTIYYLRKKALTQKISKEELAWILLNFNQKRGYYQLRGEEEETPNKLVEYYSLKVEKVEDSGERKGKDTWYNVHLENGMIYRRTSNIPLDWEGKTKEFIVTTDLEADGSPKKDKKGNIKRSFRAPKDDDWTLIKKKTEADIDKIKMTVGAYIYDTLLQKPDQKIRGKLVRTIERKYYKNELYQILKTQSEFHEELRDKQLYIACLNELYPNNEPRRNSISTRDFCHLFIEDIIFYQRPLKSKKSLIDNCPYEENRYIDKESGEIKHASIKCIAKSHPLYQEFRLWLFIVNLRIYRKETDVDVTQELLPTEADYVTLFEWLNEKKEIDQKAFFKYPPFGFKKTTSNYRWNYVEDKPYPCNETHAQIIARLGKAHIPKAFLSKEKEETLWHILYSIEDKQEIEKALHSFANKNNLSEEFIEQFKNFPPFKKEYGSYSAKAIKKLLPLMRMGKYWSIENIDNGTRIRINKIIDGEYDENIRERVRQKAINLTDITHFRALPLWLACYLVYDRHSEVKDIVKWKTPKDIDLYLKSFKQHSLRNPIVEQVITETLRTVRDIWQQVGHIDEIHIELGREMKNPADKRARMSQQMIKNENTNLRIKALLTEFLNPEFGIENVRPYSPSQQDLLRIYEEGVLNSILELPEDIGIILGKFNQTDTLKRPTRSEILRYKLWLEQKYRSPYTGEMIPLSKLFTPAYEIEHIIPQSRYFDDSLSNKVICESEINKLKDRSLGYEFIKNHHGEKVELAFDKPVEVLSVEAYEKLVHESYSHNRSKMKKLLMEDIPDQFIERQLNDSRYISKVVKSLLSNIVREENEQEAISKNVIPCTGGITDRLKKDWGINDVWNKIVLPRFIRLNELTESTRFTSINTNNTMIPSMPLELQKGFNKKRIDHRHHAMDAIIIACANRNIVNYLNNVSASKNTKITRRDLQTLLCHKDKTDNNGNYKWVIDKPWETFTQDTLTALQKITVSFKQNLRVINKTTNHYQHYENGKKIVSNQSKGDSWAIRKSMHKETVHGEVNLRMIKTVSFNEALKKPQAIVEMDLKKKILAMLELGYDTKRIKNYFEENKDTWQDINPSKIKVYYFTKETKDRYFAVRKPIDTSFDKKKIKESITDTGIQQIMLRHLETKDNDPTLAFSPDGIDEMNRNILILNKGKKHQPIYKVRVYEKAEKFTVGQKGNKRTKFVEAAKGTNLFFAIYETEEIDKDTKKVIRKRSYSTIPLNVVIERQKQGLSSAPEDENGNLPKYILSPNDLVYVPTQEEINKGEVVMPIDRDRIYKMVDSSGITANFIPASTANLIFALPKATAEIYCNGENCIQNEYGIGSPQSKNQKAITGEMVKEICFPIKVDRLGNIIQVGSCILTN

SEQ ID NO: 17543 - protein, 1536 aa, unidentified
  REGION 1..1536: note = Cas Enzyme sequence
LIIYFIFEKIVNTILVMKKIVGLDLGTNSIGWALINAYIDEYNKEHLYGIEACGSRIIPMDAAILGNFDKGNSISQTADRTSYRGIRRLRERHLLRRERLHRILDLLGFLPKHYSDSLNRYGKFLNDIECKLPWVKDETGSYKFIFQESFKEMLADFTEHHPKLIANNKKVPYDWTIYYLRKKALTQKISKEELAWILLNFNQKRGYYQLRGEEEETPNKLVEYYSLKVEKVEDSGEKKGKDTWYNVHLENGMIYRRTSNIPLDWEGKTKEFIVTTDLEADGSPKKDKEGNIKRSFRAPKDDDWTLIKKKTEADIDKIKMTVGAYIYDTLLQKPDQKIRGKLVRTIERKYYKNELYQILKTQSEFHEELRDKQLYIACLNELYPNNEPRRNSISTRDFCHLFIEDIIFYQRPLKSKKSLIDNCPYEENRYIDKESGEIKHASIKCIAKSHPLYQEFRLWQFIVNLRIYRKETDVDVTQELLPTEADYVTLFEWLNEKKEIDQKAFFKYPPFGFKKTTSNYRWNYVEDKPYPCNETHAQIIARLGKAHIPKAFLSKEKEETLWHILYSIEDKQEIEKALHSFANKNNLSEEFIEQFKNFPPFKKEYGSYSAKAIKKLLPLMRMGKYWSIENIDNGTRIRINKIIDGEYDENIRERVRQKAINLTDITHFRALPLWLACYLVYDRHSEVKDIVKWKTPKDIDLYLKSFKQHSLRNPIVEQVITETLRTVRDIWQQVGHIDEIHIELGREMKNPADKRARMSQQMIKNENTNLRIKALLTEFLNPEFGIENVRPYSPSQQDLLRIYEEGVLNSILELPEDIGIILGKFNQTDTLKRPTRSEILRYKLWLEQKYRSPYTGEMIPLSKLFTPAYEIEHIIPQSRYFDDSLSNKVICESEINKLKDRSLGYEFIKNHHGEKVELAFDKPVEVLSVEAYEKLVHESYSHNRSKMKKLLMEDIPDQFIERQLNDSRYISKVVKSLLSNIVREENEQEAISKNVIPCTGGITDRLKKDWGINDVWNKIVLPRFIRLNELTESTRFTSINTNNTMIPSMPLELQKGFNKKRIDHRHHAMDAIIIACANRNIVNYLNNVSASKNTKITRRDLQTLLCHKDKTDNNGNYKWVIDKPWETFTQDTLTALQKITVSFKQNLRVINKTTNHYQHYENGKKIVSNQSKGDSWAIRKSMHKETVHGEVNLRMIKTVSFNEALKKPQAIVEMDLKKKILAMLELGYDTKRIKNYFEENKDTWQDINPSKIKVYYFTKETKDRYFAVRKPIDTSFDKKKIKESITDTGIQQIMLRHLETKDNDPTLAFSPDGIDEMNRNILILNKGKKHQPIYKVRVYEKAEKFTVGQKGNKRTKFVEAAKGTNLFFAIYETEEIDKDTKKVIRKRSYSTIPLNVVIERQKQGLSSAPEDENGNLPKYILSPNDLVYVPTQEEINKGEVVMPIDRDRIYKMVDSSGITANFIPASTANLIFALPKATAEIYCNGENCIQNEYGIGSPQSKNQKAITGEMVKEICFPIKVDRLGNIIQVGSCILTN

SEQ ID NO: 17544 - protein, 1508 aa, unidentified
  REGION 1..1508: note = Cas Enzyme sequence
MRTILGLDLGTNSIGWAVINSVIKEQTERIWIEMAGSRIIPMDAAILGDFDKGNSISQTAERTRFRGVRRLRERQLLRRERLHKVLKILGFLPEHYLKGIDFEKHTGKFLSGSEPKLPWVKDRWGKYSFLFQTAFNEMLADFAKHQPSLVFDGKKIPYDWTVYYLRKKALTEMISKEELAWILLNFNQKRGYYQLRGEEEEDNAGKSVEFYALKVLSVEATDEKKGRDIWYNVHLENGWVYRRSSNVPLDWEGRVKEFIVTTDLNPDGTPKLDKYGEVKRSFRAPKEDDWMLIKKRTEADITGTHKTIGSYIYDALLQEPQQKIIGKLVKTVERKFYKEELNFILQKQCAFHAELQDRDLYMRCIEALYPGNEVQRRNIANRDFIYLLIDDVLFYQRPLKTKKSLIANCPYEENEYVNRKTGEIKTAPLKCIAKSHPLFQEFRLWYFLSNIRVYQKEREVNGTLHLDVDVTTEFLKTEDDYVALFDRLNSRKEIDQKAFLRYPAFGLKKEINNYRWNYVEDKFYPCNETRHAILSRLEKAGIGIDFLSDEKETALWHILYSVSDKQEIEKALATFAVKNGLNESFVEVFKKFPPFKSEYGAYSAKAIKKLLPLMRCGKYWDMSLIDGTTKERIERIIAGECDESIGAKVREKAMNLSDISCFKRLPLWLACYVVYNRHSEDKEITKWETPADIDAYLAAFKQHSLRNPIVEQVITETLRVVRDIWKQVGKIDEIHIELGREMKNPADKRKRMTTQILENENANLRIKALLAEFVNPEYGVENVRPYSPSQQEILRIYEDAVLKGEEQIPEDIDVILKKFNTSKLPTKSEFLRYKLWLEQKYRSPYTGELIPLAKLFTAAYEIEHVIPQSRYFDDSFSNKVICESAVNKLKDNQLGYEFIKNHHGQKVEVGFGKTVEIFSVDSYERFVKEQYAKSGIKMKKLLMDDIPEQFIERQLNDSRYISKVVKGLLSNIVREKNDSGEYEPEAVSKNILVCTGSVTDRLKKDWGMNDVWNSIVSPRFERLNALTETQCFGHWENKDGKKVFQTAVPLEYQKGFSKKRIDHRHHAMDAIVIACATRNHVNYLNNESASRNAKISRYDLQRLLCDKSRGDGNGNYRWIIKKPWTTFTQDAREALSGIIVSLKQNLRIINKTTNIYQHFDANGTRVYEKQKIGDSWAIRKPMHKDTVFGAVNLRKVKVVRLSVALDTPSMIVDKRVKNKVLELLSYKYDKKKIEKYFKENAFLWKELDIAKVAVYYFTENTTEPLVAVRKSLDSTFNEKKIASVTDTGIQKILLNHLKSKEGKAELAFSAEGIEEMNRNLLQLNDGKGHQPIYKVRVYEPRGNKFKVGVLGNKGAKWVEAAKGTNLFFAIYITEDGNRTYETIPLNWVIEREKQGLVPVPDRNEKGDKLLFWLSPNDLVYLPTEEERDFGRINEPIDRGRIYKMVSSSGNQCFFIPQSISNAIISTKELGSNNKAEKSWDGEMIKNICIPVKVDRLGRIIEVKYRVNE

SEQ ID NO: 17545 - protein, 1508 aa, unidentified
  REGION 1..1508: note = Cas Enzyme sequence
MRTILGLDLGTNSIGWAVINSVIKEQTEKIWIEMAGSRIIPMDAAILGDFDKGNSISQTAERTRFRGVRRLRERQLLRRERLHKVLKILGFLPEHYLKGIDFEKHTGKFLSGSEPKLPWVKDRWGKYSFLFQTAFNEMLADFAKHQPSLVFDGKKIPYDWTVYYLRKKALTEMISKEELAWILLNFNQKRGYYQLRGEEEEDNAGKSVEFYALKVLSVEATDEKKGRDIWYNVHLENGWVYRRSSNVPLDWEGRVKEFIVTTDLNPDGTPKLDKYGEVKRSFRAPKEDDWMLIKKRTEADIAGTHKTIGSYIYDALLQEPQQKIIGKLVKTVERKFYKEELNLILQKQCAFHAELQDRDLYMRCIEALYPGNEVQRRNIANRDFIYLLIDDVLFYQRPLKTKKSLIANCPYEENEYVNRKTGEIKTAPLKCIAKSHPLFQEFRLWHFLSNIRVYQKEREVNGTLYLDVDVTTEFLKTEDDYVALFDWLNSRKEIDQKAFLRYPAFGLKKEINNYRWNYVEDKFYPCNETRHAILSRLEKAGIGIDFLSDEKETALWHILYSVSDKQEIEKALATFAVKNGLNESFVEVFKKFPPFKSEYGAYSAKAIKKLLPLMRCGKYWDMSLIDGTTKERIERIIAGECDESIGAKVREKAMNLSDISCFKRLPLWLACYVVYNRHSEDKEITKWETPADIDAYLAAFKQHSLRNPIVEQVITETLRVVRDIWKQVGKIDEIHIELGREMKNPADKRKRMTTQILENENANLRIKALLAEFVNPEYGVENVRPYSPSQQEILRIYEDAVLKGEEQIPEDIDVILKKFNTSKLPTKSEFLRYKLWLEQKYRSPYTGELIPLAKLFTAAYEIEHVIPQSRYFDDSFSNKVICESAVNKLKDNQLGYEFIKNHHGQKVEVGFGKTVEIFSVDSYERFVKEQYAKSGIKMKKLLMDDIPEQFIERQLNDSRYISKVVKGLLSNIVREKNDSGEYEPEAVSKNILVCTGNVTDRLKKDWGMNDVWNSIVSPRFERLNALTETQCFGHWENKDGKKVFQTAVPLEYQKGFSKKRIDHRHHAMDAIVIACATRNHVNYLNNESASRNAKISRYDLQRLLCDKSRGDGNGNYRWIIKKPWTTFTQDAREALSGIIVSLKQNLRIINKTTNIYQHFDANGTRVYEKQKIGDSWAIRKPMHKDTVFGAVNLRKVKVVRLSVALDTPSMIVDKRVKNKVLELLSYKYDKKKIEKYFKENAFLWKELDIAKVAVYYFTENTTEPLVAVRKSLDSTFNEKKIASVTDTGIQKILLNHLKSKEGKAELAFSAEGIEEMNRNLLQLNDGKGHQPIYKVRVYEPRGNKFKVGVLGNKGAKWVEAAKGTNLFFAIYITEDGNRTYETIPLNWVIEREKQGLVPVPDRNEKGDKLLFWLSPNDLVYLPTEEERDFGRINEPIDRGRIYKMVSSSGNQCFFIPQSISNAIISTKELGSNNKAEKSWDGEMIKNICIPVKVDRLGRIIEVKYRVNE

SEQ ID NO: 17546 - protein, 1527 aa, unidentified
  REGION 1..1527: note = Cas Enzyme sequence
MLVLIKKITLNSVLKNNIMKTILGLDLGSNSIGWAVINSVIEKQSERIWIKMAGSRIIPMDSAVLGDFDKGSSISQTAERTHFRGVRRLRERQLLRRERLHRVLKILGFLPEHYLKEIDFEKHPGQFLTNCEPKLPWLMDERGKYTFLFQAAFNEMLADFAKHQPSLVSDGKKVPYDWTIYYLRKKALTEMISKEELAWILLNFNQKRGYYQLRGEEEEDAAGKSVEFYALKVLSVEATDEKKGRDIWYNVHLENGWIYRRSSNVPLDWENQVKEFIVTTDLNPDGTPKLDKYGEVKRSFRVPKEDDWMLIKKRTEADIANTRKTVGSYIYDTLLQKPQQKIIGKLVKTVERKLYKEELNLILQKQCAFHAELRNRDLYMRCIEALYPGNEMRRKNIVNRDFIYLLMDDILFYQRPLKTKKTLISNCPYEENEYVNRETGEIKKAPLKCIAKSHPLFQEFRLWHFLSNIRVYQKEKKVNGTLHLDVDVTAEFLRTEDDYVALFDWLNSRKEIDQKAFLKYPKFGLKKEIDNYRWNYVEDKLYPCNETRYAILSRLEKVGVSIDFLSDEKETVLWHILYSVSDKQEIEKALRTFAVKNGLNESFVEVFKKFPPFKSEYGAYSAKAIKKLLPLMRCGKYWDTSLIDDATRDRIERIITGEYDRNIAAKVREKAINLSDIYCFKRLPLWLACYVVYNRHSENKEIAKWETPADIDAYLASFKQHSLRNPIVEQVITETLRVVRDIWKQVGKIDEIHIELGREMKSPADKRKRMTAQIQENEKANLRIKKLLVEFMNPEYEVENIRPYSPSQQEILRIYEDTVLKREEPIPEDIDAILKKFNNSKLPTKSEFLRYKLWLEQKYRSPYTGELIPLGKLFTTAYEIEHIIPQSRYFDDSFSNKVICESAVNKLKDNQLGYEFIKNHHGQKVEVGFGKKVEILSVDSYERFVKEQYAKSSVKMKKLLMDDIPEQFIERQLNDSRYISKVVKGLLSNIVREKNDNDGYEPEAVSRNVLVCTGNVTDRLKKDWGMNDVWNCIVYPRFERLNALTGTQCFGHWENKDGKKVFQTELPLEYQKGFSKKRIDHRHHAMDAIVIACATRNHVNYLSNESASRNTNISRYDLQRLLCDKNRVDGGGNYRWVIKKPWNTFTQDTREALDKIVISLKQNLRIINKTTNIYQHFDITGNRIYKKQEIGDNWAVRKPMHKDTVFGAVNLRKVKRVRLSVALDTPTMIVDKRVKGKVLELLSYKYDKKKIEKYFKENVFFWKDLDIAEVAVYYFTENTSEPLVAVRKSLDSTFNEKKIKESVTDTGIQKILLNHLSVKGGKADWAFSAEGIEEMNRNILQLNDGKKHQPIYKVRVYESRGNKFSVGVSGNKGTKWVGAAKGTNLFFAIYVTENGKRTYVTVPLDVAIEREKQGLIPVPDRNDKGDKLLFWLSPNDLVYLPTEEERELGRINEPIDRGRIYKIVSFTGNRLYGVPCNVANVIVDKLEYSSLNKVELTDAKESIKEICIPIRVDRLGHIIEVKYRINE

SEQ ID NO: 17547 - protein, 1436 aa, unidentified
  REGION 1..1436: note = Cas Enzyme sequence
MKRILGLDLGTNSIGWALVNEAENKDERSSIVKLGVRVNPLTVDELTNFEKGKSITTNADRTLKRGMRRNLQRYKLRRETLTEVLKEHKLITEDTILSENGNRTTFETYRLRAKAVTEEISLEEFARVLPMINKKRGYKSSRKAKGVEEGTLIDGMDIARELYNNNLTPGELCLQLLDAGKKFLPDFYRSDLQNELDRIWEKQKEYYPEILTDVLKEELRGKKRDAVWAICAKYFVWKENYTEWNKEKGKTEQQEREHKLEGIYSKRKRDEAKRENLQWRVNGLKEKLSLEQLVIVFQEMNTQINNSSGYLGAISDRSKELYFNKQTVGQYQMEMLDKNPNASLRNMVFYRQDYLDEFNMLWEKQAVYHKELTEELKKEIRDIIIFYQRRLKSQKGLIGFCEFESRQIEVDIDGKKKIKTVGNRVISRSSPLFQEFKIWQILNNIEVTVVGKKRKRRKLKENYSALFEELNDAEQLELNGSRRLCQEEKELLAQELFIRDKMTKSEVLKLLFDNPQELDLNFKTIDGNKTGYALFQAYSKMIEMSGHEPVDFKKPVEKVVEYIKAVFDLLNWNTDILGFNSNEELDNQPYYKLWHLLYSFEGDNTPTGNGRLIQKMTELYGFEKEYATILANVSFQDDYGSLSAKAIHKILPHLKEGNRYDVACVYAGYRHSESSLTREEIANKVLKDRLMLLPKNSLHNPVVEKILNQMVNVINVIIDIYGKPDEIRVELARELKKNAKEREELTKSIAQTTKAHEEYKTLLQTEFGLTNVSRTDILRYKLYKELESCGYKTLYSNTYISREKLFSKEFDIEHIIPQARLFDDSFSNKTLEARSVNIEKGNKTAYDFVKEKFGESGADNSLEHYLNNIEDLFKSGKISKTKYNKLKMAEQDIPDGFIERDLRNTQYIAKKALSMLNEISHRVVATSGSVTDKLREDWQLIDVMKELNWEKYKALGLVEYFEDRDGRQIGRIKDWTKRNDHRHHAMDALTVAFTKDVFIQYFNNKNASLDPNANEHAIKNKYFQNGRAIAPMPLREFRAEAKKHLENTLISIKAKNKVITGNINKTRKKGGVNKNMQQTPRGQLHLETIYGSGKQYLTKEEKVNASFDMRKIGTVSKSAYRDALLKRLYENDNDPKKAFAGKNSLDKQPIWLDKEQMRKVPEKVKIVTLEAIYTIRKEISPDLKVDKVIDVGVRKILIDRLNEYGNDAKKAFSNLDKNPIWLNKEKGISIKRVTISGISNAQSLHVKKDKDGKPILDENGRNIPVDFVNTGNNHHVAVYYRPVIDKRGQLVVDEAGNPKYELEEVVVSFFEAVTRANLGLPIIDKDYKTTEGWQFLFSMKQNEYFVFPNEKTGFNPKEIDLLDVENYGLISPNLFRVQKFSLKNYVFRHHLETTIKDTSSILRGITWIDFRSSKGLDTIVKVRVNHIGQIVSVGEY

SEQ ID NO: 17548 - protein, 1436 aa, unidentified
  REGION 1..1436: note = Cas Enzyme sequence
MKRILGLDLGTNSIGWALVNEAENKDERSSIVKLGVRVNPLTVDELTNFEKGKSITTNADRTLKRGMRRNLQRYKLRRETLTEVLKEHKLITEDTILSENGNRTTFETYRLRAKAVTEEISLEEFARVLLMINKKRGYKSSRKAKGVEEGTLIDGMDIARELYNNNLTPGELCLQLLDAGKKFLPDFYRSDLQNELDRIWEKQKEYYPEILTDVLKEELRGKKRDAVWAICAKYFVWKENYTEWNKEKGKTEQQEREHKLEGIYSKRKRDEAKRENLQWRVNGLKEKLSLEQLVIVFQEMNTQINNSSGYLGAISDRSKELYFNKQTVGQYQMEMLDKNPNASLRNMVFYRQDYLDEFNMLWEKQAVYHKELTEELKKEIRDIIIFYQRRLKSQKGLIGFCEFESRQIEVDIDGKKKIKTVGNRVISRSSPLFQEFKIWQILNNIEVTVVGKKRKRRKLKENYSAIFEELNDAEQLELNGSRRLCQEEKELLAQELFVRDKMTKSEVLKLLFDNPQELDLNFKTIDGNKTGYALFQAYSKMIEMSGHEPVDFKKPVEKVVEYIKAVFDLLNWNTDILGFNSNEELDNQSYYKLWHLLYSFEGDNTPTGNGRLIQKMTELYGFEKEYATILANVSFQDDYGSLSAKAIHKILPHLKEGNRYDVACVYAGYRHSESSLTREEIANKVLKDRLMLLPKNSLHNPVVEKILNQMVNVINVIIDIYGKPDEIRVELARELKKNAKEREELTKSIAQTTKAHEEYKTLLQTEFGLTNVSRTDILRYKLYKELESCGYKTLYSNTYISREKLFSKEFDIEHIIPQARLFDDSFSNKTLEARSVNIEKGNKTAYDFVKEKFGESGADNSLEHYLNNIEDLFKSGKISKTKYNKLKMAEQDIPDGFIERDLRNTQYIAKKALSMLNEISHRVVATSGSVTDKLREDWQLIDVMKELNWEKYKALGLVEYFEDRDGRQIGRIKDWTKRNDHRHHAMDALTVAFTKDVFIQYFNNKNASLDPNANEHAIKNKYFQNGRAIAPMPLREFRAEAKKHLENTLISIKAKNKVITGNINKTRKKGGVNKNMQQTPRGQLHLETIYGSGKQYLTKEEKVNASFDMRKIGTVSKSAYRDALLKRLYENDNDPKKAFAGKNSLDKQPIWLDKEQMRKVPEKVKIVTLEAIYTIRKEVSPDLKVDKVIDVGVRKILIDRLNEYGNDAKKAFSNLDKNPIWLNKEKGISIKRVTISGISNAQSLHVKKDKDGKPILDENGRNIPVDFVNTGNNHHVAVYYRPVIDKRGQLVVDEAGNPKYELEEVVVSFFEAVTRANLGLPIIDKDYKTTEGWQFLFSMKQNEYFVFPNEKTGFNPKEIDLLDVENYGLISPNLFRVQKFSLKNYVFRHHLETTIKDTSSILRGITWIDFRSSKGLDTIVKVRVNHIGQIVSVGEY

SEQ ID NO: 17549 - protein, 1436 aa, unidentified
  REGION 1..1436: note = Cas Enzyme sequence
MKRILGLDLGTNSIGWALVNEAENKDERSSIVKLGVRVNPLTVDELTNFEKGKSITTNADRTLKRGMRRNLQRYKLRRETLTEVLKEHKLITEDTILSENGNRTTFETYRLRAKAVTEEISLEEFARVLLMINKKRGYKSSRKAKGVEEGTLIDGMDIARELYNNNLTPGELCLQLLDAGKKFLPDFYRSDLQNELDRIWEKQKEYYPEILTDVLKEELRGKKRDAVWAICAKYFVWKENYTEWNKEKGKTEQQEREHKLEGIYSKRKRDEAKRENLQWRVNGLKEKLSLEQLVIVFQEMNTQINNSSGYLGAISDRSKELYFNKQTVGQYQMEMLDKNPNASLRNMVFYRQDYLDEFNMLWEKQAVYHKELTEELKKEIRDIIIFYQRRLKSQKGLIGFCEFESRQIEVDIDGKKKIKTVGNRVISRSSPLFQEFKIWQILNNIEVTVVGKKRKRRKLKENYSALFEELNDAEQLELNGSRRLCQEEKELLAQELFIRDKMTKSEVLKLLFDNPQELDLNFKTIDGNKTGYALFQAYSKMIEMSGHEPVDFKKPVEKVVEYIKAVFDLLNWNTDILGFNSNEELDNQPYYKLWHLLYSFEGDNTPTGNGRLIQKMTELYGFEKEYATILANVSFQDDYGSLSAKAIHKILPHLKEGNRYDVACVYAGYRHSESSLTREEIANKVLKDRLMLLPKNSLHNPVVEKILNQMVNVINVIIDIYGKPDEIRVELARELKKNAKEREELTKSIAQTTKAHEEYKTLLQTEFGLTNVSRTDILRYKLYKELESCGYKTLYSNTYISREKLFSKEFDIEHIIPQARLFDDSFSNKTLEARSVNIEKGNKTAYDFVKEKFGESGADNSLEHYLNNIEDLFKSGKISKTKYNKLKMAEQDIPDGFIERDLRNTQYIAKKALSMLNEISHRVVATSGSVTDKLREDWQLIDVMKELNWEKYKALGLVEYFEDRDGRQIGRIKDWTKRNDHRHHAMDALTVAFTKDVFIQYFNNKNASLDPNANEHAIKNKYFQNGRAIAPMPLREFRAEAKKHLENTLISIKAKNKVITGNINKTRKKGGVNKNMQQTPRGQLHLETIYGSGKQYLTKEEKVNASFDMRKIGTVSKSAYRDALLKRLYENDNDPKKAFAGKNSLDKQPIWLDKEQMRKVPEKVKIVTLEAIYTIRKEISPDLKVDKVIDVGVRKILIDRLNEYGNDAKKAFSNLDKNPIWLNKEKGISIKRVTISGISNAQSLHVKKDKDGKPILDENGRNIPVDFVNTGNNHHVAVYYRPVIDKRGQLVVDEAGNPKYELEEVVVSFFEAVTRANLGLPIIDKDYKTTEGWQFLFSMKQNEYFVFPNEKTGFNPKEIDLLDVENYGLISPNLFRVQKFSLKNYVFRHHLETTIKDTSSILRGITWIDFRSSKGLDTIVKVRVNHIGQIVSVGEY

SEQ ID NO: 17550 - protein, 1177 aa, unidentified
  REGION 1..1177: note = Cas Enzyme sequence
LEGIYSKRKRDEAKRENLQWRVNGLKEKLSLEQLVIVFQEMNTQINNSSGYLGAISDRSKELYFNKQTVGQYQMEMLDKNPNASLRNMVFYRQDYLDEFNMLWEKQAVYHKELTEELKKEIRDIIIFYQRRLKSQKGLIGFCEFESRQIEVDIDGKKKIKTVGNRVISRSSPLFQEFKIWQILNNIEVTVVGKKRKRRKLKENYSALFEELNDAEQLELNGSRRLCQEEKELLAQELFIRDKMTKSEVLKLLFDNPQELDLNFKTIDGNKTGYALFQAYSKMIEMSGHEPVDFKKPVEKVVEYIKAVFDLLNWNTDILGFNSNEELDNQPYYKLWHLLYSFEGDNTPTGNGRLIQKMTELYGFEKEYATILANVSFQDDYGSLSAKAIHKILPHLKEGNRYDVACVYAGYRHSESSLTREEIANKVLKDRLMLLPKNSLHNPVVEKILNQMVNVINVIIDIYGKPDEIRVELARELKKNAKEREELTKSIAQTTKAHEEYKTLLQTEFGLTNVSRTDILRYKLYKELESCGYKTLYSNTYISREKLFSKEFDIEHIIPQARLFDDSFSNKTLEARSVNIEKGNKTAYDFVKEKFGESGADNSLEHYLNNIEDLFKSGKISKTKYNKLKMAEQDIPDGFIERDLRNTQYIAKKALSMLNEISHRVVATSGSVTDKLREDWQLIDVMKELNWEKYKALGLVEYFEDRDGRQIGRIKDWTKRNDHRHHAMDALTVAFTKDVFIQYFNNKNASLDPNANEHAIKNKYFQNGRAIAPMPLREFRAEAKKHLENTLISIKAKNKVITGNINKTRKKGGVNKNMQQTPRGQLHLETIYGSGKQYLTKEEKVNASFDMRKIGTVSKSAYRDALLKRLYENDNDPKKAFAGKNSLDKQPIWLDKEQMRKVPEKVKIVTLEAIYTIRKEISPDLKVDKVIDVGVRKILIDRLNEYGNDAKKAFSNLDKNPIWLNKEKGISIKRVTISGISNAQSLHVKKDKDGKPILDENGRNIPVDFVNTGNNHHVAVYYRPVIDKRGQLVVDEAGNPKYELEEVVVSFFEAVTRANLGLPIIDKDYKTTEGWQFLFSMKQNEYFVFPNEKTGFNPKEIDLLDVENYGLISPNLFRVQKFSLKNYVFRHHLETTIKDTSSILRGITWIDFRSSKGLDTIVKVRVNHIGQIVSVGEY

SEQ ID NO: 17551 - protein, 1436 aa, unidentified
  REGION 1..1436: note = Cas Enzyme sequence
MKRILGLDLGTNSIGWALVNEAENKDERSSIVKLGVRVNPLTVDELTNFEKGKSITTNADRTLKRGMRRNLQRYKLRRETLTEVLKEHKLITEDTILSENGNRTTFETYRLRAKAVTEEISLEEFARVLLMINKKRGYKSSRKAKGVEEGTLIDGMDIARELYNNNLTPGELCLQLLDAGKKFLPDFYRSDLQNELDRIWEKQKEYYPEILTDVLKEELRGKKRDAVWAICAKYFVWKETYTEWNKEKGKTEQQEREHKLEGIYSKRKRDEAKRENLQWRVNGLKEKLSLEQLVIVFQEMNTQINNSSGYLGAISDRSKELYFNKQTVGQYQMEMLDKNPNASLRNMVFYRQDYLDEFNMLWEKQAVYHKELTEELKKEIRDIIIFYQRRLKSQKGLIGFCEFESRQIEVDIDGKKKIKTVGNRVISRSSPLFQEFKIWQILNNIEVTVVGKKRKRRKLKENYSAIFEELNDAEQLELNGSRRLCQEEKELLAQELFVRDKMTKSEVLKLLFDNPQELDLNFKTIDGNKTGYALFQAYSKMIEMSGHEPVDFKKPVEKVVEYIKAVFDLLNWNTDILGFNSNEELDNQSYYKLWHLLYSFEGDNTPTGNGRLIQKMTELYGFEKEYATILANVSFQDDYGSLSAKAIHKILPHLKEGNRYDVACVYAGYRHSESSLTREEIANKVLKDRLMLLPKNSLHNPVVEKILNQMVNVINVIIDIYGKPDEIRVELARELKKNAKEREELTKSIAQTTKANEEYKTLLQTEFGLTNVSRTDILRYKLYKELESCGYKTLYSNTYISREKLFSKEFDIEHIIPQARLFDDSFSNKTLEARSVNIEKGNKTAYDFVKEKFGESGADNSLEHYLNNIEDLFKSGKISKTKYNKLKMAEQDIPDGFIERDLRNTQYIAKKALSMLNEISHRVVATSGSVTDKLREDWQLIDVMKELNWEKYKALGLVEYFEDRDGRQIGRIKDWTKRNDHRHHAMDALTVAFTKDVFIQYFNNKNASLDPNANEHAIKNKYFQNGRAIAPMPLREFRAEAKKHLENTLISIKAKNKVITGNINKTRKKGGVNKNMQQTPRGQLHLETIYGSGKQYLTKEEKVNASFDMRKIETVSKSAYRDALLKRLYENDNDPKKAFAGKNSLDKQPIWLDKEQMRKVPEKVKIVTLEAIYTIRKEISPDLKVDKVIDVGVRKILIDRLNEYGNDAKKAFSNLDKNPIWLNKEKGISIKRVTISGISNAQSLHVKKDKDGKPILDENGRNIPVDFVNTGNNHHVAVYYRPVIDKRGQLVVDEAGNPKYELEEVVVSFFEAVTRANLGLPIIDKDYKTTEGWQFLFSMKQNEYFVFPNEKIGFNPKEIDLLDVENYGLISPNLFRVQKFSLKNYVFRHHLETTIKDTSSILRGITWIDFRSSKGLDTIVKVRVNHIGQIVSVGEY

SEQ ID NO: 17552 - protein, 1091 aa, unidentified
  REGION 1..1091: note = Cas Enzyme sequence
MKRILGLDLGTNSIGWALVNEAENKDERSSIVKLGVRVNPLTVDELTNFEKGKSITTNADRTLKRGMRRNLQRYKLRRETLTEVLKEHKLITEDTILSENGNRTTFETYRLRAKAVTEEISLEEFARVLLMINKKRGYKSSRKAKGVEEGTLIDGMDIARELYNNNLTPGELCLQLLDAGKKFLPDFYRSDLQNELDRIWEKQKEYYPEILTDVLKEELRGKKRDAVWAICAKYFVWKENYTEWNKEKGKTEQQEREHKLEGIYSKRKRDEAKRENLQWRVNGLKEKLSLEQLVIVFQEMNTQINNSSGYLGAISDRSKELYFNKQTVGQYQMEMLDKNPNASLRNMVFYRQDYLDEFNMLWEKQAVYHKELTEELKKEIRDIIIFYQRRLKSQKGLIGFCEFESRQIEVDIDGKKKIKTVGNRVISRSSPLFQEFKIWQILNNIEVTVVGKKRKRRKLKENYSALFEELNDAEQLELNGSRRLCQEEKELLAQELFIRDKMTKSEVLKLLFDNPQELDLNFKTIDGNKTGYALFQAYSKMIEMSGHEPVDFKKPVEKVVEYIKAVFDLLNWNTDILGFNSNEELDNQPYYKLWHLLYSFEGDNTPTGNGRLIQKMTELYGFEKEYATILANVSFQDDYGSLSAKAIHKILPHLKEGNRYDVACVYAGYRHSESSLTREEIANKVLKDRLMLLPKNSLHNPVVEKILNQMVNVINVIIDIYGKPDEIRVELARELKKNAKEREELTKSIAQTTKAHEEYKTLLQTEFGLTNVSRTDILRYKLYKELESCGYKTLYSNTYISREKLFSKEFDIEHIIPQARLFDDSFSNKTLEARSVNIEKGNKTAYDFVKEKFGESGADNSLEHYLNNIEDLFKSGKISKTKYNKLKMAEQDIPDGFIERDLRNTQYIAKKALSMLNEISHRVVATSGSVTDKLREDWQLIDVMKELNWEKYKALGLVEYFEDRDGRQIGRIKDWTKRNDHRHHAMDALTVAFTKDVFIQYFNNKNASLDPNANEHAIKNKYFQNGRAIAPMPLREFRAEAKKHLENTLISIKAKNKVITGNINKTRKKGGVNKNMQQNTTWAVAFRNNLW

SEQ ID NO: 17553 - protein, 1235 aa, unidentified
  REGION 1..1235: note = Cas Enzyme sequence
KQKEYYPEILTDVLKEELRGKKRDAVWAICAKYFVWKENYTEWNKEKGKTEQQEREHKLEGIYSKRKRDEAKRENLQWRVNGLKEKLSLEQLVIVFQEMNTQINNSSGYLGAISDRSKELYFNKQTVGQYQMEMLDKNPNASLRNMVFYRQDYLDEFNMLWEKQAVYHKELTEELKKEIRDIIIFYQRRLKSQKGLIGFCEFESRQIEVDIDGKKKIKTVGNRVISRSSPLFQEFKIWQILNNIEVTVVGKKRKRRKLKENYSALFEELNDAEQLELNGSRRLCQEEKELLAQELFIRDKMTKSEVLKLLFDNPQELDLNFKTIDGNKTGYALFQAYSKMIEMSGHEPVDFKKPVEKVVEYIKAVFDLLNWNTDILGFNSNEELDNQPYYKLWHLLYSFEGDNTPTGNGRLIQKMTELYGFEKEYATILANVSFQDDYGSLSAKAIHKILPHLKEGNRYDVACVYAGYRHSESSLTREEIANKVLKDRLMLLPKNSLHNPVVEKILNQMVNVINVIIDIYGKPDEIRVELARELKKNAKEREELTKSIAQTTKAHEEYKTLLQTEFGLTNVSRTDILRYKLYKELESCGYKTLYSNTYISREKLFSKEFDIEHIIPQARLFDDSFSNKTLEARSVNIEKGNKTAYDFVKEKFGESGADNSLEHYLNNIEDLFKSGKISKTKYNNLKISDQVIPSCFIERYLRNTQYIAKKALSMLNEISHRVVATSGSVTDKLREDWQLIDVMKELNWEKYKALGLVEYFEDRDGRQIGRIKDWTKRNDHRHHAMDALTVAFTKDVFIQYFNNKNASLDPNANEHAIKNKYFQNGRAIAPMPLREFRAEAKKHLENTLISIKAKNKVITGNINKTRKKGGVNKNMQQTPRGQLHLETIYGSGKQYLTKEEKVNASFDMRKIGTVSKSAYRDALLKRLYENDNDPKKAFAGKNSLDKQPIWLDKEQMRKVPEKVKIVTLEAIYTIRKEISPDLKVDKVIDVGVRKILIDRLNEYGNDAKKAFSNLDKNPIWLNKEKGISIKRVTISGISNAQSLHVKKDKDGKPILDENGRNIPVDFVNTGNNHHVAVYYRPVIDKRGQLVVDEAGNPKYELEEVVVSFFEAVTRANLGLPIIDKDYKTTEGWQFLFSMKQNEYFVFPNEKTGFNPKEIDLLDVENYGLISPNLFRVQKFSLKNYVFRHHLETTIKDTSSILRGITWIDFRSSKGLDTIVKVRVNHIGQIVSVGEY

SEQ ID NO: 17554 - protein, 1036 aa, unidentified
  REGION 1..1036: note = Cas Enzyme sequence
LQGEDDYVKLFDWLNDRKDIDQKTILTYKPFGLKKNELPKYRWNYVEDKSYPCNETRADIISRLNKAGVPEEFLTREKEEALWHILYSISDKKKLTKALGTFAEKNGLNETFVEIFSKMPPFESDYASYSLKAIRKLLALMRMGKYWDERAIDEQTRSRIEKILTGEYDETIRTRVREKAMHLTDMSSFRGLPLWLACYVVYDRHSEAKELVKWETPDDIDHFLHKFKQHSLRNPIVEQVIMETLRTVRDIWRQEGRIDEIHVELGREMKNPAKERARITAQVLENENTNLRIKALLTEFMNPEFEIENVRPYSPAQQEILRIYEEGVLSGVAEKDLPDDIASILKKFRENDVKKRPTTSEVLRYKLWLEQRYRSPYTGRIIPLGKLFTPAYEIEHVIPQSRYFDDSFTNKVICESAVNKLKDNCLGYEFIKKHSGEKVELGNGETATIFSVEEYERFVKDSYLGNSKKMKKLLLEDIPDNFIERQLNDSRYISKVVKSLLSNIVCEEDEQEGMSKNVIVCTGGVTDRLKKDWGVQDVWNRIILPRFLRLNKITDSTDFTSVSTNGHLLPAVPLHLQKGFNKKRIDHRHHAMDAIVIACAGRNIVNYLNNASARKGSEISRYDLQHLLCDKVKTDTNGNYKWILRKPWKTFTQDVYAALTNIVVSFKQNLRVINRTTNHYQHYNEDGEKKMIPQTKGDRWAIRKPMHKDTVYGEVNLRKEKTLPLKDVLNNPSIVVDKSLKNKLYELLKSQYDLKAITKYFETHQDVWADVNLKKIKVYYFTKETNERFFATRKSLDSSFNQKKIEEEVTDTGIQKILLRHLQQNGNNPDIAFSPDGVERMNQNMTILNNGKWHQPIYKVRTYEKADKFAVGESGNKVKKFVEAAKGTNLFFAVYESIQEDEATGKQVRKRTFATIPLNEVIKRKKQGLPVAPEDSKGNLPIFVLSPNDLVYLPTEEECNTGKIIQPLARERIYKMVSCTEGECHCIPEYVASPILQTIELGSNNKAQRAWSGEMIKEICVPVKVDRLGNVSLVKI

SEQ ID NO: 17555 - protein, 1511 aa, unidentified
  REGION 1..1511: note = Cas Enzyme sequence
MKKVTLGLDLGTNSVGWSVINSIITEQSEKIWLEMAGSRIIPMDAAILGDFDRGNTTSQTAERTRLRGIRRLRERCLLRRERLHKVLHILEFLPEHYSEQISWDKHPGQFMNLTEPKLAWKRSDTGKYEFIFQAAFNEMLADFAQHQPTLVANGKKVPYDWTIYYLRKKALTEKITQQELAWIILNFNQKRGYYQLRGEEEEEKSNKQVEYYALKVVCVEATDEKKGKDTWYNVHLENGWIYRRSSNVPLDWEGKIKEFIVTTDLNEDGTPKVDKQGEVKRSFRAPKEDDWTLIKKKTEADVADSRKTVGWYIYDILLQKPQQKIRGKLVRTIERKFYKEELKQILEKQSVFHTELQDRDLYKKCLECLYPQNDAHKRNIANRDFVYMFTEDILFYQRPLKSKKSLIDDCPYEKNEYVDKETGEIKHASLKCIAKSHPLFQEFRLWHFLSNIRIYQKERQQGDRLLTDVDVTSEFLNTEEDCVALFEWLNERKEIDQKNFLKYPQFNLKNKAVNYRWNYVEDKMYPCNETRYLIKSRLDKAHVFSGDFILSAENEMALWHILYSVSDKVELEKALATFATKHALDKVAFVETFKKAPPFEKEYGAYSAKAIKKLLPLMRMGKYWSADAIDETTRERIDKIVTGEYDEKIHNKVHEKSIHLQSVDDFRGLPLWLVCYVVYGRHSEVKDIAKWETPSDIDAYLKAFKQHSLRNPIVEQIIVETLRVVRDIWKRVGTIDEIHVELGREMKNTAKDRAKMTMQVLENENANLRIKALLTEFVNPEYNIENVRPYSPSQQELLRIYEDGILNYVADIPEDIENFLKKLKDSKSPSKSEFMRYKLWLEQKYRSPYTGEIIPLAKLFTPAYEIEHIIPQSRFFDDSFSNKVICESEVNKLKDKYLGYEFIKEHHGRKVELNFGKVVTIFSVEAYEQFVKEHYSKSRAKMKKLLMDDIPEEFIKRQLNDSRYISKVIKTLLSNVVREKDKDGEYEQEAISKNVVVCTGSVTDRLKKDWGLNDVWNSIVSSRFERLNQLKDTQCFGHWECKDGKRFFQIELPLELQKGFSKKRIDHRHHAMDAIVIACASRNHINYLNNESARKDAEITRRDLQRLLCDKYKTDDNGNYKWMIKKPWDTFTQDVQAVLNDIVVSFKQNIRVINKSTNYYQSYDEKGKKTLLAQTKGDNWAIRKPMHKDTVFGRVNLRKVKEVRLSVALDTPEMIVDKKLKAKILQLFSYNYDKKRVEKYFKENTALWKDLNLTKIAIYYFTDNSSEPLVAVRKALDTSFTEKKIIESITDTGIQKILLKHLESKEGKADLAFSPDGIDEMNRNLEFLNNGKPHQPIYKVRVYEPRGNKYSVGETGQKSTKFVEAAKGTNLFFAVYAMGDGKRVYETIPLNIVIEREKQGYTPVPEKNEAGNKLLFWLSPNDLVYVPTEEELERGRIEEPIDRKRIYKVVSFTGNRLYGVPYAIANMIVDKVEYFSLNKVEITDSKESIKEKCIPLKVDRLGNIIKIGTLK

SEQ ID NO: 17556 - protein, 1432 aa, unidentified
  REGION 1..1432: note = Cas Enzyme sequence
MKRILGLDLGTSSIGWALVNESERAEEISSIVQLGVRVNPLTVDEMQNFEKGKSITTNADRTLKRSMRRNLQRYKLRRDVLIKLLKKVGFITDKAILSEQGNRTTFETYRLRAKAAEEEISLEELARVLLMINKKRGYKSSRKAKGEEDGSLIDGMEIAKKLYDEDLTPGQLCLQLLESGKKTFPDFYRSDLQDEFDRIWNFQKQFNPQSFCDTAKEEVKGKNKSQTWAILAKYFTWTKEVSVWNENEAKTENQEKEYRLVGLKRTVKGEELKKENYCWRVQALTERLDLEEIAVVLQEINGQISASSGYLGAISDRSKVLYFNHQTVGQYQMAELNKNPNMSLRNMVFYRQDYLDEFNAIWEKQAEFHKELTPELKKGIRDVIIFYQRRLKSQKGLIGFCEFENREIIVEKNGKTQTKIIGCKVIPRSHPLFQEFKIWQTLNNIEVFVGERKRKRKQTNVSSDLFDDTEDVLVTKGRRFLYQEEKEILAKELSIKENLKKAEVLKLLFENPQELDMNFKQIDGNRTGFALFSAYGRMIEKYGYEPLDFKKPADEIINQLKAVFSDLGWNTDLLSIGLDKEGKELEMQPYFRLWHLLYSFEGDNTPAGNGKLIEKIMQLCRVEKEYAIELANISFQDDYGSLSAKAIKKILPYLKEGNQYDVACEYAGYRHSKSSLTKEEIENKALKDKLDILPKNSLRNPVVEKILNQMVNVVNAVIDAYGRPDEIRVELARELKKSAKEREELTKAIAKNTREHDEIRKLLQSEFGMIHVSRNDIIRYKLYEELKENGYKTLYSNQYIPKEKLFSKEIDIEHIIPQARLFDDSLSNKTLEYKAINIEKGNKTAYDFVKDKYGEEGLQEYLNRCETVCNDKKAKLRKLKMQQNDIPDGFIDRDLRNTQYIAKKALSMLKDICRRVVATTGSITDKLREDWQLVDVMKELNLPKYEALGLVERFEDKDGRIIKRIKDWTKRNDHRHHAMDALTVAFTKDVFIQYFNNKNAAWESDCKEHANIIGIKTRYFESGRAVPPMPLGQFRVEAKSHLENLLVSIKAKNKVVTTNVNCIRKKGGISEKHQQTPRGQLHLETIYGSHKQYVTKMEKVNASFDAAKIATVSRQNYRNALLRRLEAFGNDPKKAFTGKNTLEKNPVYLDRAQTMRMPDRVQTVEFEAVYTIRKPIDSNLNVEKVVDAKVRAILEQRLEEYGGDAKKAFVNLDENPIWLNQEKGISIKRVSIRGINNAQSLHVKKDKNGNPILDENGKQIPVDFVNTGNNHHVAIYRKPVLDKKGQVMFDEDGNLMYELDEVVVSFFEAVTRANLGLPIINKDYRRSEGWQFLFSMKQNEYFVFPNEKTGFNPKEIDLLDPDNYAVISPNLFRVQKFSTKNYCFRHHLETDVQERKALLGITYKWQLGLKAIKDIVKVRINHIGQIVSVGEY

SEQ ID NO: 17557 - protein, 1438 aa, unidentified
  REGION 1..1438: note = Cas Enzyme sequence
MIVYRLFYRFLFKVTKLVNFVIHKELKRQIARTGKIKFHSGGCGCQSGNYKMQNFEKGKSITTNADRTLKRSMRRNLQRYKLRRDVLIKLLKKVGFITDKTILSEQGNRTTFETYRLRAKAAEEEISLEELARVLLMINKKRGYKSSRKAKGEEDGSLIDGMEIAKKLYDEDLTPGQLCLQLLESGKKTFPDFYRSDLQDEFDRIWNFQKQFNPQSFCDTAKEEVKGKNKSQTWAILAKYFTWTKEVSVWNENEAKTENQEKEYRLVGLKRTVKGEELKKENYCWRVQALTERLDLEEIAVVLQEINGQISASSGYLGAISDRSKVLYFNHQTVGQYQMAELNKNPNMSLRNMVFYRQDYLDEFNAIWEKQAEFHKELTPELKKGIRDVIIFYQRRLKSQKGLIGFCEFENREIIVEKNGKTQTKIIGCKVIPRSHPLFQEFKIWQTLNNIEVFVGERKRKRKQTNVSSDLFDDTEDVLVTKGRRFLYQEEKEILAKELSIKENLKKAEVLKLLFENPQELDMNFKQIDGNRTGFALFSAYGRMIEKYGYEPLDFKKPADEIINQLKAVFSDLGWNTDLLSIGLDKEGKELEMQPYFRLWHLLYSFEGDNTPAGNGKLIEKIMQLCRVEKEYAIELANISFQDDYGSLSAKAIKKILPYLKEGNQYDVACEYAGYRHSKSSLTKEEIENKALKDKLDILPKNSLRNPVVEKILNQMVNVVNAVIDAYGRPDEIRVELARELKKSAKEREELTKAIAKNTREHDEIRKLLQSEFGMIHVSRNDIIRYKLYEELKENGYKTLYSNQYIPKEKLFSKEIDIEHIIPQARLFDDSLSNKTLEYKAINIEKGNKTAYDFVKDKYGEEGLQEYLNRCETVCNDKKAKLRKLKMQQNDIPDGFIDRDLRNTQYIAKKALSMLKDICRRVVATTGSITDKLREDWQLVDVMKELNLPKYEALGLVERFEDKDGRIIKRIKDWTKRNDHRHHAMDALTVAFTKDVFIQYFNNKNAAWESDCKEHANIIGIKTRYFESGRAVPPMPLGQFRVEAKSHLENLLVSIKAKNKVVTTNVNCIRKKGGISEKHQQTPRGQLHLETIYGSHKQYVTKMEKVNASFDVAKIATVSRQNYRNALLRRLEAFGNDPKKAFTGKNTLEKNPVYLDRAQTMRMPDRVQTVEFEAVYTIRKPIDSNLNVEKVVDAKVRAILEQRLEEYGGDAKKAFVNLDENPIWLNQEKGISIKRVSIRGINNAQSLHVKKDKNGNPILDENGKQIPVDFVNTGNNHHVAIYRKPVLDKKGQVMFDEDGNLMYELDEVVVSFFEAVTRANLGLPIINKDYRRSEGWQFLFSMKQNEYFVFPNEKTGFNPKEIDLLDPDNYAVISPNLFRVQKFSTKNYCFRHHLETDVQERKALLGITYKWQLGLKAIKDIVKVRINHIGQIVSVGEY

SEQ ID NO: 17558 - protein, 1421 aa, unidentified
  REGION 1..1421: note = Cas Enzyme sequence
VNFVIHKELKRQIARTGKIKFHPGGCGCQSGNYKMQNFEKGKSITTNADRTLKRSMRRNLQRYKLRRDVLIKLLKKVGFITDKAILSEQGNRTTFETYRLRAKAAEEEISLEELARVLLMINKKRGYKSSRKAKGEEDGSLIDGMEIAKKLYDEDLTPGQLCLQLLESGKKTFPDFYRSDLQDEFDRIWNFQKQFNPQSFCDTAKEEVKGKNKSQTWAILAKYFTWTKEVSVWNENEAKTENQEKEYRLVGLKRTVKGEELKKENYCWRVQALTERLDLEEIAVVLQEINGQISASSGYLGAISDRSKVLYFNHQTVGQYQMAELNKNPNMSLRNMVFYRQDYLDEFNAIWEKQAEFHKELTPELKKGIRDVIIFYQRRLKSQKGLIGFCEFENREIIVEKNGKTQTKIIGCKVIPRSHPLFQEFKIWQTLNNIEVFVGERKRKRKQTNVSSDLFDDTEDVLVTKGRRFLYQEEKEILAKELSIKENLKKAEVLKLLFENPQELDMNFKQIDGNRTGFALFSAYGRMIEKYGYEPLDFKKPADEIINQLKAVFSDLGWNTDLLSIGLDKEGKELEMQPYFRLWHLLYSFEGDNTPAGNGKLIEKIMQLCRVEKEYAIELANISFQDDYGSLSAKAIKKILPYLKEGNQYDVACEYAGYRHSKSSLTKEEIENKALKDKLDILPKNSLRNPVVEKILNQMVNVVNAVIDAYGRPDEIRVELARELKKSAKEREELTKAIAKNTREHDEIRKLLQSEFGMIHVSRNDIIRYKLYEELKENGYKTLYSNQYIPKEKLFSKEIDIEHIIPQARLFDDSLSNKTLEYKAINIEKGNKTAYDFVKDKYGEEGLQEYLNRCETVCNDKKAKLRKLKMQQNDIPDGFIDRDLRNTQYIAKKALSMLKDICRRVVATTGSITDKLREDWQLVDVMKELNLPKYEALGLVERFEDKDGRIIKRIKDWTKRNDHRHHAMDALTVAFTKDVFIQYFNNKNAAWESDCKEHANIIGIKTRYFESGRAVPPMPLGQFRVEAKSHLENLLVSIKAKNKVVTTNVNCIRKKGGISEKHQQTPRGQLHLETIYGSHKQYVTKMEKVNASFDAAKIATVSRQNYRNALLRRLEAFGNDPKKAFTGKNTLEKNPVYLDRAQTMRMPDRVQTVEFEAVYTIRKPIDSNLNVEKVVDAKVRAILEQRLEEYGGDAKKAFVNLDENPIWLNQEKGISIKRVSIRGINNAQSLHVKKDKNGNPILDENGKQIPVDFVNTGNNHHVAIYRKPVLDKKGQVMFDEDGNLMYELDEVVVSFFEAVTRANLGLPIINKDYRRSEGWQFLFSMKQNEYFVFPNEKTGFNPKEIDLLDPDNYAVISPNLFRVQKFSTKNYCFRHHLETDVQERKALLGITYKWQLGLKAIKDIVKVRINHIGQIVSVGEY

SEQ ID NO: 17559 - protein, 1521 aa, unidentified
  REGION 1..1521: note = Cas Enzyme sequence
MTKNTRNIIGLDLGTNSIGWSWIQQLISPTPTQPSEYLFDGTPIIRMSGSRIIPMPGDVTGSFERGETISKTKDRTAKRMARRMNERFQLRRERLNRVLNIMSFLPEHYARALDRYGKLNEESDTTIAWRSKEDGKNEFIFYPSFLEMASIFKEHHPDIQRIPLDWTLYYLRSKALHQAITKEELSWVLHSFNQKRGYYQSREDITEEDKTKKVEYIKGVVNSVEDTGEKAKGKKIYKVTFADGTEFTSTKSEAPLWIGRTREIIVTTSLDTSGKPKLDKEGKIIQSAKTPDEKDWTLIKIRTEATIDDSKLTVGEYIFHALLKNPETKIKGAHVSTIDRRFYINEINAILKEQEKYHKELRDKSLYEQCIKALYAQNEVRRNIIAPWSMSDLLIKDILFYHRPLKSKKSQISECPLEFHCYTDKDGETHRQGIKCIPVSHPLFQEYRIWQFISNLRIYEREHFDNGKHFTNVDKTSEFLTSEKKEELYEWLAERDSVNQKTLLGHLGLKVERYHWNFPEEKTYPCGETRHLIQSRLKKANLQKAFHSLISDEQKDCFERGLWHILYSVSDYNELCKALKTFARKTGFKLEEQLLFVEAFSSCPPFKKDYGAYSKRAITKLLPLMRIGKFWHEESIYSTTKNRIEHLISGEECSGIDVRVREKVAKAGLCESIEQYQGLQQWLANYVVYNRHSEASEITKWESPDELDNYIRSFKQYSLRNPIVEQVSLETLRVVRDLWAELQKEGQTIDEIHLEMGRDLKNTAEERSRIFRRNNENEDTNFRIKLLLEEFNANEKDIIDVRPYSPSQQELLRIYEEGVWQQEKDIPQDIKDIKKRISNDKDIKDITPNDIQRYRIWMDQKYCSPYTGKTIPLSRLFTTDYEIEHVIPRSRYFDDSYNNKVICEAAVNKDKNNRLGMEYIMAAGGKTIELGNGKNVQILKEEEYVELVDKIFGNNTRKRNIMLTDEITEDFSHRQLNDTRYIARFMKGILSNIVREKNADGTLEPEETSKNLIVCSGRITDRVKQDWGLNDIWNHIITPRFERLNKKTSSNDFGEYVCKEGKRYFQTRVPLNLQKGFNKKRIDHRHHAMDAIAIACVNRSIVNYLNNAAANQTEREDLRRAVCIPERNGQTKRQLRSPWPCFARDAENALQQIVVSFKQNLRVATKATNSYECFDTASGKKIRKHQSNREHYAIRKPLHKDSVYGEVILTSIASVNLKKALLKAERILDKRLKEKIFELRKLYNYSNKQIEEHLTKVCINCPEWKNYDFKKIAVRILSNDADATHIVAIRKPLDETFDKEKIKTITDTGIQKILKNHLSRYADDPKKAFSPEGIEDMNANIASLNGGKQHLPIYKVRVSEKDNGGYFPIGQKGNRPKKYVTTAKDTNLFFAVYADSKGKRSYNTIDLRTAIECRKQGLSVAPSINEKGDKLLFTLSPNDLVYMPSEGEEANGFAIDNNLNKEQIYKMVSATNNRCFFIPHTVADFISRGQEYNSVNKIELTEDGRSIKEHCVPLKVNRLGK

SEQ ID NO: 17560 - protein, 1393 aa, unidentified
  REGION 1..1393: note = Cas Enzyme sequence
VQYINYSNKIEEKMKKILGLDLGTTSIGWAMVNEAENENEKSEIIKLGVRVIPITTDEVGDFLKGKATSINADRTLKRGARRNLNRFQLRRNALIKILKTQNIISNFTLLNEEGKQSTFDTYKLRAKAAQEQISKDELAKVFLMINKKRGYKSSRKAKTEDEGIAIDGMAIAKELYANNYTPGQIVFQLLTNGKKYIPDFYRSDLQNELQKIWDYHLQFYPDILTNKFFEQLKNKGKQATSKIFLGKYGIFTFENKGKRDEVKLHSYKLRSEGINKQLSKEELAYVIAEINNNIYSSSGYLGAISDRSKELFFNKQTVGEYLYSQLEKNKHSRLKNQVFYRQDYLDEFNTIWETQKQFHPELTEALKSEIRDVIIFYQRKLKSQKGLLSFCEFESKEEEYFDKVENKLKKRIIGPKVISRSSPLFQEFKIWQILNNIRLTDKTTGEYGSLSDEMKLQAFERLNIVHKLSANDFLKIIVDNPKDFEINYESVEGNKTNVELFNAYQKILELEGVDLDFSKLEVSEIIETIKSKFQKLNISTEILFFNSEIDGNDFDKQPIMQLWHLLYSIEDDKKLIEIIEQKFGFNKEYAKLIANISLQDDYGNLSSRAIRKILPDLREGNSYDAACTLAGYNHSNSLNREQLANRVLKDKLELLPKNSLRNPVVEKILNQMVNVINAIIEDETLGKPDEIRIELARELKKSADERKKMTDGIRTSTAENEVIKKLLQSDFCINKVTRNDIIRYKLWKELENNGYKTLYTNTYIPKEKVFSKEFDIEHIIPQAKLFDDSFSNKTLTKREINIEKGNDTAYDYLKNKLNESDFNQYLSRIERLYKNGNINKAKYNKLKMKSADIPEGFIDRDLRNSQYIAKKAKQMLEEVVRRVNTTTGSITSRLREDWQLINVMKEINLPKYEMLGLVNTIQGKNGQQEKIIVDWSKRNDHRHHAMDALTVAFTSYSHVQYLNNLKARGNKRHEKYHEVYGIEQKYLYRDDKNKLLFIPPMPLKEFREDAKKHIESILISFKAKNKVVTRNKNKIKIKGRDNYKEHIELTPRGQLHNETVYGQIKQYETKEEKVGVKFDLPKIKLVAKQQFREALLIRLAQFGGDPKVAFGGDNAPSKNPIYIDLNNKIVLPEKVKLVSQSSQFTIRKEVSPDLKLEKVIDVGVRRILQNRLDEFGGEPKKAFVNLDENPIWFNEDKGFSIKRVTITGVSNAQALHNKKDHSGNLILDKNGNTQPVDFVSTSNNHHVAIYRDEEGNLQDDVVSFYEAVQRANNGLPLVDKNKNGWDFLFTMKQNEYFVFPSFDFNPDEIDLFNSTNSDIISPHLFRVQTLSKVVYGNNAIRDFVFRHHLETNVDKKTILKGITYHPIKSLNNLEGIIKVRINHLGKIVKVGEE

SEQ ID NO: 17561 - protein, 1235 aa, unidentified
  REGION 1..1235: note = Cas Enzyme sequence
MKKILGLDLGVASIGWALVEEENGIVTIVALGSRIIPYDSTEGQDFVKGTGESRNAQRTKARTIRKGYDRYQLRRKFLVETLVKNKMMPNEALKNAPKMHLWELRNKAVTENISKQELGRLLLWFNQKRGYKSGRRDINLDKKDTDYVKEVKSRFDKIKDLKVTIGQYFYEELKKNEYFRVKENVFPREAYMEEFDVICARQKEHLGLTDELISKIRNEIIYYQRPLKSQKGLVAICEFEGFWVKKDGKEFFVGPKVAPKSSPLFQLSKMWENINNIKLSSKFGEIVELTQEEKQKVFEHLDNNEKLTATDLFRILKKSKREYTITKQLEKGIQGNITKNAITKILDKNGKYKDLLRFDLNTVETDKLCYLYARDTGEILGEKRLKYTDAVVEYEPFYQLWHTIYSIDDLQECSAALQKRFGIDVETADKLAAIDFNKYAFGNKSVKAIRKILPYLMEGDRYSEAMSYAGYNHSNSLTKDENFDRKLLDKLKLIDKNSLRQPIVEKILNQMIHVVNAVIDEYGRPDEIRIELARELKQGKEERNDADKAMSKRQRENENIKKRLAEYGLRATRNNIIKWRLYEEINNQDKKLNAICIYCGQPISVTEAIKGEDVDVEHIIPKAKLFDDSQSNKTLAHRHCNSNKRDMTAYDFMKTKTQQEFSAYVERVNKLFADKIISKTKRDKLLMSEDKIPSDFIDRQLRESQYIAKKAREILQTICYNVWSTTGTITAELRHLWGWDDVIMNLQMPKYKDLGLTEIVEWVSEHGKRIHSKEVITDWTKRDDHRHHAVDALTIACTKQIFIQRFNTLSASKTREDMQWEIEKRSKQYKEKLSLLEKYIISQCPIAISDVEKAVAEVLVSFKSGKKVAVIGKRKVGKRGNKQVVQKGIVVPRGALSEASVYGKIRMIEKNKSVKYLFENSSLIFKPYIKKLVEQRLAKFEGDSKKALASLKEEPIYLDAERSKILEYGTCFKEEVVIKYSVDTNFNKTDDVIDGKTKEILQNRLNKFGGKPKEAFKDVKRGEKTLKWYEDEELEYPIHSVRCSTGLVAVVPIRKDENGNEIGFVKPGNNHHVAIYVDKEGNRLETVCTFWHAVERKKYGFPTIIKNTNEVWDKVTSMKDDTYPQSFLDQLPSYNLELELSMQQNEMFILEMEGDDIKIAIESRDYRTISEHLYRVQKLGSNDYTFRHHLETNLINSDISKMSKRYFRVQSLKTLFSLKPFKVKIDYLGNIRTLQ

SEQ ID NO: 17562 - protein, 1432 aa, unidentified
  REGION 1..1432: note = Cas Enzyme sequence
MKRILGLDLGTNSIGWALVNESENSEEKSSIIQLGVRVNPLTVDELTNFEKGKSITTNADRTLKRSMRRNLQRYKLRRENLLEILKDHNIISDNTILSENGNKTTFETYRLRVKAVTEEITLEQFARVLLMINKKRGYKSSRKLKSQDEGQLIDGMEIAKKLYEENLTPGQFCLQLLNNGKKYLPDFYRSDLQTEFDKIWKKQKEFYPEILTDELKEELRGKKREVVWAICAKHFIWKEKHIEWNNEEGKNIEVEKEYKLVGIKRDGKKDEQNIENLLWRTQGILEQLSLEQLVIVFQEINAKIYNSSGYLGAISDRSKELFFNKQTVGQYQMAILDKNPNASLKNMMFYRQDYMDEFNTLWETQAKSHKELTYELKNEIRDVVIFYQRRLKSQKGLISFCEFESRKIEVEIDGKKKTKTIGSRVIPRSSPLFQEFKIWQVLNNIEVFGKGKKTKKQKGASLFDNIEDAVEYGGRRELYQEEKELLAAELSIKKELKKTDILKLLFDNPNELDLNFNSVQGNLTQNALLEAYKKIIEMSGHDIDILKKPAKDIIKSVEEVFNALGYNSDILYFDSIKEPDKQPMYQLWHLLYSFEGDNSNTGNENLINKLIANFGFNRDSASIIANVTFKNDYGSLSAKAIRKILPHLKEGNKYDVACEYAGYRHSKSSLTKDEIENKILKDRLEILPKNSLRNPVVEKILNQMINVINTIIDVYGKKDENGKIVEKPFDEIRIELARELKKNAKEREELTKSIAETTKLHEQYKVILSKPPFNLSYISRNDIIRYKLYEELKDNGYKTLYSNTYISPGAVFSGDFDVEHIIPQSRLFDDSFSNKTLELRSINIEKGNETAYDFVKEKYGEKGLEDYLNRIETMYKNGVFSRTKYNKLIMQGKDIPDGFIDRDIRDTQYIAKYAKNILEDLVKFVVSTTGSITDRLREDWQLVDVMKELNWDKYKNLDMTEEFTNEEGHRIRKIKDWTKRNDHRHHAMDALTVAFTKRNIIQYLNNLNAKSDKSSSIYGIEQNELYRNDKGKLLFNPPFALNEFRTEAKKHLDNTLISIKAKNKIVTQNINTTKKQAGINKKIQQTPRGQLHNETIYGCQKQYVIKEENVNAKFDETKILTITKPAYRDALLKRLQENGNDPKKAFTGKNSLSNNPIYLDKLNTKKVPEKVKTVTFETVYTIRKEVSSDLKTDKVIDVKIRRILEKRLEEYKNDAKIAFSNLDENPIWLNQEKGISIKRVTISGISNAESLHNKCDKDGNFILDENDNKQRIDFISTSNNHHVAIYSDADGNLQEKVVSFFEAVARANAGLQLIDKEYKRYEGWEFLFSMKKNEYFVFPNEKTGFNPKEVDLINPENYGLISPNLFIVKKLSTKNYVFNHHLETMAVTGETLKNKKQLSNITYHFIQSLLPIENIVKVRVNHIGQIVKIGEY

SEQ ID NO: 17563 - protein, 1152 aa, unidentified
  REGION 1..1152: note = Cas Enzyme sequence
LRAGGINALFNAIRPAGFDLPKPLNVSETSVNFMRNYQLEAPQNLENSRPQVMAEAWKDHPFYQNAVVLGLDIGLKGIGVCVRRGPEIVYARTWVFDVPKASRLEGRRANRAARHCRANRRVRLNRLKRLMAMHGLPWVEEESRAMRATDPFVLRHRAVTRQLASKEALSIAIRHCVAHRGYDYEYFSEEGEYPWGDSTEFKAVKNALHTLWLTASDARKALADAAEFEDWSSSQREEFHALVAQRTSGPEILEARLATHARENKKHLRLRAKGEAFPRKFVWEHLEKIIRRHAHLIENPEGFLEALAVKPVTPESRARAIFFFHRKTPEEMRAHFEKKRRRCNTSLWLGKGEQPIAKASDPEVRKFRVLEFLISRTIEVVRGRTRGNPGIRDFAKVPVLCAQSAIEMVEMEPGNRLKEAWKNLQKNIEEEVERAAGAVLAPVRGREKSEHNQAFWKQLQDLLVPKAASRKANASMSTAAARRLFEIATENGFEPEAVTSALGDYFRFRRQPQIDLDGVYPQIEFLLGQRVRKERSRGGKKRGDLANPGKLQRLWQDLSDRLGENEAPNYCVIEMARDVPRNAKERKEIEDRIKENEKRRQDLYDKYQLPADASGSARRRVELYEQQGGMCPFTGAQLGSPLNEELEIEHLFPRENGGLSMDENLVLTSRSVNNAKGCRTPREYAADCGIAFDTMLEHTRGMRWGRRKRELFAWDNPAQIPELGNTTRVAQLAKQLWGEMAEWMGIHQIEDPTERENERARRIGTPTGFMTAACRRAWGFPKKDRSDMTHHLVDATLLAFIPPQKGLSFTGSGGIFYPQLAPNGRRNGLGVLPLGPDPAEVARMSAPDAPECPIVHHRSGRPHRSIHDTTMCRVLPDGSLVQRTPVDRKKTSAEQLLTQLQHCGIPQNRVQKDGSKIPLIPSRAAIERWLNEETNEPLRLLDGTPVRTVWKRCKDNLKNDPIGLLAEVGPAGELSAVKVINEKWDRIEIWRGWDPEKKRWSFYKQIVPSKAVLAALEKMGLRWDQRPKKPWRPGAAEMEKSLKESIAGPLPPYARPAVHPVTGKPVVLRKGGQFLANLSVDGRLVKRGAPVASQKWVSLASVEKKSGGRVEIKDVFSGEKMKDTPSLVDDLAFLAGLPSADDSSSYPTQRRP

SEQ ID NO: 17564 - protein, 912 aa, unidentified
  REGION 1..912: note = Cas Enzyme sequence
MSGIFHTRYQCKTETRRRVAAGLEVVEIEEGEEMQYKPYWLLDIGTNTVGFHICDLVSHEILDSQVIHRPDSEPVQFDPKTKKLSASPNMTRRMARQSRRQTDRRARRQVVVRKTLEQIGAAPHLARDVEMEANALLFTHGIKNPAAATVLHLRKLALDESVPLNMLGAVFVSLAKRRGYYFLDDEDSDAGAARASNTKLRKLLAENGTRTLGELGASGVPVQGAGVFSENQLHVEEFEAVYSSQQRFHAQLTEDFRHKLRYAIFHKRPLRDCSHLVGKCALEKNERRCPMFLPIAQRFRILDFLANVRVRSPRGLRNLTTDEHQKAVAGLDQVEKANLKILAAWIDVPYHMLSRVEDMGMSGNVTETRLRKSLPDWTIFDQEKKNEILALYLLNEDRFAEAAATKGYVNLPHLETTYCSYSELALQKIVAKMEADHCDRFTAIDALYPKEERLTFDWLPPVLSEYAFPEERNPIVIAQLSVIKNLANKAIARFGKPAKITVEVAREFGETLAARKKRSKNFFENKQASEKLEASGIKPNQTNKQKYKLGQECGWICSYCGQAMSPSGLFELQKEHIVPRSVWPSNEVSNLLLVHDECNHKRGNRPLAEAFPDTIEQVYMRIDATKNDRRSRIARMGSDEWSNFSSSQLPDTRNITKLTCAFLRLLGEEVKIETIRGATTDQIRRALGMPKKNRADFRNHAEDAMLLAFGERALMDYYYQREHGDPDAKIKEPFTGYFQKSMAMIEAIQTEHIVNRRIRGPLHTASIYPKDCQDKRVVKTLQSIGKDGRLVVLRSNYAIVINDTDGDFSTQVLSTLDVLKDKSLVTGKKLLMAGDTVEDARGNQFFVSNISDESSAASPRVVLFPVNMATKDTKDRIRASINGSFFKKYTLIKKERSVANNRHLELCSTSTE

SEQ ID NO: 17565 - protein, 912 aa, unidentified
  REGION 1..912: note = Cas Enzyme sequence
MSGIFHSRYQRQVETARRVAAGLEAEEIEEGEEMQYKPYWLLDIGTNTVGFHICDLVSHEILDSQVIHRPDSEPVQFDKKTKKLSASPNLTRRMARQSRRQTDRRARRQVAVRKTLEQIGAAPGSAREVEMEANAFLFARGVKNPAAATMLHLRKLALDEVVPLNMLGAVFVSLAKRRGYYFLDDEESDAGAARASNTKLRKLLAENGMRTIGELGASGVPIQGPGIFSENQLHTEEFEAIYLSQQRFHSELTEDFHQQLRYAVFHKRPLRDCSHLVGKCALENNERRCPMFLPIAQRFRILDFLANIRVRSPRGLRNLTPDEHKKAVEGLDQVEKANLKILATWIDVPHHYISRVEDTGMNGNITETRLRKSLPDWTIFDQEKKNEILALYLLNEDRFAEAAATKGYVNLPHLETTYCSYSELALQKIVAKMEADHCDRFTAIDALYPKEERLTFDWLPPVLSEYAFPEERNPIVIAQLSVVKNLANKAIARFGKPAKITVEVAREFGETLAARKKRSKNFFENKQASEKLEASGIKPNQTNKQKYKLGQDCGWICPYCGQAMSPSSLFELQKEHIVPRSVWPSNEVSNLLLVHDECNHKRGNRPLAEAFPDTIEQVYMRIDATKNDRRSRIARMGSSEWSDFSSSQLPDTRNITKMTCAFFRLLGEEVKIETIRGATTDQIRRALGMPKKNRADFRNHAEDAMLLAFGERALMDYYYQREHGDPDAKIKEPFTGYFQKSMAMIEAIQTEHIVNRRIRGPLHTASIYPKDCQDKRVVKTLQSIGKDGRLVVLRSNYAIVINDTDGDFSTQVLSTLDVLKDKSLVTGKKLLMAGDTVEDARGNQFFVSNISDESSAASPRVVLFPVNMATKDTKDRIRASINGRFFKKYTLIKKERSVANNRHLELCSTSTE

SEQ ID NO: 17566 - protein, 1392 aa, unidentified
  REGION 1..1392: note = Cas Enzyme sequence
MDNKKEYYIGLDMGTNSVGWAVTDTEYNLMRAKGKDLWGVRLFTEAQPAVSRRTKRVQRRRIEREKARKAMLRLFFSDAIDAVDPGFFQRLEESFLQYEDRSDSNKQMNALFNDGGYTDLDYYNEYPTIFHLRKALLHEDREFDVRLVYLAILNMFSHRGHFLNTNMSSDDDRDNNFDSAWRELIDAFETSQLSNNKEINNISALLDTAKYPEIKQIIGDRGETRSSKFDALRDLLDVPKSEKHICAVLKLVCGLKVTVKEILSNIENPSVEPEGLKVSISFTDSNLEENLDKIQEVLEDEYFDVILKAKSAYEICLLSSILGNNKYLSDSRVEMYERHRQDLQDLKSLLAEYDKDAYEKILRTMDVGSYSAYVGSVNSHGNKIRRLGTTSANSGTAKEDLYKLVKKVLNNSVPEDNEVKAKILDKIDKECLLEKQLTSNNGVIPNQVHTIELKRILSNAERYLKFLQDIDEDGLSIKEKIIQLFEFQIPYYVGPLGREFNGVKGYNNWAVRTEEGLKPGVKVMPWNFDKYIDRTASAEEFIKRMLRKCSYMADEYTLPKHSLSYEKFMVLNEINNIKIDNERISVEAKQGIYNDLFTSGNKVSKKKIKEYLVKHNYARGGVEITGLSDETCTTKLASLGKFRAIFGDDVLKQSNKDIIEDIIYWSTIYSGDRKIIREKIEDKYPNTFDKKQLNKILGFKFEGWGNLSKKFLELQGTSKVTGEIDSIIGFMWNGQDNLMELLSDNYTFTSQLNGMMDDTIKPLSSWKIEDLEDMYLSPSVKRMVWQTMKIVDELQSVIGYAPKRVFVEVTRGDGEKERTTSRKQKLIDLYKSIKGEAKEWIKEIENRDESAFKSRKLFLYYMQQGMCMYSGEKIDLQNLMNDNLYDLDHIYPQHFTKDDSIHNNLVLVKKEFNARKSDMPITKGIQAKMHGKWKALLEGKFITSEKYARLTRHSYAFSDDEKAGFINRQLVETSQATKAITRIFSQAFDNNTKIVFSKARLVSDFRQKFELPKSRVLNCYHHANDAYLNIVVGNSYYVKFEGNPARFIKESKGKENDKKYKYHLSKFFENTVQNKNEIAWSVEEGNNTINTVKRTMAKYSPLVTYKTEEGKGEYFKETIYPKSKAKPLVYTGLKTKSTPLNDVTKYGGKTAIGTSGYCFVKYTEKNKEVRKFETLPIYLGSSRTLTVERIQEYLKESYMEKGMIQAAETIEVLIKFVPQKTEIVLDGYTYTIGGSTGDMMYINGIVQVKLSKDYVKYFQKLEKAKETNDYSEIDKLGNRVITQQKNAELIDIILDKMEKEIFQNRKCSTYETINEGRDKFKTLDINKQVTILIDVINNIYGSKQSVDLTLIGGKSNVGMCRAGRKMSNCNEAKLRFFSCTGIYVKEIDLLKI

SEQ ID NO: 17567 - protein, 1393 aa, unidentified
  REGION 1..1393: note = Cas Enzyme sequence
MDNKKEYYIGLDMGTNSVGWAVTDTEYNLMRAKGKDLWGVRLFEKGETAANRRTKRVQRRRIEREKARKAMLRLFFLDAIDAVDQGFFQRLDESFLQYEDRSDSNKQMNALFNDDGYTDLDYYNEYPTIFHLRKALLHEDREFDVRLVYLAILNMFSHRGHFLNTNMSSDDDRDNNFDSAWRELIDAFETSQSSNNKEINNISALLDTSKYPEIKQIIGDRGKTKSSKFDVLRDLLGVPKSEKHICAVLKLVCGLKVNVKEILSNIENPAVDPEELKVSIGFAEPTFEDDLDKIQEVLEDEYFDVILKAKIVYEICLLSLIIGNNKYLSDSRVEMYEHHKQDLQDLKSLLTEYDKDAYEKIFRTMDKGSYSAYVGSLNSHGNKVRRLGPISKEDKKVKENLYELIKKVLKDSVPEGNVIKARILDKIEKDCFLEKQLTGNNGVIPNQVHTKELKRILSNAEKYLKFLQDIDEDGLSIKDKIIQLFEFQIPYYVGPLGREFNGVKGYNSWAVRTEEGLKPGVKIMPWNFDKYIDRTASAEEFIKRMLRKCSYISGEYTLPKHSLTYEKFMVLNEINNIKIDNERISVEAKQGIYKDLFTAGNKVVKKKIKEYLVKHNFARDDVEITGLSDETCTTKLASLGKFRAIFGDDIDKQSNKDIIENIIYWSTIYSGDRKIINEKIEENYPNLFDKKQLNKILGFKFEGWGNLSKKFLELQGSSKITGEINSILGFMWDGQENLMELLSDNYTFTSQLNGMMDDAIKPLSSWKIEDLDDMYLSPSVKRMVWQTIKIVDELRSVIGYAPKRVFVEVTRGNVEKERATSRKQKLIALYKKIKGEAKDWIKEIENRDESAFKSRKLFLYYMQQGICMYSGEKIDLDNLMKDNLYDLDHIYPQHFTKDDSIHNNLVLVKKEINNNVKQDMPINREIQAKMNEKWKALREGDFINSEKYARLTRKRYEFSDEEKVGFINRQLVETSQATKAVTRILSQAFDNNTKIVFSKAKLVSDFRQKFKLPKSRALNCYHHANDAYLNIVVGNSYYVKFEGNPTRFIKESKGKEDEKNYKYHLSKFFENTVQNKNEVAWSVEEGNNTITTVKQTMAKYSPLVTYKTEEGKGEYFKETIFPKSIAKPIVYTGLKSKNTPLNDVTKYGGKTAIGTSGYCFVKYTEKNKEVRKFETLPIYLGGSRSLSIERIQEYLKESYTKKGMSQAAESVEVLIKFVPQKTEVMIDGYKYVIAGSSDYRMYLNGMIQINMPLNAIEYMHKIEKAKENGDYTEVNKYGDRIITIQKNLYILDKLIEKMESKTFKNKKNILTKIIKNGRGKFEELEISKQVAIILDIISNMYGIKQDLDLSAIGGTATGGKCRVDRKVDKFAEVILITKSCTGLYERKIDLLKI

SEQ ID NO: 17568 - protein, 1391 aa, unidentified
  REGION 1..1391: note = Cas Enzyme sequence
MDNKKEYYIGLDMGTNSVGWAVTDTEYNLMRAKGKDLWGVRLFKEAQPAVNRRTKRVQRRRIEREKARKAMLRLFFSDAIDAVDSGFFQRLDESFLQYEDRSDSNKQMNALFNDGSYTDLDYYNEYPTIFHLRKALLHEDREFDVRLVYLAILNMFSHRGHFLNTNMSSDDDRDNNFDGAWRELIDAFETFQLSNDKEINNISALLDTSKYLEIKQIIGDRGKTRSSKFDALRDLLGVPKSEKHTCAVLKLVCGLKVTVKELLSNIENPSVDSEGLKVSISFTDSNLEENLDKIQEVLEDEYFDVILKAKSVYEICLLSSILGNNKYLSDSRVEMYERHRLDLQDLKSLLAEYDKDAYEKIFRTMDVGSYSAYVGSVNSHGNKIRRLGTTSASSGTAKEELYKLVKKVLNNSVPEDNVVKARILDKIEKDCFLEKQLTSNNGVIPNQVHAIELKRILSNAEKHLEFLNDVDEGGLSVKDKIIKLFEFQIPYYVGPLGREFNGKKGYNNWAVRTEEGLKPGVKIMPWNFDKYIDRTASAEEFIKRMLRKCSYISGEYTLPKHSLTYEKFMVLNEINNIKIDNERISVEAKQGIYNDLFTRGNKVSKKKIKEYLVKHNFARDDVEITGLSDETCTTKLASLGKFRSIFGDVDKQSNKDIIENIIYWSTIYSGDRKIIKEKIEEKYPNLFDKKQLNKILGFKFEGWGNLSRKFLEQQGTSKVTGEINSILGFMWDGQENLMELLSDNYTFTEQLGGMADNTIRPLSDWKIEDLEDMYLSPSVKRSVWQTMKIVDELQSVIGYAPKRVFVEVTRGDGEKERTTSRKQKLIDLYKSIKGEAKDWIKEIEDRDENAFKSRKLFLYYMQQGMCMYSGERIDLHNLMNDSIYDIDHIYPRHFTKDDSIHNNLVLVKRQLNADKSDMPITKEIQTKMHGRWKALLAGGFISSEKYARLTRNSYTFSDEEKAGFINRQLVETSQATKAITRIFSQAFDNDTKIVFSKARLVSDFRQKFELPKSRVLNCYHHANDAYLNIVVGNSYYVKFEGNPARFIKESKGKEDEKKYKYHLSKFFENTVQNKNEIAWSVEEGNNTITTVKRTMAKYSPLVTYKTEEGKGEYFKETIYPKSKAKPLVYTGLKTKNTPLNDVTKYGGKTAIGTSGYCFVKYTEKNKEVRKFETLPIYLGSSRTLTVERIQKYLKKSYLEKGMKQAAETVEVLIKFVPQKTELVLDGYTYTIGGGAGDMMYINGFVQINLPSLYIEYMHKLEKAKERKDYSEIDKDGNKVITAERNLEIFNYIIEKIGGDKFINRKNSMYEALKSGQAEFTILNTSNQVNIIIDTLNNMYGNKQSVDLKDIGGKSVSGVCKANRNISNANQAKLILKSSTGLYERTIDLLEI

SEQ ID NO: 17569 - protein, 1018 aa, unidentified
  REGION 1..1018: note = Cas Enzyme sequence
MAMMSKESYTLGIDFGSQNIGIALLRHTDQKPNEPIYAGTLRVDTGGQEGLPTKVNDRKTARRMRRTQSTKKRRLRLLRDSLNSLGIDEDAINSIISFSRRRGYSWVKNDEGGYRNKNKKEDEYFQFGVSRKDSFLPALQIEIEKCLPEEKREQVFQICKNILDKEPDDDIRPVRFDNRNPSKCRWDDGEGGCNNNVPAAKNAVDMRLNQSLYIKTIPVFDSLNENKRQDFCRNLDSYISRFAEFAYKYQKAFKTEDTGVLDALKKQYSNKGDKFKKLCGSCRQVKECYLKKRIDFKDFLFDIEKFSGKNFNMKENFNGYYHKEIDNIVLNSQSGRLSFCREHSDVYIQYMLSHKDIPYKQTIEEKDIKSRQQQILFGKIWRFVEARLLPLTNGKIDRIAVERNAFDLLAIPFEDKTKLSERKVNELYWHGPQYGYKSTKEMLFKEFDGNCCYCPNKFPESEFVEVEHILPRSKFRFDNYFNLALACKSCNALKGNKTGLEFKPIHPNAYKAYSKYVDAREGQNLKHIFHTIKKGILNLLTRGDAKAETQLSIIGQNLFEATTTQKGPRPLARFLSQRISSICGKAPEIKLLNGRHTAVYRRLIFPDFDKLAEKNNAEREDTINHAIDAMLVAFQMPDYAWHKKGFHDYKDYEYWANRVKNFAPEKDSEGLPVFSPERHPKPILGFEKPSVVSSNYYSIDILSTSWNRRHMATHKQEPYGMSNKKDPTKEGVPIRKEPASNIVKEILDAENKEKLKKFIDRISHPVLRENLLLALEEEHYKEITACMLVKWLQRTISNTVEKSREKKKSYFSNHPSSLLRKKYLEDFVCADIDDILVSPQAKIPPNISIRMAVASNMKGQINLKRSDKIRPDRFHHYMSQPNIKMKIVAYKANSAGVIDRSNPAILEVMQSWQVLNNKKEKIIEDENHVLNGRILSNGIKEKDFLMKWEAELKKYFASKSFKEWHRITQGNYLEYENGDGFFIRNFKKEKDGYKDGNLKGIVKVWRSPYKWLANGDSA

SEQ ID NO: 17570 - protein, 1313 aa, unidentified; identical to SEQ ID NO: 16631
  REGION 1..1313: note = Cas Enzyme sequence

SEQ ID NO: 17571 - protein, 1123 aa, unidentified
  REGION 1..1123: note = Cas Enzyme sequence
MKKYTIGLDLGINNVGWAKYDLETKKVIDKGVVRFKESSTAQDRRIIRGSRRLRKRKQHRVERLAIQLSNINFCTSRSWEPELLNKRIKGLNESLSEQEITNIIYWFAIHRGYIPFDEEKPEREVHKFAEDEYPCQYIFDYYKEYGVYRGQCDLISLKDNLKELKQILLTQQKYHSKLTDHVIDNILYIIQSKREFWEGPGASKENQLSPYGRYRTLEDLEKYKADPTYHQYLYEMLIGKCELSIDKDGFMDQVAPKCNFYAEEFNFYNDFINMSVKEPSQIDEEYRNKITLKGKFTKDTIEEIKKEILNTKTVSLEKLVKKVLGLELKDIQGYRIDKKYKPEISKFEFYKYLLKSFKDKKLNPHWLENDDKTIYNQIIYILTVAPSTYAIEDMLKDRVKEVEFKKEEIDVLIDIKKKKNPDLKYHSLSERILKKALDDIKRHNCEYNFMQIMKRLEYEKEMKEYFQNNYSTKTQSPYTIEDQYIDHLIANPQVKKTLRKAIKVINAIIKKEKNYPETIVIESATSLNSKERKKQIKAEQKKYDKLNEEAKNELEANGYEATDKNMQLLINWKETNESCIYCGESISLKEVLTTEIEHILPKSKSMDNSHNNTTCSCLKCNKEKNNRTPYQYLTSENRYEGFKNRVMNQYDKMSQDKKSNLLFEGDIDKYSIKFINRNLRDTSYASVALVQELKKYNEYLGAKEGYKINIITSPGQLTSKIRQYLKIKDKDRTYLYHHVVDAMILASIPDTEIGKVLIEAQNDSQYWFKDKNKENKYKEEVYNMLNHVWLSNRDQIQKFNQDCDNMPEDNKDGLIKRSYEVLKNPIQQFSQYTEYAKYIKQDDGYYKILQVDNIYNLLIRKKDGSVDKDKQLLDELFDLSNKKTISLLCEKKDPKLYQKLKDIYIKNASSINPFVDECKYMYGLEEGDKFNYLKQGIRKTDNPNSPLVIRLRYLKRVTNPYIKNNITTRRKNVYNEFTINKPKKDTIIGLDGLKQVSTRIFYSYDDKKFIFLPICAISFVNGKLNKKEKNYQTTYNRLIGNKNVKEIGNIYTGEWVGVYKKNGEYFEGRYKGYHKTSNVLEYYINGLDTLSCAKICSSDLRIIIYTTDILGNRHIRLDTQKEI

SEQ ID NO: 17572 - protein, 1397 aa, unidentified
  REGION 1..1397: note = Cas Enzyme sequence
MARKLKNINGPWYAGIDLDGTSVGFVATDEYGEVLYHKGQPVMGARCFKEALHASEARMPRTARRRLQRARGREREMERVFAPAIAPTDPDFFVRRRLSYKLMRDDIAADPAAAAWQGLLDGYPTLAHLDVDLMESDTPRDPRLIFWAVANHVVRRGHFLMEGHDVTSANSDPSAQVEALVRELDALGEACGEAIELDGGALADMGGSWTARELQKAVSGAVSVTGDDIDAKIARAQAKALGDLVAGYKANMDAFALEGEQIGKVSVSDADALDEFLANCPDRLAPSIEAARGLYSAWRLQGLLSFAPGKTLSHNQVAQYEVYGRQLRTLKDLALKYIVRADSADGPDEDGLALYRDFFGGPKRSGHGGYDKVLVKKLDGAKRNMGYTAYDLNVIPYEEFKKRVERLFKGTDAVKDPAYADMVAALGEHRFLRRIHTTDNSAIPYQLHAEVVGRIIDAQGGFYPWLKDAAPHILKVLTSRIPYYVGPLDSSAAPVDARGKARFAWSRRLPGHERAFVAPWNYEEHIDTDAAAEAFIRRMTGKCTYLVDEDVLPANSLIYERFRFLNELAGIRYTEDGQDWLPLDAAMRRSVVEAASDGSVMTLSRIANILSRDFTMAHPHVKGVSDTKRMTSRLSVSAWIAGLFGVKTLTAAQRSMAEDIILWNTVFEERSILKRKVAKEYGDILDEDAIEAFCAKRLKGWGQLSERLLTGVWADTARGDMCIMDVLEQGAPYGRFRGTSMNLMQALSDTELGFRAKIDEINAAALEKAGELGIDALPGSPALRRGVSQAMKVIEDMASVAGCAPAKVYVEVTRTASNKLKGKRSRSRVQEIEAALKALDEDARRDLDAAKLLRELGMFDEKEINERLYLYFRQAGKSLYSGRPIDIARIASADYCVDRILPRSVRKDESFDNKALVLCAESLDKKESVLVPQPVQRKMAPFWMYLRRVGLMTERKLNALMRTQISERMLKSIVGRQLTETSQECKLIAAVLEATYAGVKVVPVKAGVASSVRRRAGIPRSRKANRYYHAHDALIALTTGRFIETRAPMWSNNRAFYERTMRDIEVQERRGGADSELDFFSGGFFRDLVDYDTAEVLWDSDFERERLVRACSWKNLRVTFAPYEEGGAFWKQTVYSPRDTKTKLIPVKGDRDAALFGGYSAQTFAYFMIYESEGKKGNLFRFAPVPTSIASKATDSLTELYARSLCRESGERFIRVVRDRILKETVYEAYGERFRIKGQKTAGPVRQLALDTSDTRLLRIVERMVEGEQPSPRRDLESDARVLCRLWARLLELAPANFPRVSKVLKLGALKTPEGVFADTEADDIAKTVRAVAESEVQVVELLSGIRGTADVRSLGGSAFAGTLSMTFDKIINDPKAGFAIVDISAAGLHERVSTLG

SEQ ID NO: 17573 - protein, 1355 aa, unidentified
  REGION 1..1355: note = Cas Enzyme sequence
MGTRCFKEALHASEARMPRAARRRLQRARGREREMERVFAPAIAPTDPDFFVRRRMSYKLMRDDIAADPAAAAWQGLLDGYPTLAHLDVDLMESDGPRDPRLVFWAIANHVVRRGHFLMEGNDATSANSDPSAQVEALVRELDALGEACGEAIELDGGAFGGMGGSWTARELQKAVSGAVSVTGDDIDAKIARAQAKALGDLVAGYKANMDAFALEGEQIGKISVSDADALDEFLAICPDRLAPTIEAARGLYSAWRLQGLLSFAPGKTLSHNQVAQYEVYGRQLRTLKDLALKYIAHADSEDGPDEDGLALYRDFFGGPKRSGRRGYDKVLVKKLDGAKRNMGYTAYDLNVIPYEEFKKRVERLFKGTDATKDPAYIDMVAALGEHRFLRRIHTTDNSAIPYQLHAEVVGRIIDAQGNFYPWLKDAGPHILKVLTSRIPYYVGPLDSSAAPLDAHGKARFAWSRRLPGHERAFVAPWNYEEHIDTDAAAEAFIRRMTGKCTYLVDEDVLPANSLIYERFRFLNELAGIRYTEDGQDWLPLDAAMRAAVVEAASDGSVMTLSRIANILSRDFTMAHPHVKGVSDAKRMTSRLSVSAWIAGLLGVKSLTAAQKSMAEDIILWNTVFEERSILKRKVAKEYGDILDEGAIEAFCAKRLKGWGQLSERLLTGVWVDTARGDMCIMDVLEQGAPYGRFRGTSMNLMQVLSDTELGFRTRIDEVNATALEKAGEFGIDALPGSPALRRGVSQAMKVIEDMASVAGCAPAKVYVEVTRTASKQLKGKRSRSRAQEIEAALKALDEDARRDLDAARLLRELGMFDEKEINERLYLYFRQAGKSLYSGKPIDIARIASVDYCVDRILPRSVRRDDSLDNKVLVLYAESLDKKDSILVPQHVQRKMAPFWMYLRRAGLMTERKLNALMRTQISERMLKSIVGRQLTETSQECKLIAAVLEATYTGVKVVPVKAGVASSVRRRAGIPRSRKANRYYHAHDALIALTTGRFIETRAPMWSNNRAFYERIMRDIEAQERRGGADSELDFFSGGFFRNLVDYDTAEVLWDSDFERERLVRACSWKNLRVTFAPYEEGGAFWKQTVYSPRDSKTKLIPVKGDRDAALFGGYSAQTFAYFMIYETEGKKGNLFRFAPVPTSIASKATDSLTELYARSLCHESGERFVRVVRDRILKETVYEAYGERFRVKGLKTAGPVRQLALDAADTRLLRIVERMVDGEQPSPRRDLESDAKVLCRLWARLLALAPANFPRVSKVLKLGALKTPEKVFADTEADDLAKTVRAVAESEVQVVELLSGIRGTADVRPLGGSAFAGTLSMTFDKIINDPKAGFAIVDISAAGLHERVSTLG

SEQ ID NO: 17574 - protein, 1397 aa, unidentified
  REGION 1..1397: note = Cas Enzyme sequence
MARKLKNINGPWYAGIDLDGTSVGFVATDEYGEVLYHKGQPVMGARCFKEALHASEARMPRTARRRLQRARGREREMERVFAPAIAPADPDFFIRRRTSYKLMRDDIASDPAAAAWQGLLDGYPTLAHLDVDLMESDGPRDPRLVFWAIANHVVRRGHFLMEGHDVTSANSDPFAQVEALVRELDALGEACGEAIELDGGALADMGGSWTARELQKAVSGAVSVAGDDIDAKIARAQAKALGDLVAGYKANMDAFALEGEQIGKVSVSDADALDEFLANCPDRLAPTIEAARGLYSAWRLQGLLSFAPGKTLSHNQVAQYEVYGRQLRTLKDLALKYIVRADSADGPDEDGLTLYRDFFGGPKRSGRGGYDKVLVKKLDGAKRNMGYTAYDLNVIPYEEFKKRVERLFKGTDAVTDPAYVDMVAALGEHRFLRRIHTADNSAIPYQLHAEVVGRIIDKQGSFYPWLKDAGRHILKVLTSRIPYYVGPLDSYAAPVDAHGKARFAWSRRLPGHERAFIAPWNYEEHIDTDAAAEAFIRRMTGKCTYLVDEDVLPANSLIYERFRFLNELAGIRYTEDGQDWLPLDAAMRAAVVEAASDGSVMTLSRIENILSRDFTMAHPHVKGVSDAKRMTSRLSVSAWMANLLGVKTLTAAQKSMAEDLILWNTVFEERSILKRKVAKEYGDVLDEEAIDAFCAKRLKGWGQLSERLLTGVWAETARGDMCIMDVLEQGAPYGRFRGASMNLMQALSDTELGFRAKIDEVNAAALEKAGELGIDALPGSPALRRGVSQAMKVIEDMVSVAGCAPAKVYVEVTRTASNKLKGKRSRSRAQEIEAALKALDEDARRDLDAARLLRELGMFDEKEINERLYLYFKQAGKSLYSGRPIDIARIASAEYCVDRILPRSVRKDESLDNKVLVLYAESLDKKESILVPQPVQRKMAPFWMHLRRVGLMTERKLNALMRTQISERMLKSIVGRQLTETSQECKLLTAVLEATYTGVRVVPVKAGVASSVRRRAGIPKSRKANRYYHAHDALIALTTGRFIETRAPMWSNNRAFYERTMRDIEAQERRGGADSELDFFSGGFFRDLVDYDTAEVLWDSDFERERLVRACSWKNLRVTFAPYEEGGAFWKQTVYSPRDSKTKLIPVKGDRDAALFGGYSAQTFAYFMIYESEGKKGNLFRFAPVPTSIASKATDSLTELYARSLCRESGERFIRVVRDRILKETVYEAYGERFRIKGQKTAGPVRQLALDTSDTRLLRIVERMVDGEQPSPRRDLESDAQVLCRLWARLLELAPANFPRVSKVLKLSDLKTPEEVFADTEADDIAKTVRAVAESEVQVVELLSGIRGTADVRSLGGSAFAGTLSMTFDKIINDPKAGFAIVDISAAGLHERVSTLG

SEQ ID NO: 17575 - protein, 1342 aa, unidentified
  REGION 1..1342: note = Cas Enzyme sequence
MNQEYYMGLDMGTGSLGWAITDTDYHILRRHGKALWGVRLFESALTAEERRSFRIARRRLDRRNWRIQILQELFSEEISKVDLGFFQRMKESKYYPEDKKDINGKCPELPYALFVDKNYTDKEYHREYPTIYHLRKMLMETEEMPDIRLVYLGLHHMMKHRGHFLLSGDISKIKEFKGTFLQLEENLKKEELNWTLELSDDEIQFIENTLKDRMHTKSVKKSRLIKQLNAKTTCEKAILNLISGGSVKLSDIFENSELDGCENPKISFSDTGYDDYIGTVEADLVEQYYIIESAKAVYDWSVLVEILGDSSSISEAKVKLYEKHKADLRYLKKIVRKYLPLEYKHIFIDTEEKLNNYVAYIGMTKKNGKKNDLQSKKCSKEEFYDFLKKNVIKKISDQEVVSYLEKELEQGTFLPKQVNKENSVIPYQVHMYELRKILDNLSGKSSFMQENKEKILQLFEFRIPYYVGPLGRNEEGTEGKFTWAVRKNNEKIYPWNFKDVIDIEESAEKFIRRMTNKCTYMLGEDVLPKDSLLYSKYMVLNELNNLRLNGEKISVELKQRLYKEVFCCYRKVTIKKLKNYLIREGIVDKNVEITGIDGDFKAQLTAFHDFKEKLTGVTLSQKEKEEIILNIVLFGDDKKLLKQRVMRMHPELTEKQIKSISMLSYKGWGRLSKAFLENITTPAPGTEEVWNVITAMWETNDNLMQILSKNYQFMDRIEEYNSIRKEKNLSYKTVDELYVSPAVKRQIWQTLKVVKELQKVMECAPKRVFVEMARGEQGNQKDKRRDSRKKQLIDLYKKCKEEERDWIEELNKNEDQQLRSDKLYLYYTQKGRCMYSGEIIQLEDLWDNTKYDIDHIYPQSKTMDDSLNNRVLVKKEYNAAKSDEYPIKGSIRKARKLFWKSLLDEGFITKEKYERLIRNTALTPDELAGFINRQLVETRQSTKAVAEILKQVFPDSEIVYVKAKNVSEFRQDFTPDLLKVRDMNDLHHAKDAYLNIVVGNSYYTKFTKNAAWFIKENPGRSYNLKMMFKGDKDIIRNGEVAWKAGNNGTIVTVKNVMKKNNILVTRRTYEVKGGLFKQQPIKKGKGQLPLKESDNQLNNLKKYGGYTEIAGSYYLLVKSIDKKGKIKKTIEYIPIYLRETLENNKEKIIYYLKERGLINPQILLKIKTDTLFKINGSYIWISGRKTNYLIFKNANQLVLENTNAIILKNIIKFLQRKAENKNLQITHNDKLGEKELCQVYDVLSKKLEIPVYSAILMSEMEAVKKGREKFIELSREEQCNTIKKIFHIMQCRSARENLREIGGGTEAGRILINKNIDKYKQISIINQSPTGIYEEEIDLLKL

SEQ ID NO: 17576 - protein, 1387 aa, unidentified
  REGION 1..1387: note = Cas Enzyme sequence
MYSGDYYVGLDMGTNSVGFAATDPSYHLLRAKGKDLWGVRLFPEAQTAADRRSHRTARRRLQRRKLRIGILNEIFSDELNKVDPGFLQRLADSKFFEEDKTEHQPYALFADDHYTDREYYEHFPTVYHLRKYLIETKDVYDIRLLYLGLHSIYKYRGNFLNPNLNAESMQEFGPLYRDLWEAIEEAKDARQDDSQIDISIPEWKEDLSSNLMEILSSKSYSMMEKGEKLSELLDITKKQKPQQEFLKWMCGRKGKVSVAFPREYDEEAGKLSFSFQDGNLEESMQKSEEILLPEEYEALLAIKRIHDFGLLSNIMKGYRYISEARVDIYNKHQEDLKTLKRIYKKYAPEKYNTMFRKMEDKLKNYSAYVGSVKYKTPKNGSAIRRKGKSSIGELYKTIQNDLNPVKDIPEVSLVFDDMEKGTFLPKIRTNDNGVIPYQVYEAELKAILKNAESKFPFLSVKDESGFSPEEKILMTFSFRIPYYVGPVYNDGKNHAWSVRKEPGRVYPWNFDQKIDKKKSSEEFMNHLIGHCTYLRGEQVLPRQSLMYERFALLNEFNNIQIDGRKPDAKAKKIIFDELFAKGRRVTKKGLQRFLVSHNLSNGKTKADDVVISGMADEKFQNSLSTYHHFCEVLKTDKLTYSQEKMAEDIIRWSTVYADSKNFLREKIREYYSTEQLSEEALNRVLGMKFSEWGRLSSAFLHMEGANTHTGEVKSILRWMEEDSYNLMELLSSDFTFPKKLESLDKDIQKDLMSIEPEDLEGRYLSAPVKRMVWQTILILREITKVMGHAPSRVFVEMTRGDGEKKRTTSRKKKFSDLYKNIRDENFEWSEELEKFSEADFRNKKLYLYFTQMGRSMYTGKPIDLHELLTNNTKYDLDHIYPRHFVKDDSLDNNLVLVEKTENAHKTDNYPIENSIRERQISNWKMLLDKHLITQTKFQRLTRSTDFTDAERAEFINRQIVETSQAVKTITHLLEELMPSDETKVIYSKAGNVSDFRNKFSLYKCREVNDFHHAGDAYLNIVVGNVYHTKFTSSPASFVKEWRQNAKKYSYNLGAGKIFEHTVERNGILAWDVEKNQSIATVKAVMEKQTPLVTYMNYCAKGGIADQTIDSAETAKKSKADGAYLPIKTGDQRLSDVDRYGGVTNIATSYFFLVEHEARKKRIRTIEAMPVYIAPKIKDDKDLLTFAENSLGLVKPRICVNRIKVYSKLRINGFDCYLSGRTGNRLSVVNAEELKLGNRMIRYAKKMKKVADMNLTDEQIRLDANRIAKKNDGDEIGITREDNIRFYEFLKQKHTTGIFGKRPNPVGEKLQKRQATFENLSLDQQVNVLQEIMKLSGRVNGADLTLIGESSNTGNSKINKKISDLKNCKLISQSVTGLFEQKTDLLMV

SEQ ID NO: 17577 - protein, 1363 aa, unidentified
  REGION 1..1363: note = Cas Enzyme sequence
LEVPAVSTIKLSQKYTSVTQPYYLGLDIGTNSVGWAVTDKSYNIIKKKGKSLWGSRLFTEAQPAVTRRQFRASRRRRKRTKNRIKLLQEYFAEAINTVDPGFYQRLKDSFYLPDDKETEQKNSLFNDTAYSDQDYHSDFPTIYHLRLHLLRENDVKDPRLIYLACHHIMKNRGNFLIEGKLATDQQLDSALISIQEYWLAESGSYLWPEDKLTEIADTLLARKMTSSDKVKALQSNLINSDKETKELCKLIVGNSAKFSTVFNNDEFDESDIKSIKFADGTYENDEIQDSIQALLGDSKELVDIAFQIYGAALLQKLLQKEDGAIANSISEARVNIYETHARDLAQLKSAVKAICENDSGSNKLYNKIFRENKKGLANYVAYSGHVDTKDSSSPIDRCGQELFYKFLKNELKKYSDVESIDNILMKIEQEVFLPKITSSANGIIPHQLHGSELEKILKNAQANFDFITDEIISEITQIFNFRIPYFIGPFDDRSEFSWIKRRSNDPIRPWNINQVVNIEETAEKFIRNMTNKCTYLLGEDVLPKESLLYSEYLVLNALNTLTVDSQRLDRSIRDQLYLDLFINRTKGGRITKKRVVSALTAQGVKVTENSLGGMDLEIPAKLKSRRDFSSIVSDKLTDQEIEAIIEKITAFPDNVEMIRKYIKENYQEKLNDKQIEKIAHLTYKDWGRFSKKFLSGIKHTGADGIRRSIIETMRTDVVNLMEVLDSNRYSFSAQIKDLNEGLIEDPNIISDEYLEALRLSPAVKKAVRQSLLVCKELFGIMKGAPERIFIEMARQDGEKDKRTKSRKQHLAELYASCKQDTEAWSKEVQEMSEDKFKSKKLYLYCLQWGRCMYSGDRIPIEDLFDPSKYDIDHIYPRSSTKDDSWNNLVLVKQELNRSKKDTYPLDSNIQAKCSTLWLGLLQCGFMDSEKYKRLTRKDPLSPDELASFINRQIVETRQSTKALAEIFNRVLPESETVYVKANLVSDFRYRDGNRLDAKTEFYFPKVRNLNDFHHAKDAYLNVVVGNSYHVKFTRNFFLKQSSIDRSKYNLVKFFDREILEKGQPIWIPGENGTISTVKKMMNRNNVLLSYEAYRRSGGFFDQMLVKKGNGQHPIKSNVPALKKLNLYGGFNKVAGSHFCIFQHQKGKKQEMSIEALPIYLKSYNFSEESIINYLSQNYTNPVIICPEIKYGSIIEYNGVRYRIKAKTGNQVKCAPAIQAAYTATDEVIFKEVERAIEKDSINQSLNDVLADNLFEDITKRIISVPYCNYQTLNTLGTQMHDNLSYFEILPLESKIKILATSIKLINGNGEPVDLSIFTDDKSNSIIGSQVGAIKIVINNKKGNILRVVNRSVTGFYENVKRVF

SEQ ID NO: 17578 - protein, 1340 aa, unidentified
  REGION 1..1340: note = Cas Enzyme sequence
MGKNNNEYYLGLDIGTDSVGWAVTDLDYNIQKFNGKAMWGIRLFEAGETAAERRVFRTTRRRIQRRKQRIELLQELFDKEIAKVDPQFFLRLKESKYWVEDRTLGQVNILFNDGEYTDKDYYKDYPTIYHLRKELMESDEAHDVRLVYLVIHHIIKNRGHFLFEGEGRKDVSSFPTIFKELCQSMHDEMELELEAEDLNQVEAVLKNRENGINDKKTQLNKLLTIDDDHKKDLKAIIALLAGGKAKVDAFFGEKTSENSDVKDLTFVGGKFEENFDALSTMLGDKMFCLEKMKAIYDWSVLEEILQGKEYLSYAKVATYEKHKSDLVMLKRVIRKYRPEEYDACFKDPKGKSNFCAYVGMAKKGKKKLVIEKKCSQEDLCKYLSKVLGGIAAEDQELQYILSEIQRNVLLPKQVNKDNGVIPNQLHREELSMILNHAEKYLPFFKIVDESGFSVREKIEKILTFRIPYYVGPLNAYHKSLGHCWIVKNKEEKIYPWNFDEVVNLEESATAFIRKMTSKCTYVIGADVVPKNSLLYSEFMVLNELNNVKVNGEELPIEIKGKAFEEVFKKIKRVTGKRLRDFLIAEGAFKKGDELSGFDQNFKGSLTSYLDFKRILGDRKVPREAIEGMIQAIVLFGDDRKLLRRRIQNGYGELLSKEEVAAICKLKYMGWGRLSKEFLEEIYHVDHKTGEMINIIAMMHRTNDNLMQLLSSQYRFTGALEEKNREVLSDNTDIAYSIVKDLYVSPAVRRSIWQSLKIVKEIAKIKKTAPKKVFVEVARENGEKKRTVSRKNALIALYKNCKEEERDWQVELEAKTDHELRRDRLYLYYTQMGRCMYTGNPIDLNRLFDVNIYDVDHIFPQSKIKDDSLANRVLVERTVNANKSDVYPLPEEIRNKNRSFWTMLYKKELISKRKYDRLTRVTPFTDSELADFIARQLVETRQSTKAVAQVLKQVFPETDVVYVKAGNVSDFRHKYKLIKVREVNNYHHAKDAYLNIVVGNVYDTKFTKSPLNFIQGKGGKNYSLNRMYDFDVERAGIVAWKKGNEGSLKTVRRFMKKNNILFTRHAFEVKGGLFDQTIMKKGKGQVPIKGGDERLSDISKYGGYNKVSGAYFFLVEHTVKKKRIRTLEFAPVYLAKKMEDQTALLEFCTKEIGLVEPRVLVSRVKINTMFEIDGFKMHISGRTGNSILYKCGEQLVTNYEDEQYLKGIGKYLGRVKVARKELPINEHDKINAERNFEIYNLYLSKLKSSIYNVHLDSQIKHFENGKEKFEKLSLLDQCQVLNNTLNLFKCTSDGANLSLIGAGAKCGRLLIGKNITLKSRVYIVNQSITGLFEQKVDLLAI

SEQ ID NO: 17579 - protein, 1356 aa, unidentified
  REGION 1..1356: note = Cas Enzyme sequence
MKKIEEYYIGLDMGTGSVGWAVTDLTYNIIKRHGKALWGIRLFESAKTAEERRIFRTSRRRTERRKNRLHLLQEIFAEEISKKDMGFYQRMKESKYWHEDKKDINGNMPELPYALFADDGFTDKDYYKKYPTIFHLRYALATNTTDKPDIRLLYLALHHIIKHRGHFLFEGKKLSEVKEFSTAIGALVQQAEEQEIDLKSLTQEEVLTQLEHIMSDAQCTKSDKKTQVSKLIVGTDKQKQKQEKAIAALITGCTVKLSDIFADPELDKEEISKICFSDNGYEEKEVEIESVLADRFLLIAAAKGVYDWTVLHDILGDARFLSEAKVKTYEKHRDDLRKVKQLLRMDKEVYEAVFGVSEKNEANYSAYIGMAKKNGKKQPIEKKCSQEDFYKFLKKQLDRLSVDEMGQEIIDELKAEMDLGTLFPKQMIRDNGVIPYQLHENELNAILDNAQKFYPFLLEKDQDGYTPVEKIQKIFRFRIPYYVGPLNTAHQDKGGHSWSVRKKEGKIYPWNFSEMIDEEESATKFIERMTNKCTYLIGEDVLPKESLLYAKFNVLNELNNLRIDGELIAPELKQDIYNNVFKKYQRVTGKKVKDYLRINGVISKEQELSGFDQNFKSSLKAYHDFKQIVGTGVLSESEQEDIVRDITLFADSQKMLKQRIHRKYPMLSDKQVAQLANKKYAGWGRLSRTFLENIESVNKETGEVMNIITALWETNENLMKLLSGKYDYTKQIEQWNAGQMKKGEIEYQDIEELYVSPAVKRPIWQTIKIVREITNIMGGAPKRIFVEVAREPGEKGVRKVSRRNQLLDLYKACKKEAPELYDRLANKESDNALRSDKLFLYYSQMGRCMYSGDAIDLDELFTNRYDIDHIYPQSKVMDDSIDNRVLVKRDLNSKKTDTFPVPEEYRKAGKVLWSTLLKKGLISKEKYKRLTRTEPFGEDELAGFIARQLVETRQSTKAVAHLLEEAYPDAEIVYAKARAVSEFRHKFDMIKVREVNDFHHAKDAYLNIVVGNTYYVKFTKDAAWFVRNNPGRTYNLKKMFENETVKRGNETAWIPGDNGTICTVKKWMRKNNVLFTRRAYEVKGGLFDQNILKKGKGQIPIKGGVDERLQSIEKYGAYNKASGAYFMLVESDGKKGERKRTIEFVPVFLAKRLEESVELRRRYCEEKLGLVNPDVRLSKIKINTLFDVDGFKMHLSGRTGKQLLFKGANQLVLSEELQLIVKKIGKYCADYKENKEAVLSEKSEVTQEVLEELYDEFLHKLRNSLYGHRLSAQIEKIEKGKEIFQSMSNEQKCLILMEILHLFQCASQAANLQLIDGPGKAGILVLNNDISKLEDIKIINQSITGFYEQVIDLKTI

SEQ ID NO: 17580 - protein, 1342 aa, unidentified
  REGION 1..1342: note = Cas Enzyme sequence
MNQEYYMGLDMGTGSLGWAITDTDYHILRRHGKALWGVRLFESALTAEERRSFRIARRRLDRRNWRIQILQELFSEEISKVDLGFFQRMKESKYYPEDKKDINGKCPELPYALFVDKNYTDKEYHREYPTIYHLRKMLMETEEMPDIRLVYLGLHHMMKHRGHFLLSGDISKIKEFKGTFLQLEENLKKEELNWTLELSDDEIQFIENTLKDRMHTKSVKKSRLIKQLNAKTTCEKAILNLISGGSVKLSDIFENSELDGCENLKISFSDTGYDDYIGTVEADLVEQYYIIESAKAVYDWSVLVEILGDSSSISEAKVKLYEKHKADLRYLKKIVRKYLPLEYKHIFIDTEEKLNNYVAYIGMTKKNGKKNDLQSKKCSKEEFYDFLKKNVIKKISDQEVVSYLEKELEQGTFLPKQVNKENSVIPYQVHMYELRKILDNLSGKSSFMQENKEKILQLFEFRIPYYVGPLGRNEEGTEGKFTWAVRKNNEKIYPWNFKDVIDIEESAEKFIRRMTNKCTYMLGEDVLPKDSLLYSKYMVLNELNNLRLNGEKISVELKQRLYKEVFCCYRKVTIKKLKNYLIREGIVDKNVEITGIDGDFKAQLTAFHDFKEKLTGVTLSQKEKEEIILNIVLFGDDKKLLKQRVMRMHPELTEKQIKSISMLSYKGWGRLSKAFLENITTPAPGTEEVWNVITAMWETNDNLMQILSKNYQFMDRIEEYNSIRKEKNLSYKTVDELYVSPAVKRQIWQTLKVVKELQKVMGCAPKRVFVEMARGEQGNQKDKRRDSRKKQLIDLYKKCKEEERDWIEELNKNEDQQLRSDKLYLYYTQKGRCMYSGEIIQLEDLWDNTKYDIDHIYPQSKTMDDSLNNRVLVKKEYNAAKSDEYPIKESIRKARKLFWKSLLDEGFITKEKYERLIRNTALTPDELAGFINRQLVENRQSTKAVAEILKQVFPDSEIVYVKAKNVSEFRQDFTPDLLKVRDMNDLHHAKDAYLNIVVGNSYYTKFTKNAAWFIKENPGRSYNLKMMFKGDKDVIRNGEVAWKAGNNGTIVTVKNVMKKNNILVTRRTYEVKGGLFKQQPIKKGKGQLPLKESDNRLNNLKKYGGYTEIAGSYYLLVKSIDKKGKIKKTIEYIPIYLRETLENNKEKIIYYLKERGLINPQILLKIKTDTLFKINGSYIWISGRKTNYLIFKNANQLVLENTNAIILKNIIKFLQRKAENKNLQITHNDKLGEKELCQVYDVLSKKLEIPVYSAILTSEMEAVKKGREKFIELSREEQCNTIKKILHIMQCRSARENLREIGGGTEAGRILINKNIDKYKQISIINQSPTGIYEEEIDLLKL

SEQ ID NO: 17581 - protein, 1342 aa, unidentified
  REGION 1..1342: note = Cas Enzyme sequence
MNQEYYMGLDMGTGSLGWAITDTDYHILRRHGKALWGVRLFESALTAEERRSFRIARRRLDRRNWRIQILQELFSEEISKVDLGFFQRMKESKYYPEDKKDINGKCPELPYALFVDKNYTDKEYHREYPTIYHLRKMLMETEEMPDIRLVYLGLHHMMKHRGHFLLSGDISKIKEFKGTFLQLEENLKKEELNWTLELSDDEIQFIENTLKDRMHTKSVKKSRLIKQLNAKTTCEKAILNLISGGSVKLSDIFENSELDGCENPKISFSDTGYDDYIGTVEADLVEQYYIIESAKAVYDWSVLVEILGDSSSISEAKVKLYEKHKADLRYLKKIVRKYLPLEYKHIFIDTEEKLNNYVAYIGMTKKNGKKNDLQSKKCSKEEFYDFLKKNVIKKISDQEVVSYLEKELEQGTFLPKQVNKENSVIPYQVHMYELRKILDNLSGKSSFMQENKEKILQLFEFRIPYYVGPLGRNEEGTEGKFTWAVRKNNEKIYPWNFKDVIDIEESAEKFIRRMTNKCTYMLGEDVLPKDSLLYSKYMVLNELNNLRLNGEKISVELKQRLYKEVFCCYRKVTIKKLKNYLIREGIVDKNVEITGIDGDFKAQLTAFHDFKEKLTGVTLSQKEKEEIILNIVLFGDDKKLLKQRVMRMHPELTEKQIKSISMLSYKGWGRLSKAFLENITTPAPGTEEVWNVITAMWETNDNLMQILSKNYQFMDRIEEYNSIRKEKNLSYKTVDELYVSPAVKRQIWQTLKVVKELQKVMGCAPKRVFVEMARGEQGNQKDKRRDSRKKQLIDLYKKCKEEERDWIEELNKNEDQQLRSDKLYLYYTQKGRCMYSGEIIQLEDLWDNTKYDIDHIYPQSKTMDDSLNNRVLVKKEYNAAKSDEYPIKESIRKARKLFWKSLLDEGFITKEKYERLIRNTALTPDELAGFINRQLVETRQSTKAVAEILKQVFPDSEIVYVKAKNVSEFRQDFTPDLLKVRDMNELHHAKDAYLNIVVGNSYYTKFTKNAAWFIKENPGRSYNLKMMFKGDKDIIRNGEVAWKAGNNGTIVTVKNVMKKNNILVTRRTYEVKGGLFKQQPIKKGKGQLPLKESDNRLNNLKKYGGYTEIAGSYYLLVKSIDKKGKIKKTIEYIPTYLRETLENNKEKIIYYLKERGLINPQIVLKIKTDTLFKINGSYIWISGRKTNYLIFKNANQLVLENTNTIILKNIIKFLQRKAENKNLQITHNDKLGEKELCQVYDVLSKKLEIPVYSAILTSEMEAVKKGREKFIELSREEQCNTIKKILHIMQCRSARENLREIGGGTEAGRILINKNIDKYKQISIINQSPTGIYEEEIDLLKL

SEQ ID NO: 17582 - protein, 1354 aa, unidentified
  REGION 1..1354: note = Cas Enzyme sequence
MLKYIKGCLGEKEIRKMRDYYIGLDLGTGSLGWAVTDREYEIMRAHGKALWGVRLFDSANTAEERRGFRTARRRLDRRNWRIELLQELLGEDIGKVDSGFFLRMKESKYVPEDKRDVNGNCPKLPYALFVEDGYTDKDYHRQFPTIYHLRKWLMETEETPDIRLVYLALHHMMKHRGHFLFSGNIEKIKEFQETFRQYIGKIREEELDFHLCIEGEELRETENILKDKNLTRSAKKTRLIKLLGAHTACEKAALNLVAGGTVKLSDIFGNSELDACEKPKLSFADAGYDDYAGMIEDELGEQYVIIETAKAVYDWSVLADILGDYRCISEAKAAVYEKHQKDLRHLKELVKENLGRDIYKEVFVKTNEKLPNYSAYIGMTKKNGVKSEMEGKRCDRKAFYDYLKKTVVNAISDESTTEYLRKEMETETFLPRQVTKDNGVIPHQVHLQELDAILENLSGRIPVLKENGGKIRDIFTFRIPYYVGPLNGIVKGGERTNWVRRKKAGRICPWNFDEMVDTGASAEEFIRRMTSKCTYLIHEDVLPKNSMLYSKFMVLNELNNVRLNGEPISVELKQKIYEDLFQRHRKVTRRRLTDYIRREGIAGGDADITGIDGDFKGSLTAYHDFKEKLTGCELSQADKENIILNITLFGEDKALLKKRLGALYPALTEPQKKAICALSYKGWGRLSQRLLEGITAPAPETGEIWTVIRAMWETNDNLMQVLSEKYCFAAAIDEENAGEEPKEITYKTVEQMNVSPAVRRQIWQSLQVIKEICKVMGGPPKRVFVEMAREKTESRRTESRKKRLIDLYKKCREEERDWIEELGNTEEARLRSDKLYLYYTQKGRCMYSGEVIELEELWDNRKYDIDHIYPQSKVMDDSLDNRVLVKKEYNADKTDEYPIRADIRGKMRAFWRILQDGGFISKEKYNRLTRGTGFEPSELAGFIARQLVETRQGTKAVASVLKQVFPETDIVYAKARVASQFRQEFDLIKVREMNDLHHAKDAYVNIVVGNVYYTKFTSNAAWYVKEHPGRSYNLKKMFTSERDVARNGETAWRAGNSGTIATVKRVMGKNNILVTRRSYEVKGGLFDQQLMKKGKGQVPIKGRDERLADIDKYGGYNKAAGTYFMLAESEDKKGAKIRSVEYVPLYLCKCIEKDEEAAKEYLQKERGLKNPSILIAKIKIDTLFKVDGFYMWLSGRTGNQLIFKGANQLILSEPDMRILKKVLKYVNRKKENKNAVLGEHDQLPETDLIRLYDVFLDKIENTVYHVRLSAQQGTLTKNKDTFCELSNEDKCIVLSEILHLFQCQSSTSNLKLIHGPNEAGKLVLNNIISKCNQISIIHQSLTGIYEQEIDLKKI

SEQ ID NO: 17583 - protein, 1340 aa, unidentified
  REGION 1..1340: note = Cas Enzyme sequence
MKTDYFMGLDMGTGSLGWAVTDSSYHLCRAHGKDLWGVRLFETAQTAEERRVFRCNRRRLDRRKRRIQLLQDIFAPEIYKIDPGFFLRLKESRYLPEDKKNLEGKTPELPYALFVDKKYTDKDFHKEYPTIYHLRLRLMQDRTPADVRLVYLALHHLIKHRGHFLFAGIEADKVTDFSAAFSEFLRIVQEQELDISFTPDEESSQIIKETLQNTNFTRSKKSTELIKGLKASTGCEKALLKLISGCKVKLSAVFDDPGCDAYEKPQVCFAESSYEDYAAILEDELEDRFIVIAAAKALYDWSVLVNILGEASTVSEAKVGIYEKHRRDLKYLKHLVKTNLTREDYQDLFVKAGAKKNNYCAYIGMTKKNNKKVVLEEKRCTKEDFYAYLKKEIYSKVQENPEAEYLLEELEKGTFLPRQVSKDNGVIPYQLQFLELQKILKNAVEYLPFLKEESEKIQQIMTFRIPYYVGPLNGKKEGQNTFAWAVRKNNEPVYPWNFEEVIDTEASAEQFIRRMTNKCTYLPEEDVLPKESLLYSKFMVLNELNNLRINGTKISVELKQELYEKLFQRYRKVSAKKLRDYLVRNGITEKDAEISGIDGDFKGTLRAYHDFKEKLTGVELTEAEKETIILNITLFGEDKVLLKKRMQRLLPNLTEGQKKAIVTLNYSGWGRLSREFLEEVQAPNPESGEILSIIRALWETNANLMQLLSNQYGYQEILEQMRADWTGHKLDYQTVEELYVSPAVKRQIWQTLQVVKELKKVMGGEPKRVFLEVAREKMESGRTVSRKKHLKDLYLSCKSEERNWLAELDRHEEHSYRSDRLFLYYTQKGRCIYCGKPIDLGHLWDVNMYDIDHIYPQSKVMDDSIRNRVLTCRTCNAEKTDHYPLKAEIRQKMRPFWDSLKAGNFIEEEKWKRLIRSEEFTSTELAGFIERQLVETRQSTKAVADILKQAMPETEIVYVKAKNVSTFRQDFNFVKNRDVNDFHHAKDAYLNIVVGNTYFVKFTKNASWFIERNPGRSYNLKRMFTSDYDVISNGEIAWKAGNSGTITTVRKMMKKNSVLFTRRSFEVSGGLFDQQLMKKGKGQVYVKSGDERLRSIEKYGGYNKATGAYFMLVESEGKKGVKKRTIEFVPLYRKAELEASEEKMLEYLRTEIGLKEPHVLLHKIKTDTLFQADGFKMHLSGRTGKQLVFKGANQFLVAEDYERLLKKVGKVTEQLKTNKNYKINDYDGITEEGLKALYSEFLSKLQKAPYGNRLGTQAETLENGKEKFDKLSLENKCQVLSEILHLFQCNSSAADLSKLGGPGHGGILVLSNEITKCNKISIIHQSPAGIYEQELDLKTI

SEQ ID NO: 17584 - protein, 1375 aa, unidentified
  REGION 1..1375: note = Cas Enzyme sequence
MQTGYYLGLDIGSNSVGYAVTDENYVIKKFNKKAMWGSHVFEEGKQSAERRIFRASRRRLQRKKQRLQLARELFAKEIAKVDEDFFKRLDESALHRIDKTIDTKYSLFDDIKFNDKSYHKDYPTIHHLIMDLINTTESKDIRLVYLAVSYILSNRGHFLIEVDKNDIKNVILFDNVYSSFRYFFLENEIESNWTDDIKDELAEILKKKIVKKDKQKQIKELVFSNKKKLDKSEESIIKAITGADIKLSDLCNNNMYDDIENNTISLADSDFDEKLASLSEELEDIDFDLVTRIKAIYDWSVLSNILKEKEFISEAKMEIYEKHRKDLKLLRDLVKKYIPKKYNEIFKASIDKLDNYTAYSGNFKSVSNKKLEEKESNAKENSIKALAYMKTDNEKFCKYIKNVLKDIEVNGEDRAKFDELMSRLELKNEFMPKQIHTDNGVIPYQVYRHELKELLENMSNFHTFLKEKDGDGLTIIDKLLSIIEFRIPYYIGPLNDYHKKFSWIKRKADGRILPWNIHEMIDYEQSEEAFIRKMTTKCTYLAGEDVICKNSLLYCKYMVLNEINNIKISDYPITIECKQHLYKDLFENSQKKITKKRLKDWLVSNNYMQAHDEVRGIDDDIKSSLSSYHKFRKLLTQGILNEAQVENIISRISFTTDKKRLQEYLKTEYPFLIEEDIKYIANMKFKDYGRLSYKLLSGIQARIPETGEYVTLVGALWNTNYNLMQLLSQQFGFYKQIDLHNKEYYEQYPTNINTMLEEMYISNAVKRPIYRTLDIVKEIKSIMKNEPKKIFIEMARGEQEKKRTKSRKQQIKDLYDSLDSELKEQNKEIIKKLDNEPDDRLKSERYFLYYMQLGRCMYTGEKIDLSSLIDNTYDIDHIYPQSKVKDDSVHNNKVLVMRNANGLKGDIYPINQDIQNARKGFWTMLESKNLITKEKLYRLTRMTGFADEELAGFINRQLVETRQSTKAVARILENIFPNSEIVYVKAGLVSEFRHQFDMLKSREINDLHHAKDAYLNIVIGNVYNVKFTKNPLNFIKSKEKYSINIKEKNGLLSRDIKRNGEIAWIADGTTISQVKKTMSKNNINYVRYAFCRKGGFFDQMPLKAPHKDNALIPRKKHLPTDIYGGYSDTTASFFTLVKHSENGKKCISIKPVELLYADKFINDDEFAVEYCKSKLGLNNPELINNRKIIKINAILELDGFRANIASKSNGGRTIVLSSNVPLIIPYSYEKYTKRIIAIIEKAKKNNNEIKINEQFDKITKEQNIELFELLLEKCNQNIFKKVSAYSKVASILNGGKNKFLNLSIEEQAKNLSNIIKVFNTGRTVGCDLQKIGGSKAGAVITLNSKITDTKHSSIEIIDQSPTGLFEKKSGNLLEL

SEQ ID NO: 17585 - protein, 1375 aa, unidentified
  REGION 1..1375: note = Cas Enzyme sequence
MQTGYYLGLDIGSNSVGYAVTDENYVIKKFNKKAMWGSHVFEEGKQSAERRIFRASRRRLQRKKQRIQLARELFAKEIAKVDEDFFKRLDESALHRIDKTIDTKYSLFDDIKFNDKSYHKDYPTIHHLIMDLINTTESKDIRLVYLAVSYILSNRGHFLIEVDKNDIKNVILFDNVYSSFRYFFLENEIESNWTDDIRDELAEILKKKIVKKDKQKQIKELVFSNKKKLDKSEESIIKAITGADIKLSDLCNNNMYDDIENNTISLADSDFDEKLASLSEELEDIDFDLVTRIKAIYDWSVLSNILKEKEFISEAKMEIYEKHRKDLKLLRDLVKKYIPKKYNEIFKASIDKLDNYTAYSGNFKSVSNKKLEEKESNAKENSIKALAYMKTDNEKFCKYIKNVLKDIEVNGEDRAKFDELMSRLELKNEFMPKQIHTDNGVIPYQVYRHELKELLENMSNFHTFLKEKDGDGLTIIDKLLSIIEFRIPYYIGPLNDHHKKFSWIKRKADGRILPWNIHEMIDYEQSEEAFIRKMTTKCTYLAGEDVICKNSLLYCKYMVLNEINNIKISDYPITIECKQHLYKDLFENSQKKITKKRLKDWLVSNNYMQAHDEVRGIDDDIKSSLSSYHKFRKLLTQGILNEAQVENIISRISFTTDKKRLQEYLKTEYSFLIEEDIKYIANMKFKDYGRLSYKLLSGIQATIPETGEYVTLVGALWNTNYNLMQLLSQQFGFYKQIDLHNKEYYEQYPTNINTMLEEMYISNAVKRPIYRTLDIVKEIKSIMKNEPKKIFIEMARGEQEKKRTKSRKQQIKDLYDSLDSELKEQNKEIIKKLDNEPDDRLKSERYFLYYMQLGRCMYTGEKIDLSSLIDNTYDIDHIYPQSKVKDDSVHNNKVLVMRNANGLKGDIYPINQDIQNARKGFWTMLESKNLISKEKLYRLTRMTGFADEELAGFINRQLVETRQSTKAVARILENIFPNSEIVYVKAGLVSEFRHQFDMLKSREINDLHHAKDAYLNIVIGNVYNVKFTKNPLSFIKSKEKYSINIKEKNGLLSRDIRRNGDTAWLADGTTISQVKKTMSKNNINYVRYAFCRKGGFFDQMPLKAPHKDNALIPRKKHLPTDIYGGYSDTTASFFTLVKHTEKGKQCISIKPVELLYADKFINDDEFAVEYCKSKLGLNNPELINNRKIIKINAILELDGFRANIASKSNGGRTIVLSSNVPLIVPYSYEKYTKRITAIIEKAKKSNNEMKINEQFDKITKEQNIELFELLLEKCNQNIFQKVSAYSKVASILNGGKDKFLNLSIEDQVKNLSNIIKVFNTGRTVGCDLQKIGGSKAGAVITLNSKITDTKHSCIEIIDQSPTGLFEKKSGNLLEL

SEQ ID NO: 17586 - protein, 1345 aa, unidentified
  REGION 1..1345: note = Cas Enzyme sequence
MIKGDYYLGLDIGTNSVGWAVTDENYNLVRAKGKDLWGVRLFEEASTAEDRRSHRTSRRRTDRKRARLQLLREIFEEEVEKIDKGFFNRMDESKYWLQDKKTEGKYALFNDGDFTDKDYFNDYPTIFHLRKALMEGNTSGDIRLYFLAINQMMKRRGHFLFEGQKFSNVPDVEGVLDDLHRVLTESPFDLDIDEDFIQEFRDIIEEFDLKKTEKNNMFKKLINDLNLEKVQIKQLTAITRLVVSGKAPLSDIFNNPSLKEEEVKDVEFDGDKFEEKGDEIEEILGGDFELIQILKRVYDYSKLKEVLSDYTSISQAQVAKYQKHAVDLVKLKKLIRKYDDKNKTSYKEVFVKTDQKCNYVNYVGSTNKNGRKISVKKCTSEDFLKYLGKKLKSICDSEDPSYLHIANDIEKGIFLPKQIVSTNGVIPYQVHHYELQAILGNMVLDHPEFLKEDEDGIKLVDKIDKLFRFRIPYYVGPLNPAHKGEVGANSWIIKREGYEDVQVRPWNFDKVVDAQACEEEFIKRLTNQCTYLPDQKVLPKESILYSEYMVFNELNNLKINGVKPSGALKEKIFEELFCRYKTVKQKKLRSWLIANNYADRDVLLGGFDDDFKSSMKSLIEMRSILGDDFDREMAETIIEWITIHAGNADVIKGKIKKVFPSLDDDKCKKLSVLKYKDWGRFSRKFLMSFEGADIETGEVGTIIHFLREKDDNLMQLLSKRYTFEEELFRYKSKFLKDGVSYDMLDDLYVSPAVRKMIWQVISITEELRKVVGSDPKRIFIEMARGKEDRPERKESRKNQLIELYKSIKKESRDWVGEIDSKDHADFRKERLFLYYTQMGKCMYSGETIDLAQLEDKNLYDVDHIIPRSLKKDDSALNNKVLVKRDLNQHVKKNYYPVPEQFRRSQSGLWKMLLDKKFITKTKYERLIRNIPLSDEELAEFIERQLVETRQTTKVVADIFKQAYKESRIVYVKSRLVSEFRQDFDLLKLRDINDLHHAHDAYLNIVVGNGYYTKFTGNALQFVKKNRGNYSLNKLFKGEIKGPGGKTVWDVATGLKIVRKNLDKPSVLFTREAYEGKGELFNATIVGKDEIKTGTDYLPLKKDSRLEDIAKYGAYKSISGAYFFIVEHQVRKDRIMTIEYVPVYLKESIRNNRNALTEYCKENLGLKDPKILVDKVLMKNLVQINGFRYTLNGRTGKQIKLQPAHQPFWRQQEVDKLKMVLGALDKSEKFGRDLCEDIEDDLMIYLFNKIQDKLKKIPYKNRINIPENILEYSVESSKLSKMEKCKLVKEMLNLVKPTLQPMDSKMIGGAVKSGVTLTSKTISNTEEFKLIHQSITGIYEKEVKII

SEQ ID NO: 17587 - protein, 1345 aa, unidentified
  REGION 1..1345: note = Cas Enzyme sequence
MIKGDYYLGLDIGTNSVGWAVTDENYNLVRAKGKDLWGVRLFEEASTAEDRRSHRTSRRRTDRKRARLQLLREIFDEEVEKIDKGFFNRMDESKYWLQDKKTEGKYALFNDGDFTDKDYFNDYPTIFHLRKALMEGNTSGDIRLYFLAINQMMKRRGHFLFEGQKFSNVPDVEGVLDDLHRVLTESPFDLDIDEDFIQEFRDIIEEFDLKKTEKNNMFKKLINDLNLEKVQIKQLTAITRLVVSGKAPLSDIFNNPSLKEEEVKDVEFDGDKFEEKGDEIEEILGGDFELIQILKRVYDYSKLKEVLSDYTSISQAQVAKYQKHAVDLVKLKKLIRKYDDKNKTSYKEVFVKTDQKCNYVNYVGSTNKNGRKISVKKCTSEDFLKYLGKKLKSICDSEDPSYLHIANDIEKGIFLPKQIVSTNGVIPYQVHHYELQAILGNMVMDHPEFLKEDEDGIKLVDKIDKLFRFRIPYYVGPLNPAHKGEVGANSWIIKREGYEDVQVRPWNFDKVVDAQACEEEFIKRLTNQCTYLPDQKVLPKESILYSEYMVFNELNNLKINGVKPSGALKEKIFEELFCRYKTVKQKKLRSWLIANNYADRDVLLGGFDDDFKSSMKSLIEMRSILGDDFDREMAETIIEWITIHAGNADVIKGKIKKVFPSLDDDKCKKLSVLKYKDWGRFSRKFLMSFEGADIETGEVGTIIHFLREKDDNLMQLLSKRYTFEEELFRYKSKFLKDGVSYDMLDDLYVSPAVRKMIWQVISITEELRKVVGSDPKRIFIEMARGKEDRPERKESRKNQLIELYKSIKKESRDWVGEIDSKDHADFRKERLFLYYTQMGKCMYSGETIDLAQLEDKNLYDVDHIIPRSLKKDDSALNNKVLVKRDLNQHVKKNYYPVPEQFRRSQSGLWKMLLDKKFITKTKYERLIRNIPLSDEELAEFIERQLVETRQTTKVVADIFKQAYKESRIVYVKSRLVSEFRQDFDLLKLRDINDLHHAHDAYLNIVVGNGYYTKFTGNALQFVKKNRGNYSLNKLFKGEIKGPGGKTVWDVATGLKIVRKNLDKPSVLFTREAYEGKGELFNATIVGKDEIKTGTDYLPLKKDSRLEDIAKYGAYKSISGAYFFIVEHQVKTDRVITIEYVPVYLKESIKNNKNALLNYCIKDLELVKPRVIVEKVLMRSLAQINGFRYTLNGRTGNRITVQPAHQPFWTQQEVDKLKKVLGTLDKSEKFGRDLCEDIEEEVIVHLFNRIQDKLSKPPYSNRINLPKIALDLNIEETDLSKNEKCKLIKEVLNLVKPTLQPMDCKMIGGAAKSGITLTPKMISRANEFRLIHQSITGIYEKEVKII

SEQ ID NO: 17588 - protein, 1008 aa, unidentified
  REGION 1..1008: note = Cas Enzyme sequence
MTAANGFVLGVDLGVRSVGLALIDPDAKEIIHTAVRVFPPGVAGDFESGRDESNNKKRREARLARRQTERRARRLRKIYHLLQAHGLLPEGEAAESLRALDQQLAAKYPPHPGIPYTLRARALDHALEAHELGRALYHLAQRRGFLSNRRAPVKEDKEQGKVVRGIEGLQAEMRAAGARTLGEYFAGLATGRDAEALRIRHRYTHRKMYHDEFDAIWAAQAAHHPEILTEEFRKELWEAIFHQRPLKDQSHLVGACSLLPREKRAPLYHLDVQRWRLLGKINNLKVQDRSPEWLTDSERAKLAQALTTAESMKYAEVRKLLGLPKESRFSIESGGEKEILGNVTYARFAKALNLRWDQMERAEQDGLVEMWASSPDDESFRTALEATGAYSVEEIEALLKVRLPEGYAAFSLAAIRLLLPYLEAGTTEGEAKRAEFPESFAATEPKDKLPPVLEALPELRNPAVTRTLSELRKAVNELVRRYGKPAEIRVELARDLKRNKRERDKLNKKNRENERMREEARKALNEYADTQWSRGAELKYLLAKECGWTCPYSGRPISLKALFDEPLFDVEHIIPYSRSLDDSFQNKTLCARDYNARKGNRTPWEAFHGSDEWDAMVDRVKGFRNRAKLKRFTMEETETAKLLETFSSNELNDTRYMSTLAGKYLGALYGGVVDAEGKRRVRSCAGQVTALLRRLWGLNQILSETPEKSRDDHRHHAVDAAAVAMVTDGMIKAVAEASARAEAAGQRWLKTFEEPWVGFRDALKAQILERTVVSHRPERKLAGALHEETLYGRPHEENGKQVVHIRKPVHLLKKDIENIVDPTVRKRVQLQLGLVGGELERLEQEPPRLASGTPIRKVRVKQVAKTVPLGEGKRRRNVITGDNHHMAVFAIQKRGKTTYVGEVVSRLEAVGRHREGQPVVQKDRGPDKEFLFSLSQGDMVKWEGELWRVRGVTSESNGRLELSRAWDARRKKDMKGGDLQRPPVNTFCSSGGRKVHVTAVGAVREAHD

SEQ ID NO: 17589 - protein, 1340 aa, unidentified
  REGION 1..1340: note = Cas Enzyme sequence
MEQEYYLGLDMGTGSVGWAVTDSEYHVLRKHGKALWGVRLFESASTAEERRMFRTSRRRLDRRNWRIEILQEIFAEEISKKDPGFFLRMKESKYYPEDKRDINGNCPELPYALFVDDDFTDKDYHKKFPTIYHLRKMLMNTEETPDIRLVYLAIHHMMKHRGHFLLSGDINEIKEFGTTFSKLLENIKNEELDWNLELGKEEYAVVESILKDNMLNRSTKKTRLIKALKAKSICEKAVLNLLAGGTVKLSDIFGLEELNETERPKISFADNGYDDYIGEVENELGEQFYIIETAKAVYDWAVLVEILGKYTSISEAKVATYEKHKSDLQFLKKIVRKYLTKEEYKDIFVSTSDKLKNYSAYIGMTKINGKKVDLQSKRCSKEEFYDFIKKNVLKKLEGQPEYEYLKEELERETFLPKQVNRDNGVIPYQIHLYELKKILGNLRDKIDLIKENEDKLVQLFEFRIPYYVGPLNKIDDGKEGKFTWAVRKSNEKIYPWNFENVVDIEASAEKFIRRMTNKCTYLMGEDVLPKDSLLYSKYMVLNELNNVKLDGEKLSVELKQRLYTDVFCKYRKVTVKKIKNYLKCEGIISGNVEITGIDGDFKASLTAYHDFKEILTGTELAKKDKENIITNIVLFGDDKKLLKKRLNRLYPQITPNQLKKICALSYTGWGRFSKKFLEEITAPDPETGEVWNIITALWESNNNLMQLLSNEYRFMEEVETYNMGKQTKTLSYETVENMYVSPSVKRQIWQTLKIVKELEKVMKESPKRVFIEMAREKQESKRTESRKKQLIDLYKACKNEEKDWVKELGDQEEQKLRSDKLYLYYTQKGRCMYSGEVIELKDLWDNTKYDIDHIYPQSKTMDDSLNNRVLVKKKYNATKSDKYPLNENIRHERKGFWKSLLDGGFISKEKYERLIRNTELSPEELAGFIERQIVETRQSTKAVAEILKQVFPESEIVYVKAGTVSRFRKDFELLKVREVNDLHHANDAYLNIVVGNSYYVKFTKNASWFIKENPGRTYNLKKMFTSGWNIERNGEVAWEVGKKGTIVTVKQIMNKNNILVTRQVHEAKGGLFDQQIMKKGKGQIAIKETDERLASIEKYGGYNKAAGAYFMLVESKDKKGKTIRTIEFIPLYLKNKIESDESIALNFLEKGRGLKEPKILLKKIKIDTLFDVDGFKMWLSGRTGDRLLFKCANQLILDEKIIVTMKKIVKFIQRRQENRELKLSDKDGIDNEVLMEIYNTFVDKLENTVYRIRLSEQAKTLIDKQKEFERLSLEDKSSTLFEILHIFQCQSSAANLKMIGGPGKAGILVMNNNISKCNKISIINQSPTGIFENEIDLLKI

SEQ ID NO: 17590 - protein, 1340 aa, unidentified
  REGION 1..1340: note = Cas Enzyme sequence
MEQEYYLGLDMGTGSVGWAVTDSEYHVLRKHGKALWGVRLFESASTAEERRMFRTSRRRLDRRNWRIEILQEIFAEEISKKDPGFFLRMKESKYYPEDKRDINGNCPELPYALFVDDDFTDKDYHKKFPTIYHLRKMLMNTEETPDIRLVYLAIHHMMKHRGHFLLSGDINEIKEFGTTFSKLLENIKNEELDWNLELGKEEYAVVESILKDNMLNRSTKKTRLIKALKAKSICEKAVLNLLAGGTVKLSDIFGLEELNETERPKISFADNGYDDYIGEVENELGEQFYIIETAKAVYDWAVLVEILGKYTSISEAKVATYEKHKSDLQFLKKIVRKYLTKEEYKDIFVSTSDKLKNYSAYIGMTKINGKKVDLQSKRCSKEEFYDFIKKNVLKKLEGQPEYEYLKEELERETFLPKQVNRDNGVIPYQIHLYELKKILGNLRDKIDLIKENEDKLVQLFEFRIPYYVGPLNKIDDGKEGKFTWAVRKSNEKIYPWNFENVVDIEASAEKFIRRMTNKCTYLMGEDVLPKDSLLYSKYMVLNELNNVKLDGEKLSVELKQRLYTDVFCKYRKVTVKKIKNYLKCEGIISGNVEITGIDGDFKASLTAYHDFKEILTGTELAKKDKENIITNIVLFGDDKKLLKKRLNRLYPHITPNQLKKICALSYTGWGRFSKKFLEEITAPDPETGEVWNIITALWESNNNLMQLLSNEYRFMEEVETYNMGKQTKTLSYETVENMYVSPSVKRQIWQTLKIVKELEKVMKESPKRVFIEMAREKQESKRTESRKKQLIDLYKACKNEEKDWVKELGDQEEQKLRSDKLYLYYTQKGRCMYSGEVIELKDLWDNTKYDIDHIYPQSKTMDDSLNNRVLVKKKYNATKSDKYPLNENIRHERKGFWKSLLDGGFISKEKYERLIRNTELSPEELAGFIERQIVETRQSTKAVAEILKQVFPESEIVYVKAGTVSRFRKDFELLKVREVNDLHHAKDAYLNIVVGNSYYVKFTKNASWFIKENPGRTYNLKKMFTSGCNIERNGEVAWEVGKKGTIVTVKQIMNKNNILVTRQVHEAKGGLFDQQIMKKGKGQIAIKETDERLASIEKYGGYNKAAGAYFMLVESKDKKGKTIRTIEFIPLYLKNKIESDESIALNFLEKGRGLKEPKILLKKIKIDTLFDVDGFKMWLSGRTGDRLLFKCANQLILDEKIIVTMKKIVKFIQRRQENRELKLSDKDGIDNEVLMEIYNTFVDKLENTVYRIRLSEQAKTLIDKQKEFERLSLEDKSSTLFEILHIFQCQSSAANLKMIGGPGKAGILVMNNNISKCNKISIINQSPTGIFENEIDLLKI

SEQ ID NO: 17591 - protein, 1340 aa, unidentified
  REGION 1..1340: note = Cas Enzyme sequence
MEQEYYLGLDMGTGSVGWAVTDSEYHVLRKHGKALWGVRLFESASTAEERRMFRTSRRRLDRRNWRIEILQEIFAEEISKKDPGFFLRMKESKYYPEDKRDINGNCPELPYALFVDDDFTDKDYHKKFPTIYHLRKMLMNTEETPDIRLVYLAIHHMMKHRGHFLLSGDINEIKEFGTTFSKLLENIKNEELDWNLELGKEEYAVVESILKDNMLNRSTKKTRLIKALKAKSICEKAVLNLLAGGTVKLSDIFGLEELNETERPKISFADNGYDDYIGEVENELGEQFYIIETAKAVYDWAVLVEILGKYTSISEAKVATYEKHKSDLQFLKKIVRKYLTKEEYKDIFVSTSDKLKNYSAYIGMTKINGKKVDLQSKRCSKEEFYDFIKKNVLKKLEGQPEYEYLKEELERETFLPKQVNRDNGVIPYQIHLYELKKILGNLRDKIDLIKENEDKLVQLFEFRIPYYVGPLNKIDDGKEEKFTWAVRKSNEKIYPWNFENVVDIEASAEKFIRRMTNKCTYLMGEDVLPKDSLLYSKYMVLNELNNVKLDGEKLSVELKQRLYTDVFCKYRKVTVKKIKNYLKCEGIISGNVEITGIDGDFKASLTAYHDFKEILTGTELAKKDKENIITNIVLFGDDKKLLKKRLNRLYPQITPNQLKKICALSYTGWGRFSKKFLEEVTAPDPETGEVWNIITALWESNNNLMQLLSNEYRFMEEVETYNMGKQTKTLSYETVENMYVSPSVKRQIWQTLKIVKELEKVMKESPKRVFIEMAREKQESKRTESRKKQLIDLYKACKNEEKDWVKELGDQEEQKLRSDKLYLYYTQKGRCMYSGEVIELKDLWDNTKYDIDHIYPQSKTMDDSLNNRVLVKKKYNATKSDKYPLNENIRHERKGFWKSLLDGGFISKEKYERLIRNTELSPEELAGFIERQIVETRQSTKAVAEILKQVFPESEIVYVKAGTVSRFRKDFELLKVREVNDLHHAKDAYLNIVVGNSYYVKFTKNASWFIKENPGRTYNLKKMFTSGWNIERNGEVAWEAGKKGTIVTVKQIMNKNNILVTRQVHEAKGGLFDQQIMKKGKGQIAIKETDERLASIEKYGGYNKAAGAYFMLVESKDKKGKTIRTIEFIPLYLKNKIESDESIALNFLEKGRGLKEPKILLKKIKIDTLFDVDGFKMWLSGRTGDRLLFKCANQLILDEKIIVTMKKIVKFIQRRQENRELKLSDKDGIDNEVLMEIYNTFVDKLENTVYRIRLSEQAKTLIDKQKEFERLSLEDKSSTLFEILHIFQCQSSAANLKMIGGPGKAGILVMNNNISKCNKISIINQSPTGIFENEIDLLKI

SEQ ID NO: 17592 - protein, 958 aa, unidentified
  REGION 1..958: note = Cas Enzyme sequence
MQKYYLGLDIGTNSVGWAVTDENYNLCKFGGKRMWGIRLFDGAQTAEERRMNRSNRRRLSRQKQRIDLLQELFAKEIAKVDPTFFIRLNESRLYMEDKSTGTKFPLFADPGYTDKEYYKEYPTIYHLRQELIKNPESHDIRLVYLACHHILKNRGHFLINGSFSDLKNLSFVCREMLDAFNELSKYQLMISDIDALEKILSDRKQQKSAKVKELVQIFECVPREDKSDAKICKEILSNLCKFLVGAKGNITRLFDTDFDEMETSSFSFGDSKYEDSLLPSLEENYPDYANVIQKIKAMYDWSVLVEIMAGENYLSFAKVNSYKKHKENLSILKSLMKKYCTPDVYQRFFYETDEKSSYGNYIGAIHNNGHSHTMKKCDEETFYKSLSKILDKLVVQKTDQDTLEILKKEAKNQTLLPLARTKANGVIPNQIHIQELRAILDNAKTYLSFLNEADEYGTIAEKIIRIAKFKIPYYAGPLSTRHKEQGANTWIVRKQEGRIYPWNFEEMVDLERSNNEFIRRMTNKCTYLIGEDVLPKNSLLYSKFMVLNELNNLKIRGHKISVELKQELYKELFCKKAKVTGKALLVYLKKKDAELTLEDISGFDADFKSSLSIYIDFKNHILREQIDDGKYQSIVENIIKWKTIFDVDSKMIEKLIAREYPNMFSSEQIKKICRLKCRGWGNFSSRFLNGIQGENTETKECFTIIEALWKTNYNLMQLLSKQFTFKDAIDCINADKVGKIDKVTYENTVKDLVVSPANKRAIWQTVQITEEIKKVMKCEPEKIFVEMARGREKEKKRTISRKERLLKLYMDYKDENRDWIKEIESRDEQDFTNRKLYLYYTQIGRCMYSGEEISLEELMQKNSKWDKDHIYPQSKIKDDSLDNLVLARKDINNNKSNKLLPTGIQDKMKKYWKMLLKYGFISKKKYDRLMRTEDFSDEELSGFIERQIVETRQSSKAV

SEQ ID NO: 17593 - protein, 1349 aa, unidentified
  REGION 1..1349: note = Cas Enzyme sequence
MQKYYLGLDIGTNSVGWAVTDENYNLCKFGGKRMWGIRLFDGAQTAEERRMNRSNRRRLSRQKQRIDLLQELFAKEIAKVDPTFFIRLNESRLYMEDKSTGAKFPLFADPGYTDKEYYKEYPTIYHLRQELIKNPESHDIRLVYLACHHILKNRGHFLINGSFRDVKNLSFVCREMLDAFNELSKYQLMISDIDALEKILSDRKQQKSAKVKELVQIFECGPREDKSDAKICKGILSNLCKFLVGAKGNITRLFDTDFDDMETSSFSFGDSKYEDSLLPSLEENYPDYANVIQKIKTMYDWSVLVEIMAGENYLSFAKVNAYKKHKENLSILKSLMKKYCTPDVYQRFFYKTDEKSNYGNYIGAIHNNGHSHTMKKCDEETFYKLLSTLLDKLVVQKTDQNTLEILKKEAENQTLLPLARTKANGVIPNQIHIQELRAILDNAKTYLPFLNESDEYGTIAEKIIRIAKFKIPYYAGPLSTRHKEQGANTWIVRKQEGRIYPWNFEEMVDLERSNNEFIRRMTNKCTYLIGEDVLPKNSLLYSKFMVLNELNNLKIRGHKISVELKQELYKELFCKKAKVTGKALLVYLKKKDTELTLEDINGFDTDFKSSLSIYIDFKNHILREQIDDGKYQSIVENIIKWKTIFDADSKMIEKMIAREYPNMFSSEQIKKICRLKCRGWGNFSSRFLNGIQGENTETKECFTIIEALWKTNCNLMQLLSKQFTFKDAIDCINADKVGKIDKVTYENTVKDLVVSPANKRAIWQTVQITEEIKKVMKCEPEKIFVEMARGGEKEKKRTISRKERLLKLYMDYKDENRDWIKEIESRDEQDFTNRKLYLYYTQIGRCMYSGEEISLEELMQKNSKWDKDHIYPQSKIKDDSLDNLVLARKDINNNKSNKLLSTGIQDKMKKYWKMLLKYGFISKKKYDRLMRTEDFSDEELSGFIERQIVETRQSSKAVAELLEHLNEHTEIVYVKAELVSDFRHDNNMLKSRRINDYHHAKDAFLNIVVGNVYNAKFTANPRNWIKKNRNTNYSIRRVFDYTVKRGSTIVWQGVKDGGHSIDAIKKTMARNDILYTERTYCEQGELFNATLIKKGNPNAIGLKKGLDPMKYGGYSSPKTSAFAFIEFDGKKGRQNHLVEIPVYIANIAARQPEYIKNHLEEKKGYQNVIVKKYPIQKNALIKLDGYPARLRGANEKSITLKNAVQLVLKPEYHETIRNVEKYLEYIDKDESVSKAARFSHTELDKLYDELCFKAENSIYKKRPASQAATLKNGQKTFLAITNLKEKAQVINNIITMFRCDATTTTNLKTIGGSANAGGMQVNKNTLTSQKVVLVHQSITGLFGTEEELL

SEQ ID NO: 17594 - protein, 1349 aa, unidentified
  REGION 1..1349: note = Cas Enzyme sequence
MQKYYLGLDIGTNSVGWAVTDENYNLCKFGGKRMWGIRLFDGAQTAEERRMNRSNRRRLSRQKQRIDLLQELFAKEIAKVDPTFFIRLNESRLYMEDKSTGAKFPLFADPGYTDKEYYKEYPTIYHLRQELIKNPESHDIRLVYLACHHILKNRGHFLINGSFRDVKNLSFVCREMLDAFNELSKYQLMISDIDALEKILSDRKQQKSAKVKELVQIFECGPREDKSDAKICKGILSNLCKFLVGAKGNITRLFDTDFDDMETSSFSFGDSKYEDSLLPSLEENYPDYANVIQKIKTMYDWSVLVEIMAGENYLSFAKVNAYKKHKENLSILKSLMKKYCTPDVYQRFFYKTDEKSNYGNYIGAIHNNGHSHTMKKCDEETFYKLLSTLLDKLVVQKTDQNTLEILKKEAENQTLLPLARTKANGVIPNQIHIQELRAILDNAKTYLPFLNESDEYGTIAEKIIRIAKFKIPYYAGPLSTRHKEQGANTWIVRKQEGRIYPWNFEEMVDLERSNNEFIRRMTNKCTYLIGEDVLPKNSLLYSKFMVLNELNNLKIRGHKISVELKQELYKELFCKKAKVTGKALLVYLKKKDTELTLEDISGFDTDFKSSLSIYIDFKNHILREQIDDGKYQSIVENIIKWKTIFDADSKMIEKMIAREYPNMFSSEQIKKICRLKCRGWGNFSSRFLNGIQGENTETKECFTIIEALWKTNCNLMQLLSKQFTFKDAIDCINADKVGKIDKVTYENTVKDLVVSPANKRAIWQTVQITEEIKKVMKCEPEKIFVEMARGGEKEKKRTISRKERLLKLYMDYKDENRDWIKEIESRDEQDFTNRKLYLYYTQIGRCMYSGEEISLEELMQKNSKWDKDHIYPQSKIKDDSLDNLVLARKDINNNKSNKLLSTGIQDKMKKYWKMLLKYGFISKKKYDRLMRTEDFSDEELSGFIERQIVETRQSSKAVAELLEHLNEHTEIVYVKAELVSDFRHDNNMLKSRRINDYHHAKDAFLNIVVGNVYNAKFTANPRNWIKKNRNTNYSIRRVFDYTVKRGSTIVWQGVKDGGHSIDAIKKTMARNDILYTERTYCEQGELFNATLIKKGNPNAIGLKKGLDPMKYGGYSSPKTSAFTFIEFDGKKGRQNHLVEIPVYIANIAARQPEYIKNHLEEKKGYQNVIVKKYPIQKNALIKLDGYPARLRGANEKSITLKNAVQLVLKPEYHETIRNVEKYLEYIDKDESVSKAARFSHTELDKLYDELCFKAENSIYKKRPASQAATLKNGQKTFLAITNLKEKAQVINNIITMFRCDATTTTNLKTIGGSANAGGMQVNKNTLTSQKVVLVHQSITGLFGTEEELL

SEQ ID NO: 17595 - protein, 1369 aa, unidentified
  REGION 1..1369: note = Cas Enzyme sequence
MEKQDYFLGLDMGTSSVGWAVTNTKYELLRKKGKDMWGIREFDEASSAAERRTNRVNRRRRQRQVVRLGLLKSYFSEEIAKIDPDFFTRLENSKYFLEDKDERVRTKNGVFNDDNYKDVDYYRDYPTIFHLRQALLDIDNKGVKFDVRLVYLALANMFKHRGHFLLNAEGDALNTEQVEVVYKEILDSLENDYEIIIEQKPVQQVIDIIGNTDNGRKKKHEELQKLFEMTKKDKRANELLKCLCGLSANAKLIFDENTEEKVPLCFNDFSYTDKIPELMEQLTEDEYALIEQLKSIYDYAVLAGTMKGHDYLSSVRVELYKKHADDLKLLKALYRKYKTEEEYNKMFRSNADGTYSAYVNSLNSTDAIFKSDEVVEGSKYRRNMKGRKSEDIYATIKKAFKDITEDKDVSFALEQIEKEQFLPKQLTGANGVIPNQVHKKEMERILQNAENYLPFLKDKDESGLTVSERIMKLFTFQIPYYVGPLGENSKTGWIVRKEKGAVLPWNINDKVDMSATSEAFISNLIRTCTYIQGEKVMPKASLAYERYCVLNEINNLCIDGERIDTKLKQQIYKDCFMKGKKVTKKQLCSYLAAQNAIHSEEQVTGIDKSINNSLSSYGKMYAIFGERLKEDTILAAAEDIIYWGTIFGDSKKMFKQKLKKYVEEGIIDENQLKRILGYKFKDWGRFSKALLNLSGCDKSTGEIITLGQAMWEYSLNFMELINSDEFTFREELEKHTKVAMKQLSEFTYEDLEDSYFSVPVKRMIWQTLLVVREIEQVMGCAPKRIFVEMTRTEGEKGEKGRKGSRGNQLIELYKSIKNTESHNWKEEIAAADKDGKLRSKKLFLYYMQMGRDMYTGEEIDLGRLYDDNLYDIDHIYPRHYVKDDSIMNNLVLVNKRANQDIKKDLYPIPEQIKANPKVRELWDTLHKQKLITDVKYARLISNTPFTEKQLGDFIARQLVETGQGTKGVANLLEQLFKDTVIVYAKATNVSDFRRDNGFLKSRIVNDFHHAQDAYLNIVVGNVYYTKFTNNPWNFIRKDYEKDKEKNRYNLAKMFEWNVVRGGETAWIAKRKDEEGTIATVRKMMQKNTPLLTRMNFEKHGKIADATLYSAKKANTKNYIPLKISDERIKDVTKYGGFSSVSIAYFFIVYHREGKKERVTIEGLPLYCKFKVEREANGLERYCEEVLGYGEVKILRRKLKIQSLIELNGYQFHLSGKSQNDLLLRNAMSLYLHEYWTKYIKKIEKVVNAQVIEEVITSEENIKLYDILTDKHINTVYAKRPNSYGKELLKGREKFVALELEDQCVALLQILQLTRIGTTDTNLELIGESKFSGKMRINKNLKTSDKLAIISQSATGLYEKKEWIFDDIVK

SEQ ID NO: 17596 - protein, 928 aa, unidentified
  REGION 1..928: note = Cas Enzyme sequence
MERILQNAENYLPFLKDKDESGLTVSERIMKLFTFQIPYYVGPLGENSKTGWIVRKEKGAVLPWNINDKVDMGATSEAFIGNLIRTCTYIQGEKVMPKASLAYERYCVLNEINNLCIDGERIDTKLKKQIYKDCFMKGKRVTKKQLCSYLAAQNAIHSEEQVTGIDKNINNSLSSYGKMYAIFGEHLKEDAILAAAEDIIYWGTIFGDSKKMLKQRLKKYVEEGIIDENQLKRILGYKFKDWGRFSKALLTLNGCDKSTGEIITLGQAMWEYSLNFMELINSEEFTFREELEKHTKVAMKQLSEFTYEDLEDSYFSVPVKRMIWQTLLVVREIEQVMGYAPKRIFVEMTRTEEEKGDKGRKESRVNQLSELYKSIKNTESHNWKDEIEAADKDGKLRSKKLFLYYLQMGRDMYTGEEIDLSRLYDDNLYDIDHIYPRHYVKDDSIMNNLVLVNRRANQDIKKDLYPIPGQIKANPKVRELWDALHKQKLITDEKYTRLTSNTAFTEKQLGDFIARQLVETGQGTKGVADLLEQLFKDTVIVYAKATNVSDFRRNNGFLKSRLVNDFHHAQDAYLNIVVGNVYYTKFTKKPWNFIRKDYEKDKEKNRYNLARMFDWNVVRGSEIAWIAERKDEKGTIATVRKMMQKNTPLMTRMNFEQHGGIANATLYSAKKAKAENYIPLKASDERMKDVTKYGGFTSATIAYYFIVQHKESKKENITIEGLPLYCKTKVEQDANGLEKYCEEVLGYREVKILRRKLKIQTLLEFNGYQVHLSGKTGNQLILRNAMNLCLPEKWIIYIKKLEKAVNVQIFEDVINSEDNIKLYDMLTDKHANTVYSKRPNAYGEKLLADREKFVVLQFKQQCEALLKMLQLTKIGNTETDLRLIGESEHSGKILISKNLKASDKPAIISQSATGLYEKKEWIFDDIVK

SEQ ID NO: 17597 - protein, 1369 aa, unidentified
  REGION 1..1369: note = Cas Enzyme sequence
MEKQDYFLGLDMGTSSVGWAVTNTKYELLRKKGKDMWGIREFDEASSAAERRTNRVNRRRRQRQVVRLGLLKSYFSEEIAKIDPDFFTRLENSKYFLEDKDERVRTKNGVFNDDNYKDVDYYRDYPTIFHLRQALLDIDNKGVKFDVRLVYLALANMFKHRGHFLLNAEGDALNTEQVEVVYKEILDSLENDYEIIIEQKPVQQVIDIIGNTDNGRKKKHEELQKLFEMTKKDKRANELLKCLCGLSANAKLIFDENTEEKVPLCFNDFSYTDKIPELMEQLTEDEYALIEQLKSIYDYAVLAGTMKGHDYLSSVRVELYKKHADDLKLLKALYRKYKTEEEYNKMFRSNADGTYSAYVNSLNSTDAIFKSDEVVEGSKYRRNMKGRKSEDIYATIKKAFKDITEDKDVSFALEQIEKEQFLPKQLTGANGVIPNQVHKKEMERILQNAENYLPFLKDKDESGLTVSERIMKLFTFQIPYYVGPLGENSKTGWIVRKEKGAVLPWNINDKVDMSATSEAFISNLIRTCTYIQGEKVMPKASLAYERYCVLNEINNLCIDGERIDTKLKQQIYKDCFMKGKKVTKKQLCSYLAAQNAIHSEEQVTGIDKSINNSLSSYGKMYAIFGERLKEDTILAAAEDIIYWGTIFGDSKKMFKQKLKKYVEEGIIDENQLKRILGYKFKDWGRFSKALLNLSGCDKSTGEIITLGQAMWEYSLNFMELINSDEFTFREELEKHTKVAMKQLSEFTYEDLEDSYFSVPVKRMIWQTLLVVREIEQVMGCAPKRIFVEMTRTEGEKGEKGRKGSRGNQLIELYKSIKNTESHNWKEEIAAADKDGKLRSKKLFLYYMQMGRDMYTGEEIDLGRLYDDNLYDIDHIYPRHYVKDDSIMNNLVLVNKRANQDIKKDLYPIPEQIKANPKVRELWDTLHKQKLITDEKYARLISNTPFTEKQLGDFIARQLVETGQGTKGVANLLEQLFKDTVIVYAKATNVSDFRRDNGFLKSRIVNDFHHAQDAYLNIVVGNVYYTKFTNNPWNFIRKDYEKDKEKNRYNLAKMFEWNVVRGGETAWIAKRKDEEGTIATVRKMMQKNTPLLTRMNFEKHGKIADATLYSAKKANTKNYIPLKISDERIKDVTKYGGFSSVSIAYFFIVYHREGKKERVTIEGLPLYCKFKVEREANGLERYCEEVLGYGEVKILRRKLKIQSLIELNGYQFHLSGKSQNDLLLRNAMSLYLHEYWTKYIKKIEKVVNAQVIEEVITSEENIKLYDILTDKHINTVYAKRPNSYGKELLKGREKFVALELEDQCVALLQILQLTRIGTTDTNLELIGESKFSGKMRINKNLKTSDKLAIISQSATGLYEKKEWIFDDIVK

SEQ ID NO: 17598 - protein, 1366 aa, unidentified
  REGION 1..1366: note = Cas Enzyme sequence
MDKKMYVGIDMGTNSVGMAVTDEEYNLYRVKGKDLWCSRLFTEADTAAERRTNRISRRRRQREVARQGVLRKLFADEINKVDEGFFARLDESKYHLEDRDSEQKYTLFTDTGYTDKDYFKDYPTIFHLRNELLHPVKDSYDVRLVYLAIANMFKHRGNFLNESLDADKITSSADEAYRSLVETAMMYSIEFPENINVKKFIDIIGENGVSRSKHLENVCEYLGITKKDKQAYEILKLICGMSGVLINIYGEDVIDEENKKFSICFRDSNYEEKEGEALELLGDEYFELLEAIKEIHDIGMLAGIIKGHKYLSEARVDLYEQHKKDLDMLQHVLKKYDMKAYDEMFRVMKAGNYSAYVGSVNAHSKKIRRNGGDGRTQEEFYKNVKAVLKKFPEDDEEIKTILSEIDSETFMPKQLTASNGVIPNQLHVSELKAILTNAEKYLPFLLGKDESGLTVSERIVELFRFHIPYYVGPIGAQGENVWAKRRSGEENGKVYPWNFEQKIDTQSAAKEFINRMVRHCTYLSGERTLPKQSLLYEKFMVLNELNNLKIAGKKPSVQVKQDIYEKLFKLGKKVTLKQLEEYLCNNSIIASKEDIEGIDGGFNSSLTSVGKFRGVLGDELFTDANQAMAEEIIFWGTVYGNDKKFLKDEIESKYGTVLSKDQIKRILGFKFNGWGNLSKTFLELQGSCECGDCSLIQALWETNHNLMELLSEQYGFKKELDALASNVEKPLTEWTIDDLDNKYLSAPVKRMVWQTIKMLREACELTNKEPDRVFVEMPREHGKENDRKASRKKKLLDLYSALKREDKTWAELKIREIEGKTEADFRIKKLYLYYMQQGRCMYSGEKIELNDLFNNNLYDIDHIYPRHFIKDDSLENNLVLVKKQINNHKSDNYPLESNIRKNMNEFWKTLRDKNFISKEKYSRLIRTEEFTDEEKAAFISRQLVETRQGTKAITQVLKQAFPNTQIVFVKAGIVSDFRKKFDINKVRALNDTHHAKDAYLNIVVGNTYYTKFTNNPMNFIKDARKNPKNDFYRYNMDKIFDYNVIRNGEEAWIADNGKTKQHVLQIMKKNSVTITVKTEEYHGALSNKVTVWSKEKAKGNPDAYMPVKTSDTKAQDVTKYGGITAIANSGYTLVEYKVKGKKVRSLEALPVYLGRSNALTNEDIMQYISAALQKEYAGKEISDLSVRVPFVPQKSKVRVDGFEYYLGGKTGKNIYLNNAMPLYLSWNDEEYLRKIMKAIEIDNYEEIDKYSNAIITEEKNVALFDVLSVKLNSEPYINNRWNICKTLEGKEEIFKNLDIKKQCYVIGQIISWINSAMQNVNLKDVCGSEHSGMQQLNKKISECKECILIHQSVTGMYERRIDLLSI

SEQ ID NO: 17599 - protein, 1367 aa, unidentified
  REGION 1..1367: note = Cas Enzyme sequence
MEENIMDNRDYYIGLDIGTSSVGWAVTDENYKLLRAKGKDLWGVRLFPEAQTAAERRGKRTSRRRLQREKARKAVLKELFAEEIEKIDPCFYIKLKESNLWEEDRSSDNVQPYSLFNDKEYTDREFYRDYPTIFRLRKALIEQYEKFDIRLIFLAILNMFGHRGHFLNHNLDTEKETWDFSTSYSELIDILKVVGIEGMPETVDLKDLQEKLVKKDSSRSAILEDVSQLFNISKKEKQLYSILKLFVGLTVKTFELTGNENLKKEEKNIAICFRDSNYDEKIEDFHNIVGDEYLEVVTKAKEIHDAGLLSSIMGDFNYLSEARVQIYKEHKQDLRNLKELLKEYNRKAYIQLFRKIGKGSYSAYVGSVNSYGKIIRRKKVSDPDVKKSLYDEIKNALNSVPDTNEIKGVILSKIEAGNFLEKQLTAFNGVIPNQVHCKELKAILKNAGKHYEFLNKKDKNGISVSDKIVQLFEFQVPYYVGPIAQQHKNKKNSNVWSVRKEGGKVYPWNFEEKIDLKASAEEFISRMVRRCTYFSEESTLPNQSLLYEKFKVLNEINNLKVDGKPISVKAKQQLFEKEFLKGKKVSGKRISEFLQSLGEMGKDSVLSGIDGNCNQALTSIGKFYGVFGDDVYNDSYQTMIEEIIFWATIYGDDKKFLREKIVEKYSDRIDDKKLKRILGFKIKGWGNLSKEFLELEGTSKEDGTVESIIQALWNTNSNLNALLSSKYTYVDELNKRISKVEKTLSNWQIEDLDDMYLSAPVKRMVWQTMKIVEELVSVMGCSPKRIFVEMTRGDGIKGKKEISRKEKLSALYKAIDKEQKIWTEEIANKPEQEFKSKKLYLYCLQKGKCMYSGDPIPFSDLMDNNLYDIDHIYPQSLVKDDSIENNLVLVKKEINSGIKRDAPISSDIQKKCWRFWKTLREQGFMNQEKYSRLTRKLQTFTDEEKAGFINRQLVETGQATRCITQIFLQGLPESKIIFNKAALVSDFRHKFDIPKARCINDFHHANDAYLNIVVGNAYYVKFTNNPRNFIENASVNKDAYSKYHISKFFEYNIASREETAWVVSDENKTSTISTVKTTLAKNSPLITYKCKEGHGSLFDDTIYGKHKASQESYIGIKTKNSPLANVYKYGGKTSISTRGYCLIEYTVGQKKARKLESIPMYLGSITTLTEDTLQQYYIEKLQYDDVAIIKKFIPMDSIVEVNGFKYRLGGRTGNRIMVYPLYGLILDEKWNKYYQKIEKAISKKYYDEIDKKTDKNILSKAENIELYKILMDKFENSIFSKRVNTLDDTLKKGEIKFTQLSIEEQCNILESIALNFSKSQPSNLSNIEGSGKAGVCLISMEITKYQTCILINQSCTGLFVYKEDLLR

SEQ ID NO: 17600 - protein, 1313 aa, unidentified
  REGION 1..1313: note = Cas Enzyme sequence
MSFKENSKIYYGLDIGTDSVGWSTTNEKYELLRYKNNLMWGVSLFEAASLAEERRGHRTQRRRYDRRQQRVALLGELFAKEILKTDPDFFLRLKESSLYPEDRTSKNVNTYFDDADFKDSDYFKMYPTVHHLIKELSESNKPHDVRLVYLACAFIVAHRGHFLNGADENNVQAVLDFDSSYCEFTDWFKSNDIEDNPFSESVKNEFSVILRKKIGITAKEREIKNLLFGTTKTPDCYKDEEYPIDIDVLIKFISGGKTNLAKLFRNPSYDELDIQTVEVGKADFADTIDLLASSMEDTDVPLLSAVKAMYDWSLLIDVLKGQKTISDAKVCEYEQHKSDLKALKYIVRKYLDRAQYDEIFRTAGEKPNYVSYSYNVTDVKLKQLPSNFKKKNSEEFCKYIKSKLEKIKPESDDEAVYNELIEKCNSKTLCPKQVTDENRVIPYQLYYHELSMILDKASAYLDFLNKTEDGISVKQKILTLMKFRIPYFVGPLVKRNETDNVWIVRKAEGRIYPWNFENMVDFDKSEDGFIRRMTCKCTYLAGEDVLPKYSLLYSKYTVLNEINNIKVNGEKISPELKQDIFNELFMKTSRVTVKKITELLKRKGAFSEEKGDSLSGVDINIKSSLKSYLDFRRLLENGSLSENDVERIIERITVTTDKPRLVSWLKAEYSDLPAEDIRYISRLSYKDYGRLSAKLLTGCYELDTNTGEIGGRSIIDFMWAENINLMQILSDSYGYKSFIEEENKKYYMINPTGSIAQTLREMYVSPSVSRAIIRTMEIVKELRKITKKDPDKIFVEMARGGKPEEKGKRTSSRREQIEKLYDSAKAFVSDEDISHMRSQLGSLSDEQLRREKYYLYFIQFGKCMYSGEAIDFSRLGDNHCYDIDHIFPQSKINDDSLHNKVLVKSQLNGEKSDDYPIKAEIRNKMHPLWKNLFYRDPKNPADKVKYERLTRSTPFTEDELAGFIERQLVETRQSTKAVATLLKEMFPDSKIVYVKAGQVSEFRHDFDMLKCREINDLHHAKDAYLNIVIGNVHDVKFTSNPMNFVKNADKHYTIKVKETLKHKVSRNGETAWNPETDFDTVKRMMSKNSVRYVRYCYKRKGGFFNQNPDRAGNPDLARLKKDLDPVKYGGYNSKSISCFSLIKCTGVGAVIIPVELLCEKRYFSDDSFASEYAYSVLKNALPAKNIAKISIDDISFPLKRRPIKINTLFEFDGYRVNIRSKDSYHYFTISSAMAAIYSKDTSDYIKAVSSYIDKSDKGSKFKPGEAFDVLSNLKVYDEIAKKCISEPFSKISKLAEAGKRWKKEEISLQNCLL

SEQ ID NO: 17601 - protein, 1313 aa, unidentified; identical to SEQ ID NO: 17600
  REGION 1..1313: note = Cas Enzyme sequence

SEQ ID NO: 17602 - protein, 1396 aa, unidentified
  REGION 1..1396: note = Cas Enzyme sequence
MEMQTAKQLISSHLKGYPIKDYFVGLDIGTSSVGWAVTNKLYELLKFRSHKMWGSRLFDEGESAVGRRSFRSIRRRLERRKLRLKLLEELFADAMAQVDSTFFIRLHESKYHYEDKTTGHSSKHILFIDKDYTDQDYFKEYPTIYHLRAELMKSGTDDIRKLFLAVHHILKYRGNFLYEGATFDSNASTLDDVLKQALENITFNCFDCNSAISSIGQILMDAGKTKSDKAKVIERLVDTYIATHTEGISSKTQKEHVKEDKKRLKAFASLVLGLSASLTDLFGSVEELEDDLKKLQITGDTYDDKRDELAKAWGDKIHIIDDCKSVYDAIILMSIKEPGLTISESKVKAFNKHKEDLVILKSLLKTDRSIYNTMFKADEKGLHNYVHYIKQGRKEETSCNREDFYKYTKKVVEGLPDSKDKEYILSEIELQTLLPLQRIKDNGVIPYQLHLEELKTILKTCGAKFPFLNEVADGYSVAEKLIKMLEFRIPYYVGPLNTYHNVEKGGFAWAVRKASGRVTPWNFDDKIDREKSAAAFIKNLTNKCTYLLGEDVLPKSSLLYSEFMLLNELNNIRIDGKPLEPGVKEHLIEAIFKQDHKKMTKNRIEQFLKDNNYIPKKHKPDITGLDGEIKNDLTSYRDMVRILGTNFDRSMAEDIIMDITIFGESKKMLRETLRNKFASHLDDETIKKLSKLRYRDWGRLSKKLLNGIEGCDKAGDGTPETIIELMRNFSYNLMELLGDKFSFMERIQEINDKLTEGQVVDPQDIIDELALPPAVKRAVWQALRIVDEVIHIKKALPSRIFVEVTRSNKTEKKKKDSRQKRLSDLYAAIKKDEALLSGLKDTEFEGLKSGLASYDDAALRSKKLYLYYTQMGRCAYTGNIIDLNLLNTDNCDIDHIYPRSLTKDDSFDNLVLCERTANAKKSDTYPIDNTIQTNQKAFWSFLKHQGLISERKYERLTRNTPLTADDLSGFIARQLVETNQSVKAATTLLRRLYPDVDVVFVKAENVTDFRHDNNFIKVRSLNHHHHAKDAYLNIVVGNVYHEKFTRNFRAFFKKNGANRTYNLAKMFNYDVKCTNAKDGKAWDIKTSMDIVKKMMDSNDVRVTKRLLEQSGALADATVYKATVAAKANDGAYIGMKTKSSVFADVTKYGGMTKIKNAYSIIVQYIGKKGEVVKEIVPLPIYLTNRNITDQDLIDYVASITPEAKDISIIYRKLCINQLVKVNGFYYYLGGKTSNSICIDNAIQVLLSNEFLIYAKLLDKVNTLRKSDPSINIQKISTLSPFTKEQISITINDNLKFYDYLVEKLNSNIYIKMKGNKASDLIDIGREKFKGIDVSSQCILLLEILNMLTNMKTTYDIKLLGFSTSRTKIALKVSTLDEFKIINQSITGLYSSEITIV

SEQ ID NO: 17603 - protein, 1398 aa, unidentified
  REGION 1..1398: note = Cas Enzyme sequence
MSSSKQGLRRYHLGLDIGTNSIGWTAIDDHFSLLRVKGKNAIGVRTFKEGETAADRRGFRTARRRLSRRRWRLQFLDDFFAPYLAEVDPNFLARLKQSDISAKDPAKNQEFMGKLLFPDQEATVNGNGYPTLIQMRKEMSAEKAADFPVFNIYQLRYALMNEKRKFDLREIYLAVHHIVKYRGNFLNNTSVDKFKANQIDFNKSFETLNDLFRQVQPTTSFQIDLTKVDELGKLLLDTKQKKADRQKAAAKLLPLIEDGTDKEIVKAHQQTAREISKLILGYKAKVGLILQNNLDQTLDMSTENSDDQLMQIAEELDDYQKELINQLSLLYSQIMLNEIVPNGETVSASMLNRYYKHRRQLKELKTYGAAQDKKTREQLDHLYAEYIGQVPKDSKFDFTKDLKKLMDKSDLEQKIKGEIEAGDYLPKQRTSANGVIPHQMHQQELDQIIENQKEYYPWLAEPNPVEKNIKNKNAKYYLDQLVSFRVPYYVGPMITLADQQKTSKASFAWAVRKEAGKITPWNFYDKIDREKSANNFIKRMTHKDTYLLSEDVLPASSLLYQKYTVLDELNNIRVNGRKLQPALKQAIYTDLFKKRKTVNLKALTNFLTVHEPTLTKPKIKGLSNGRSFNSSLGTYIDMSKILGNRVDDLNYRDDIEKIIEWSTVFEDSEIYGDKLQEIQWLTNKQREKLVRKRYQGWGRLSKKLLTGITDENGQRIIDLMWDTNKNFMQIVHQPVFEEQITELNQQLLQDADKAPLEVVDDILADAYTSPQNKKAIRQVVKVVADVVKAVGNAPASISIEFARNEDRNKELKNSRRRSIEKLYHETAEKLVKQTNLLEELGNVKDLNDRYYLYFTQAGRDMYDGTPINIDEISTHYEIDHILPQSFLKDNSLDNRVLVKKSENAAKSDRVPAKIYGAKMRDFWKQLKESQLISNRKYLNLTTDPEHVDKYQMQGFVHRQLVETRQIIKLAANIFGSLYPDSAVIETRAEFTKQLREKFSLYKVRDVNDYHHAVDAYLTAFAGHYLYQRYPKLRPMFVYGDYAKIYADDLKRLRSVNLFHDLEKDQYNSGTAVNPETKEKIVDVDWLSDYVSKIQRFKYMLISKAVYTKHGQMYGATIAPVSEAVTMSNPIKIKNSKPVDIYGAYTKEVAAYMAIVRVNGKKPKYKVVSVPVRMLQRLKMAEQKSHDQYMQTLHDVLSRNFTSFKKNRKTGLKEAVVKDFDVLVPCVRYNQLVIDGKAKFTLGSHEYQHNAKQLVLSVRSLETLANNFEYVRKHPDKADERMTMLYDDILDRVNRYFTLYDKNKFREKLNAGRDKYLKLPTFSQFENNKKTAIGKTEAVINILRGLHANAVTSDLKCLDISTPFGKMQSQSGIELSENAKLVYQSPTGLFSREVLLKDL

SEQ ID NO: 17604 - protein, 1398 aa, unidentified
  REGION 1..1398: note = Cas Enzyme sequence
MMSSSKQGLRRYHLGLDIGTNSIGWTAIDDHFSLLRVKGKNAIGVRTFKEGETAADRRGFRTARRRLSRRRWRLQFLDDFFAPYLAEVDPNFLARLKQSDISAKDPAKNQEFMGKLLFPDQEAASDGNGYPTLIQMRKEMPAEKAADFPVFNIYQLRYALMNEKRKFDLREIYLAVHHIVKYRGNFLNNTSVDKFKADQIDFNKSFETLNDLFRQVQPIAPFQIDLTKVDELGKLLLDTKQKKADRQKAAAKLLPLIEDGTDKEIVKAHQQTAREISKLILGYKAKAGLILQNNLDQTLDMSTENSDDQLMQIAEELDDYQMELINQLSLLYSQIMLNEIVPNGETVSASMLNRYYKHRRQLKELKTYGAACDKKIREQLDHLYAEYIGQVPKDSKFDFTKDLKKLMDKSDLGQKIKGEIEAGDYLPKQRTSANGVIPHQMHQQELDQIIENQKEYYPWLAELNPVEKNIKNKNAKYYLDQLVSFRVPYYVGPMITLADQQKTSKASFAWAVRKKTGKITPWNFYDKIDREKSANNFIKRMTHKDTYLLSEDVLPASSLLYQKYTVLDELNNIRVNGRKLQPALKQAIYTDLFKKRKTVNLKALTNFLTIYEPTLTKPKIKGLANGRSFNSSLGTYIDMSKILGNRVDDLNYRDDIEKIIEWSTVFGDSEIYGDKLQEIQWLTNEQREKLVRKRYQGWGRLSKKLLMGITDENGQRIIDLMWDTNKNFMQIVHQPVFEEQITELNQQLLQDADKAPLEVVDDILADAYTSPQNKKAIRQVVKVVADVVKAVGNAPASISIEFARNEDRNKELKNSRRRSIEKLYHETAEKLVKQTNLLEELGNVKDLNDRYYLYFTQAGRDMYDGTPINIDEISTHYEIDHILPQSFLKDNSLDNRVLVKKSENAAKSDRVPAKLYGAKMRAFWKQLKESQLISNRKYLNLMTDPEQVDKYQMQGFVHRQLVETRQIIKLAANIFGSLYPDSAVIETRAELTKQLREKFSLYKVRDVNDYHHAVDAYLTAFAGHYLYQRYPKLRPMFVYGDYAKIYADDLKRLRSVNLFHDLEKDQYNSGTAVNPETKEKIVDVDWLSDYVSKIQRFKYMLISKAVYIQHGQMYGATIAPVSEAVTMSNPIKIKNSKPVDIYGAYTKEVAAYMAIVRVNGKKPKYKVVSVPVRMLQRLKIAEQKGHAQYMQTLHDVLSRNFTSFKKNRKTGLKEAVVKDFDVLVPCVRYNQLVIDGKDKFTLGSHEYQHNAKQLVLSNRSLETLANNFEYVRKHPDEADERMTMLYDDILARVNHYFTLYDKNKFREKLNTGRDKYLKLPTFSQFENNKKTASKSEAIINMLRGLHANAATSDLKCLGISTPFGKMQSQSGIELSENAKLVYQSPTGLFSREVLLKDL

SEQ ID NO: 17605 - protein, 1119 aa, unidentified
  REGION 1..1119: note = Cas Enzyme sequence
LYNEKKYWGVKMKYIIGLDLGINNVGWSIVNQETNEIVDCGVVRYQESSDAQERRKLRASRRLRNRRLHRVERLALLFKENGIPTQRTIEPELITKRAKGLKEELSVQEIVNIIYYFAMHRGYIPFDDEKQEREVVQLDDNQFPCEFIINEFKKYGKYRNSNKLIKCSDNIREIKQILETQRTFHPELTPELTDKIIKIITSKREFYEGPGGARINQLTPYGRFRTAADLEEYKVNPQKYKYLYEKLIAKCKIALGETCAPRINYFAEEFNFLNDFINMKVKDVTLLPQEFAYKVDEKGKLSGETILEIRDYVLSNETVRLDKMFKQILGTGIENIEGYRIDKNKKPEVSLYDFYKYVIKQFSQNNLNPTWLYDKDKKIYNKTMYVLTVVPSSVQIEEMLIERIPEYSFSQEEINVLKGIKTKKITNNRGMYHSLSEKVLLRTLADMKKTQYQFNYMQLMKELDYEKEAKEYFEKNYTNRTVEPYLVEKKYIDVLIANPQVKKTLRKAISVINAIIKRYKEYPTVIAIESTREMNSKAKKDAIIKEQAKLEKLRKDAITFLEENDLRVNETNILKAMCYKETNGHCMYCNTPIPASQLSTLEIEHILPISQSYDDSFDNITCACLKCNMEKLKKTPYEFLMSINSYEPFKERVIDLPISDKKKNNLLFEGDISKYELKFINRNLRDTAYGSMALAEELRKFNVFLERKANRYINIVTIPGQMTSKMRRKYELEEKDRTQLYHHAVDATIVASIANTPVGRLIIKGQNDAKFWFENKEKRLELSKLFPYAELENIKEIKELIPKKGEELICEKDDRIKRSFEVKKSINQQIANQNIVKYKIIDGEYYLVQQINNIYEEKSNDIFYKLFDESKKDKILLCELEDPKLYNRLREIFYAHEKSKINPFLEYCLFEHGIETTPNNFNYLIHGIKKSPNKPNSPIVKKLRYLERKTNPYIFKKADLNRKRNNFGEFVIPKLKDKTINGLDSLSQYCVEVYYDSDAQRFIFLPIYMVSVDINSKKINREERYYKETVARLIGKKTPLYITTLYTGNWCKVVKRDSSFSQGRFICYHKTHNKLVFGKDGSYSSSDAFYMTTNDKQIIIYGLDILGKKYKILDSNDII

SEQ ID NO: 17606 - protein, 1119 aa, unidentified
  REGION 1..1119: note = Cas Enzyme sequence
LYNEKKYWGVKMKYIIGLDLGINNVGWSIVNQETNEIVDCGVVRYQESSDAQERRKLRASRRLRNRRLHRVERLALLFKENGIPTQRTIEPELITKRAKGLKEELSVQEIVNIIYYFAMHRGYIPFDDEKQEREVVQLDDNQFPCEFIINEFKKYGKYRNSNKLIKCSDNIREIKQILETQRTFHPELTPELTDKIIKIITSKREFYEGPGGARINQLTPYGRFRTAADLEEYKVNPQKYKYLYEKLIAKCKIALGETCAPRINYFAEEFNFLNDFINMKVKDVTLLPQEFAYKVDEKGKLSGETILEIRDYVLSNETVRLDKMFKQILGTGIENIEGYRIDKNKKPEVSLYDFYKYVIKQFSQNNLNPTWLYDKDKKIYNKTMYVLTVVPSSVQIEEMLIERIPEYSFSQEEINVLKGIKTKKITNNRGMYHSLSEKVLLRTLADMKKTQYQLNYMQLMKELDYEKEAKEYFEKNYTNRTVEPYLVEKKYIDVLIANPQVKKTLRKAISVINAIIKRYKEYPTVIAIESTREMNSKAKKDAIIKEQAKLEKLRKDAITFLEENDLRVNETNILKAMCYKETNGHCMYCNTPIPASQLSTLEIEHILPISQSYDDSFDNITCACLKCNMEKLKKTPYEFLMSINSYEPFKERVIDLPISDKKKNNLLFEGDISKYELKFINRNLRDTAYGSMALAEELRKFNVFLERKANRYINIVTIPGQMTSKMRRKYELEEKDRTQLYHHAVDATIVASIANTPVGRLIIKGQNDAKFWFENKEKRLELSKLFPYAELENIKEIKELIPKKGEELICEKDDRIKRSFEVKKSINQQIANQNIVKYKIIDGEYYLVQQINNIYEEKSNDIFYKLFDESKKDKILLCELEDPKLYNRLREIFYAHEKSKINPFLEYCLFEHGIETTPNNFNYLIHGIKKSPNKPNSPIVKKLRYLERKTNPYIFKKADLNRKRNNFGEFVIPKLKDKTINGLDSLSQYCVEVYYDSDAQRFIFLPIYMVSVDINSKKINREERYYKETVARLIGKKTPLYITTLYTGNWCKVVKRDSSFSQGRFIYYHKTHNKLVFGKDGSYSSSDAFYMTTNDKQIIIYGLDILGKKYKILDSNDII

SEQ ID NO: 17607 - protein, 1367 aa, unidentified
  REGION 1..1367: note = Cas Enzyme sequence
MEKQDYFLGLDMGTSSVGWAVTNTKYELLRKKGKDMWGIREFDEASSAAERRTHRVDRRRRQRQVVRLGLLKSYFSEEIAKIDPNFFIRLENSKYFLEDKDERVRTKNGVFNDDDYKDVDYYRQYPTIFHLRQALLDIDNKGEKFDVRLVYLALANMFKHRGHFLLNAEGDALNTEQVEVVYKEILDSLENDYEIIIDHKPIQQVIDIIGNTDNGRKKKHEELQKLLGVTKKDKRANELLKCLCGLSVNAKLIFDENTEEKVPLCFNDFSYTDKIPELMEQLTEEEYALIEQLKSIYDYAVLAGTMKGHDYLSCVRVELYKKHADDLKLLKTLYRKYKTEEEYNKMFRSNADGTYSAYVNSLNSTDAIFKSDEVVEGSKYRRNMKGRKSEDIYATIKKAFKDITEDKDVSFVLEQIEKEQFLPKQLTGANGVIPNQVHKKEMERILQNAENYLPFLKDKDESGLTVSERIMKLFTFQIPYYVGPLGENSKTGWIVRKEKGSVLPWNINDKVDMSATSEAFIGNLIRTCTYIQGEKVMPKASLAYERYCVLNEINNLCIDGERIDAKLKQQIYKDCFMKGKKVTKKQLCSYLAAQNAIHSEEQVTGIDKNINNSLSSYGKMYAIFGERLKEDAIIAAAEDIIYWGTIFGDSKKMLKQRLKKYVEEGLIDENQLKRILGYKFKDWGRYSKALLTLSGCDKSTGEIITFGQAMWEYSLNFMELINSDEFTFKEELEKHTTVAMKQLSEFTYEDLEDSYFSVPVKRMIWQTLLVVREIEQVMGCAPKRIFVEMTRTEEEKGDKGRKESRGNQLIELYKSIKNTESHNWKEEIAEADKDGKLRSKKLFLYYMQMGRDMYTGEEIDLGRLYDDNLYDIDHIYPRHYVKDDSIMNNLVLVNKRANQDIKKDLYPIPEQIKANPKVRELWDTLHKQKLITDEKYTRLTSNTAFSETQLGDFIARQLVETGQGTKGVADLLEQLFKDTVIVYAKASNVSDFRRDNGFLKSRLVNDFHHAQDAYLNIVVGNVYYTKFTNNPWNFIRKDYEKDKEKNRYNLAKMFEWNVVRGSETAWIAKRKDEEGTISTVRKMMQKNTPLLTRMNFEQHGSIANATLYSAKKAKPENYLPLKTADERMKDVKKYGGYTSMTIAYYFIVRHKEGNKENVTIEALPLYCKDKVEREERGLERYCEEVLGYGEVNIIRRKLKIQSLLEFNGYQVHLSGKTGDRLILRNAMSLCLPTKWVTYIKKLEKAVNVQIFEEVVTTEENTKLYDILADKHANTVYAKRPNAFGQKLLADREKFVTLQLEKQCEALLQMLQLTKIGSTETNLTLIGESEHSGKILISKNLKASDRPAVISQSATGLYEKKEWIFTEM

SEQ ID NO: 17608 - protein, 1430 aa, unidentified
  REGION 1..1430: note = Cas Enzyme sequence
MKKRKHILGLDLGTTSIGFSHIIEDEDREKSTIEDIGVRIIPLSADELSNFERGKTISTNADRTLKHGARINLDRYQLRRKHLIELSLQAGLITSSTILAEDGKNTTYSTWQLRAKAAVERIEKDELVRVFLAINKKRGYKSSRKVKNKEDGQIIDGMDIAKRLYDENLTPGQLVLQLLKEKKKQLPDFYHSDLQREFDLIWNFQKEFYPDILTNDLYKALQGKNKTDSSSIFYNYYHFNTAENRGTKEQMRLQAYRWRVDALSKKLSKEEVAYVLVEINSNLNNSSNYLGNISDRSKELYFNKQTIGQFLYAKLKEDRHYSLKNKVFYRQDYLDEFERIWETQAIFHKELTGDLKKQIRDTIIFYQRRLKSQKGLISLCEFENKEITIEKEGKTVTKQIGVRVIPKSSPLFQEFKIWQILNNVVCKKKGTRKKKAVTPAPLLFELFGTPSEIFFSLDMECKQLLFEELNLKGNLKADKVIRLLGYIPQEWEINYNQLEGNRTQKSLYEAYLKIIEIEGYDIKTFLRINSDKEDWNLEESPLPAKEIRDNIQRIFETLGISTAVLYFDATLPIDDFEKQDSYQLWHLLYSYESDDSPSGNETLYKLLQDKFGFKREHAVFLSNISFQDDYGSLSAKAIRKIYPYIKENQYSTACELAGYRHSKLSLTKEELNNRPLKDLISPLKKNSLRNPVVEKGLNQMINVVNALIEKNSEKDAEGNIIKYFHFDEIRIELARELKKNAQERAEMTLNIKNATIEQEKIKRILISDFGIKNPTKNDITRYRLYQELAHNGYKDLYTNTDIPKELLFSKNIDIEHIVPKARVFDDSFSNKTLAYRDFNLKKGENTAFDFIDSSLGEEELNQYIARVENAYKTKNISATKYRNLLKKATEINDGFINRDLRETQYIAKKAKELLFQITRSVVSTSGSITDRLREDWGLIDIMKELNMPKYRDLGLTEIIERRDGRKVEVIKDWTKRNDHRHHAMDALTVAFTKPSYIQYLNHLNARKDENNKLYADILGIERKETTKIHDENGNEKRVFIEPIPGFRQIAKKYLEEILISHKTKNKVVTKSINKIVGTNKKQETLTPRGQLHKETIYGKYHYYSNKEEKIGSKFDKETISKVSNPIYRYALQKRLEANENNPKKAFTGKNALSKNPIYLDDAKTKILPEKVNLTYLEEDYSIRKNISPDNFKDLISIEKIVDEGIKRILKERLKTYNNDPKKAFADLDKNPIWLNKEKGISIKRVTISGVKNAQALHSKKDHLGKPILDKEGQEIPVDFVSTGNNHHVAIYRDQKGNLQEQIVSFFEAVVRAQQGLPIIDKTYKQEEGWQFLFTMKQNEMFVFPNEITGFNPSEIDLLDPKNKKLISPNLFRVQKIATKDYFFRHHLETTVETNNTLKDITWKRGGLSILTNIIKIRINHLGDIISVGEY

SEQ ID NO: 17609 - protein, 1460 aa, unidentified
  REGION 1..1460: note = Cas Enzyme sequence
MKRILGLDLGSNSIGWALVQQNFENKQGQIMATGSRIIPMDQSILGDFEKGNTVSQTAERTAYRSTRRLRERHLLRRERLHRVLHILGFLPPHYDSQIDFSKRYGKFIDDAEPKIAYNKGNFIFMDSFNEMIEDFRKHQPQLFYKKSNGEESKIPYDWTIYYLRKKALSQKITQQELAWLILHFNQKRGYYQLRGEEETEGNDMEIISSKVLSVIKKNKDKKYDKYWYDITLENGLVYKAAFYNDLVYSWIGQEREFVVKRTLLKNGDEKIELSYLPTFDEIAKMDKKQQDKFYQKIKVKTESNIGNKTVGAYIYDHLLQNPNQKIKGKLVRTIERKYYKDELKAILAKQIALQSEFFTENLLADCIRELYRKNQTQQQNLLSKDFLHLFLEDIIFYQRPLRSKKSTIANCPLEKRSYIDKETNERKDAPIKVCTKSNPYYQEFRVLQWLQNLRIYEIETDREVTAEFIGTAQDYEALFNFLMSQKEIDNEGLLKYFLLAKNPQIKDKAAKSELKKWLTTYRWNYVYDVADNSSKKYPMNETGYDLQRYLQKVEGLPANFLTFDTAYQLWHLLYSVKDKVEFEKALKKLAQKYQLNEVSFVDSFKNFKPYPNEYGSFSEKAIKKMLPLMRFGNHWNFKNIDVHTQKRIDALINGVANEDIRTIIREKAEKYQLNNETCFQGLPLWLAQYIAYNRHAEATNIEKWTSVSDLEAYLEDFKQYSLRNPIVEQVVTETLRVVRDIWQQYGGGQANFFDEIHIELGRELKNTSKEREKLSKQNQENENTNLRIKKLLAELKEDANIQNVRPYSPIQQELLKIYEEGVFSSTDEIEEDIQKIRKKAEPTTPEIQRYKLWLEQKYKSPYTGEVISLTKLFTEEYEIEHIIPQSRYYDDSLSNKVICESAVNKLKTNQLGLEFIQNHHGEKVRIAGNKEVTIFTEEQYKEFVKKYYANNLAKQQKLLLNDIPEKMVARQMNDTRYISKYVSEILSKIVRSDEKDEGVNSKNIIPCTGKITTALKQDWGLNDVWNELILPRFERMNQLTQTQLFTSYNDRLQKNLPTVPIEYSQGFQKKRIDHRHHAMDALVIACVTREHINYMNNQHALDKSKDKKEKQQSRIDLRTILCEKKNNNWQFKKPWRTFTQEAKEALEHIVVSFKQNLRVINKATNYYEKWEEKNGVLVKKKVKQEGTNWAIRKPLHKETVSGKIVLDRKIGKDKILTATRKAVDITFTEKVISSITDTGIQKILLNYLKYKGSPEVAFSAEGLEELNKNIAQYNDGKKHQPIYKVRIFEEGSKFPLGETGAKATKYVEAAKGTNLFFGVYQGKGKRTYATIPLNEVIERQKQGLPSVPERNEKGEPLLFSLSPNDLVYVPMEGEAPEAIDFSNLSKEQKERIYKTVSFTGKECHFVKYTIASLIKSYDAKSKIGELGSLNKLEVTISGDSRIKEVCIKLKVDRLGNITKA

SEQ ID NO: 17610 - protein, 1168 aa, unidentified
  REGION 1..1168: note = Cas Enzyme sequence
MGSRVAPLTNLGDDKAFSKGEAFTANQKRTARRTMRRGFARYQLRRYRLRRELEKVGMLPDAALIQLPLLELWELRERAATAGEHLTLPELGRVLCHINQKRGYRHVKSDAAAIVGDEGEKKKDSNSAYLAGIRANDEKLQGEHKTVGQYFAEQLRQSQSESPTGGISYRIKDQIFSRQRYINEYDQIMAAQRVHYPDILTDAFIRMLRDEVIFMQRPLKSCKHLVSLCEFEKQERVMRVQQDDGKGGRQLVERKVKFGPKVAPKSSPLFQLCRIYEAVNNIRLTRPDGSPRGITPEERAKIVAHLQSSASLSFAALKKLLKEKAIIADQLTTKSGLKGNSTRVALAAALQPYPQYHHLLDMELETRMMSVQLTDEETGEVTEREVAVVTDSYVRQPLYRLWHILYSIEERDAMRRALITQLGMKEEDLDGGLLDQLYRLDFVKPGYGNKSAKFICKLLPQLQQGLGYSEACAAVGYRHSNSPTSEEITERTLLEKIPLLQRNELRQPLVEKILNQMINLVNALKAEYGVDEVRVELARELKMSREERARMTIQNDKRKKANGKVAARIRQCGLYPTKPRIQKYMLWEEAGRQCLYCGRSIEEEQCLNGDDMEVEHIIPKSVLYDDSYGNKTCACHECNQTKGNRTALEYIRAKGWEAEYMERINGLLDKKAISYSKHQRLRWLKEDIPSDFLERQLRLTQYISRQAMAILQQGIRRVSASEGGVTARLRSLWGYDDILHTLNLDRYDSMGETERVSREGETTEKLRIKDWSKRKDHRHHAIDALVVASTRQGYIQRLNRVSSESEREAMSGEIEVQKATKIDKLSLLERWLTQRPHLSVRAVSDKVAEILISYRPGKRAVTRGRNIYRKKTADGREVTCVQRGVLVPRGELMEASLYGKILSQGRERIVKRYPLHDLKGEVVDPRLRELIAEYNQEITSKVKAKGTPLYLDAAEKQEVRSVRCYVTQPSVAKAIPIRFDERGRAITFVQSGSNHHLAIYRTPKGKLVESIVSFWDAVNRARYGLPLIIKYPRKAMEQVIQREDIPESVLSLLPPADYEFVEVFQQNEMAVVGLPEEEFRRAVDTQDYRTLSEHLYRLKGISSKDYEFHYHLDTDDPDETDSSKKKKKRVRNTSGRIPRIYRIRGIGSLQKKNVHKVCVDLLGRISLL

SEQ ID NO: 17611 - protein, 1063 aa, unidentified
  REGION 1..1063: note = Cas Enzyme sequence
MASAKTVKSELGIHLDVGHDSIGWCVTRTFPENEQFLAIPGTGVVLFPADDCLANQRRAFRRQRRHIRATRQRIARMKAMILSLGVMTEQELSRNLTAAPWKLAAEALSCGKVLSWPEMWSVLRWYAHNRGYDGNVLASAKNRQEGDADDIKKNAAAREMMKKYGMETMAETMCRFLGVDPKGDRISSREYFKGCKVSFDRSIVVQEVTRILEAHRGKLQGLTDDFIHTLVADPLVEKNFLRSQSGLPFHVQNRYWGGVLFGQLAPRFDNRIIGHCPISGKKLPSKASVEFLEFRWAMMLANVRVGVGGRGLTPDEIAQLNTEVAKVGGFAKGEFKKAIRDVTGESLNNVDALLTTPEADASLVRFPGVHALAKRGLREVLDDKAFRKFANILFRGKRLTLAKLAAAADDEETRQSILSLADSKRQKGRGKKRSQEELLHDVIKADLPTGRAPFAKEVMVEASKSVYSGKDPRENGGVICRDSTKEDVIKENDIDKETNNHLIRHRVKILLRLLKDIVHDYAENNPAQVAQITIEMARDLKDLSGMTNKQIKSDMRDRTRQHVLAAKRIAKHLGIDERLVSPGLIRKVRIAEDMGWKCPYTGATYDIQDIVSKSDGEPGCVDKDHILPRSERATDSLDSLVLTYREVNEMKGARTGLQLIRDCAGMRVPGRCNLVIQNESAYKSFVDGLKVFGHDDDRKRQKRRKQNLLRLKSDDAGMTEGMLTRTSYITTLAIKAMRGYFSGCGRMPEIVTIPGRVTAMLRNQWNIMGILAEIDERVKDDAGRLRLKQEIRGITHMHHAVDAITLGLAATFIPRNGTFWATMCKRRVRDDEKAMLGATGIFRFSVHNEPQLVKLPPYLRTTIREALAEQRVVVHQPQEKAGLKVQQNTWGVERVDGKAIFIRQRARDEKTGTITVKHDHIPIGKAFGINPASGEGKLKAINGVLLPEANYGVALMQDPFVVRHQRVWGTIAALKDMNGGKMPQILRRSDIIRVDTGRYVGYWRIKSVKDGKVEPKLDLVRPYAIDEEDKRVGKREVSIKTLIKDGVHVIRCRYTGIALCHTT

SEQ ID NO: 17612 - protein, 999 aa, unidentified
  REGION 1..999: note = Cas Enzyme sequence
MKALILSLGVLSETELSANPTAAPWKLAAQALAGGRILTWMELWCVLRWYAHNRGYDGNRLASAKNRSDADAEDIKSNAASHELMAKYGTTTMAETMCRFLGVDPMASKSSSREYFKGNKVSFDRKVIVDEVTRILESHKGKLCGVTADFIHTLVADPLADKNFLRLRTGLPFHVQNRYWGGVLFGQLAPRFDNRIIGCCPVSGRKLPSKATPEFLEFRWAMMLANVMVGPEGRHLSVVEIARLNSEVGKVGGFTKGEFKKIVKDVTAEQQNNVDALLTTPEADASLIRFPGVYALAKLGLRGAMDGKTFGKLANILFRGKRLTLEKIASLVDISAKEAVLSAADPERQKGKGRKRSRSVILQAAIKADLPCGRAPFSRDVMREAAKAVYQGKHPAEPGCPLYRNSVQADVLKEQDIDAATNNHLIRHRVKILLRLLKDIVHDYAENNPAQVAEVTIEMARDLKDLSGLTNKQIESDLRERTRQHQLAARKVAKHLGIEERLVSPGLIRKVRIAEDMGWTCPYTGMTYDVQDIVSKGDGEPGCVDKDHILPRSARLTDSLDSLALTYREVNAMKGARTGLQFIRDCAGMRVPGHENFVILDEPRYKKLVENLKVFGHDDDKKRQKRRKFNLLRLKTDDAGMTEGMLTRTSYITTLAIKAIRGYFSGCGRVPAIIAIPGRVTAMLRNEWGVLGILAEVDGRLKDENGRLRLKQEIRGITHLHHAVDAITLGLAATFLPRDGIFWSAMCKRRVGKDERAMLNATGVFTFSSHNEPHLIALPPYLRAAIRDALSEQRVVVHQPQERTGLKVQQNAWGVERIEGETVHIRQRSRDPKTGVIAIAHNQVPLSKAFGVNPECDRGKLKDIKGVLLSDGNYGVALMADPCVIRHQRVWGTLEEIKRRNSGRMPQIVRRGDLIKIASGGYEGLWRVVSIKDNHNGISLDVIAPSAIKVANGVSYAKINVLLKTLVKSGLEVLRPRYTGVAICPIISSTSRQTASRSR

SEQ ID NO: 17613 - protein, 1063 aa, unidentified
  REGION 1..1063: note = Cas Enzyme sequence
MTRGKIEKSELGIHLDVGHDSIGWCVTRTSPGNERFLAIPGTGVVLFPADDCLANSRRAFRRQRRHIRATRQRIARMKSMILALGVMTEAELSKTLTAAPWKLAAEALSCGKLLSWPELWSVLRWYAHNRGYDGNILASAKNRQEGDADDIKKNAASHDMMAKFGTSTMAETMCRFLGVDPQGDKISSREYFKGNKVSFDRSVVVAEVTRILEAHKGKLQGLTDDFIHTLVADPLTDKNFLRFQSGLPFHIQNRYWGGVLFGQLAPRFDNRIIGHCPVSGKKLPSKSSSEFLAFRWAMMLANVRVGDGGRALTPDEIVRFNEEVAVFGGFTKGDFKKSLKNITGESVGNVDALLTTPEAEASLVRFPGVYALAKRGLREVLDDNTFRKLANTLFRGKRLTISKIAASVEDDATRNSILALADPKSQKGKGKKKSREVLLSESIKADLPTGRAPFAKDVMAEAVKAVYSGKDPREKGGVLYRDCTKEDVIKEQDIDTETNNHLIRHRVKILLRLLKDIVHDYAENNPAQVAQITIEMARELKDLSGMTNKQIESDLRDRTRQHQVAAKKIAKHLGIEERLVSPGLIRKVRIAEDMGWKCPYTGIAYDIQDIVSKSDGEPGCVDKDHILPRSERATDSLDSLVLTYREVNEMKGARTGLQFIRDCSGMRVPGRENLVIQSESAYKSFADGLKVFGHNDDRKRQKRRKQNLLRLKPDDAGMTEGMLTRTSYITTLAMKAIRGYFAGCGRMPEIVAIPGRVTAMLRNKWNILGILAEVDERVKDETGRLRHKQEIRGITHMHHAVDAITLGLAATFIPRNGAFWATMCKRRVKNNEKEMLVSAGIFRFSAHNEPQLVELPLYLRSAIRDALAEQRVVVHQPQERSGLKVQQNTWGIERVEGGMVFIRQRARDEKTGAVSIKRDRVPVGKAFGLNPTCGEGKLKAIKGVLLPEVNYGVALTQEPIVIRHQRVWGAMAALKDANGGKMPQLLRRSDVIKVDAGRYVGYWRVKSVKDGKIEPKLDIVRPYAIDEEDKRVGKREVSIKTLMKDGVHVIRCRYTGIALCHTT

SEQ ID NO: 17614 - protein, 999 aa, unidentified
  REGION 1..999: note = Cas Enzyme sequence
MKALILSLGVLSETELSANPTAAPWKLAAQALAGGRILTWMELWCVLRWYAHNRGYDGNRLASAKNRSDADAEDIKSNAASHELMAKYGTTTMAETMCRFLGVDPMASKSSSREYFKGNKVSFDRKVVVDEVTRILESHKGKLCGVTADFIHTLVADPLADKNFLRLRTGLPFHVQNRYWGGVLFGQLAPRFDNRIIGCCPVSGRKLPSKATPEFLEFRWAMMLANVRVGPEGRHLSVVEIARLNSEVGKVGGFTKGEFKKIVKDVTAEQQNNVDALLTTPEADASLIRFPGVYALAKLGLRGAMDGKTFGKLANILFRGKRLTLEKIASLVDVSAKEAVLSAADPERQKGKGRKRSRSVILQAAIKADLPCGRAPFSRDVMREAAKAVYQGKHPAEPGCPLYRNSVQADVLKEQDIDAATNNHLIRHRVKILLRLLKDIVHDYAENNPAQVAEVTIEMARDIKDLSGLTNKQIESDLRERTRQHQLAARKVAKHLGIEERLVSPGLIRKVRIAEDMGWTCPYTGMTYDIQDIVSKGDGEPGCVDKDHILPRSARLTDSLDSLALTYREVNEMKGARTGLQFIRDCAGMRVPGHENFVILDEPRYKKLVENLKVFGHDDDKKRQKRRKFNLLRLKTDDAGMTEGMLTRTSYITTLAIKAIRGYFSGCGRVPAIIAIPGRVTAMLRNEWGVLGILAEVDGRLKDENGRLRLKQEIRGITHLHHAVDAITLGLAATFLPRDGIFWSAMCKRRVGKDERAMLNATGVFTFSSHNEPHLIALPPYLRAAIRDALSEQRVVVHQPQERTGLKVQQNAWGVERIEGETVHIRQRSRDPKTGVIAIAHNQVPLSKAFGVNPECDRGKLKDIKGVLLSDGNYGVALMADPCVIRHQRVWGTLEEIKRRNSGRMPQIVRRGDLIKIASGGYEGLWRVVSIKDNHNGISLDVIAPSAIKVANGVSYAKINVLLKTLVKSGLEVLKPRYTGVALCPIISSTSRQTASRSR

SEQ ID NO: 17615 - protein, 926 aa, unidentified
  REGION 1..926: note = Cas Enzyme sequence
FRWAMQLANVQVATGDERKTRRLTSEERKAVHAEMEKKGFLTAGTSKNPGEFAKAVRALTGAKDNLDDMLAQDHADRSLVLDPARKFASGGVLGILWPHLGATLQKHTLTNLRRGKAVTARALLVAAPAAQAAFDRWWDGEAMKKPRKPRKPGTEEDVPRTRDQALDERHALRPDTGRAPYTRAVLREVAAFILSTDRHPADGQDGAPGNGPLFRSEAIRHAQLQRAIDEQTNNHLVRHRLKLLERLHGDLLKEYAGGDASRIARITIEVNRDLKEMSGKTAQEQAKIQGQQTAQFRGVEKKLAAAYEGLGVHLAPGLIRKGRIAEDLGWICPYTGATYDALDLLHRRVDKDHIIPRSQRASDSLDSLAITFSEINKWKGNRTAVQFVEECQSQPVPGRPNVQIKTLSNFTKDVEALETYKGHDDDQRRKKNRKRLLLLRDYVEKEFTPGDLTKTSQLARLGAQALHRAYLPATGRTAPALPGRVGVSPAGPGVPPGRTSQPAGAQRLAKTGDAATQDASLGGRDAHPTRDVHAPVITSLPGSVTGAVRKSWNLLGCLALANPLVLNPDDLDTDGKPKVHRKTEIRGITHLHHALDACVLGFASLFLPRDGGAWELLTKRRLKPDEQKRARELFGTQIEITQAGELRLADLPRGLKQAVGEKLAERRVVQHLPRDLSGMESKETVWRAFDPTDAHPNARRLAKWLAQKEIRVPTPDAKTALIIRRKRKNADAADGEGAGGKVFHEGKTWRWVYDIKDKSALLGLAPEGDPAQAKLKKLKAVKVLGDNFGIALDPETKLVAGSAENLIRPHKVWHQLEKLTAENGGKRVRVIRRGSLIRVTRAKSEKVDYRGVWVVRGAYFKQKGGYMVDLSPADYVAYRRVRGAFETVSVVTLLKCGLEVLRPSLAGLGSPPVSPGAGSGAPPRGR

SEQ ID NO: 17616 - protein, 1106 aa, unidentified
  REGION 1..1106: note = Cas Enzyme sequence
MGAMQNSPAELHLSFDVGHSSIGWAVLQAPPDHSRKPELLGCGAVIFSADDCLASQRRQFRRQRRHIRSTRTRIARMKGLLHHLGVLTQPELDAVSSSSPWLLAARVLRGGPPLKWPQLWDVLRWYAHNRGYDGNKAWSRREQDAAAQEEDAEKVQNALQLFEKHATRTMAETWCAVCGLDPLGTKASCHLPGDKRPKALNAAFPREIVEGEVATVLRAHFGKLPHVDQALLDTLCKHWGALPCPNVCLPLRYRGGLLFGQLVPRFGNRIIARCPITYERTYQRVLAEIGDAHLAKDEANKLAKVPVAACSEFLRFRWAMQIANILVATPAGFRRLTPVQRRALDETARQRGAFTKKQFAGSVRALTGGGLDNIDQMLTHPDAEKALVVDPIQRELVRKDVTPFIAVLPESLQKRLRGKLRKGDRLPLGAIRGWLEDPTAFDAVLSHQLDAANTRRTKRAAVLTREDVLSTPLHVESASGRAPYSRSVMREVVDFVFHAADPEGFGRHPAEEGGPLFRSEAIRAAQLQRAIDEQTNNHLVRHRLRILERLHADILKAYASDDKGRVGRLTIEVTRDLRELSGDNHKSTNLKADLAKRLSNFKSVADKLEEKLAGTGISITAGLIRKARIAEDLGWACPYTGKPYDVFDLVHRRVDKDHIIPRSERPSDSLDSLVITFAEVNRMKGKRTAARFIEDCQAGPVEGLPQLFIKPLAAYIKDIEALEAFKGHDDDKRRKRNRKRLLSLRDYVEKEFTPRDLTQTSQLVRLGATALEKLYEGLDRKPVITSLPGSVTGAVRKSWNVIGCLSAANPQILDPATNQPRTKTEIREITHLHHALDASVLAFTSHFLPGQGRDGRAWELLVKRRLTPTEQSRARDLFRDYVQIDRDGSLQLIDLPKTYKEQLRCRLAERRVVQHISSETAGLRAELNAWRVMGAMEDGQVRLVQRVRQPDGDRTSKERMEKPSKLIGLRPGKLQKLKAALIIGDNYGLALDPEPEIIPFHKVWMRLQELRSKNGGKPVRVLRNGMLIHLPQGRYVGVWRIFSLKNNTSGLALDLGRPDIVRVQNKTEGCRINVLLASLIRDGLKILDVSLSGTELTQNVPDPNKR

SEQ ID NO: 17617 - protein, 1072 aa, unidentified
  REGION 1..1072: note = Cas Enzyme sequence
LLAHLGVLTTEQLEAPGCAWPWLLAARVLCGGKTLSWPELWDVLRWYAHNRGYDGNKGWSRHEADSADDEDTEKEKRAGELLDDFRKRHGRRGTMAEVFCDVLKVDPLGPVKSSMERVRGLGAAFPREGVEAEVERVLRAHLGGLQQVDERLIEALMRDNTALPGPDLRLPKRYGQRVNGVRTPGGLLFGQLVPRFENRIIATCPIMYQRVYESEFAATGDAERARHEAEKLAKVPGADCNEFRRFRWAMQVVNIQVATDDPRQPRRLSVAERGEIDKLMRERGALTVTELKKAVRAITGAKDNLDQMLVHPDAAKALVLDPAQELVSSGGFAVIWQYLDGPARAHTKTNLRRGKSVTLRALLAAAPAEAAFSKWFDGESLKKRKNPLVRDEVLDEPHRIRPESGRAPYTRQVMSEACEEVFQSGIHPADEGGVLFRSEAIRNAQLRRALDEQTNNHLVRHRLKLLERLHADLLKAYADDDKTRIARVTIEVNRDIKEFSGKTAQEQAKDLGQRLANFKSVVKKLEADFEGKNIHITPGLIRKARIAEDLGWACPYTGKAYDAFDLLHRRVDKDHVVPRSDRSSDSLDSLVITFAEVNKMKGRRTAALFVEECQSQPVPGLPNVAVKPLAVYLKYVAGLETFKGHDDDQRRKKRRKQLLALRDYVEKEFVPRDLTQTSQLVRLGAQALQKHYLGDAQAPVIISLPGSVTGAVRKSWKLAGCLGLANPQIFDEEGEPRTKADIRGITHLHHALDACVLAFASLFLPRDGGAWELLVKRRLSPDEQRRARACFGSHIEISKDGELRLPDLPSQYKEQIRACLAERRVVQHVPADPSGLECKETVWRVFDATDRHHSTRRLGRWLEQAKIAVPASDARTALIVCRKRKSTAETESTGGKVLRETKIWLWVFDIKDKSALLGLEPDGDPAQAKLKKLKAVKVLGDNFGLALDPQPTLIRPHKVWPQLQSLRSANGGKPVRVLRKGILVRVPKRGIRPKYEGVWMVRGVTLNQRAGFLVDMSPSDQIIYRRHPGCLENVSVATLLRCGLEVLRAPLSGVPPLPKQAEGYDVPGISDC

SEQ ID NO: 17618 - protein, 1016 aa, unidentified
  REGION 1..1016: note = Cas Enzyme sequence
MKVLLAFLGVLSKAQLDQPGCAWPWQLAARVLRGGELLTWPELWDVLRWYAHNRGYDGNRRWSAAEKEADNEDTEKEENAKKLMNKCGVHTMAETFCAICGIDPLGKKRSTNLPGADRPKGQNAAFPRATVESEVRRVVQAHFGKLEKVDANLERALLGQSNQDKTAWQAIPCPDLKLPKRYEGALLFGQLVPRFDNRVISTCPISGAKVPSRNCPEFLNFRWAMQLANIRVSRLGEKELSALTVQERKQLDSLMRAQGGMGVEEFKKQVRQVSGAIRDNLETMFMHPDAKDALLLDPVTKLVESSEVKPYWALLPERLQKRTRGQWRRGKSITLAKLREQLSELCGDTASFDAAITRQLDKANTRGRKKDIPTTVAEFVNQPLSIRKLDQRAAFSRPMLKRAFEEVMAGKHPKEEGGCLFITEKMREAQLTREIAEQTNNHLVRHRLLILERLLADIVREYAAGDKTRVAKITIEVNRDLREMSGMTAKAKAQDLGLRIANHHQVVRKLEEDESLMKILHERRAKITAGLIRKARVADDLDWTCPYTGQRFQPVDLLTKRVDKDHIVPRADRATDSLDSLVITFSAINKWKGKRTAWQFMQEEQGKAVPDLPNLSIMTLSRYKGLVESLDTFKGHDDDKRRKKKRKELMLLPTYEEKEFTPGDLTATSQLVRLGAMALKKAFVGCARHPVVVSLPGSVTGAVRKAWRLLGCLSLANPQVLDEKGEVRNKDEIRDITHLHHALDACVLGFSSHFIPNDGRTWELITKRKWTPAEENELKALGVFDKDSEGRFQMRDLDNELKEQIRQRLAEKRVVQHVPARMDGLKVEQNIWRVVSVKDGEASLQQRIRQPDGSRPVKHGEEKVGKLLGLQPTGGTGKLNANKGVLIIPDNFGVGLDPHPTIIPFHKVWTRLKELKSSNGGKTPRVLRNGQIIQVPNGKNFKGIWKVFSAKNNASGMALDIGSPDVVRLKNKTEGHKINVRLATLMKDGLEIQKCGLTGVPACPTTSSALIPPTAP

SEQ ID NO: 17619 - protein, 1016 aa, unidentified; identical to SEQ ID NO: 16872
  REGION 1..1016: note = Cas Enzyme sequence

SEQ ID NO: 17620 - protein, 1119 aa, unidentified
  REGION 1..1119: note = Cas Enzyme sequence
MPLTITFDIGYASIGWCVLSSETGNPEFLGTGAVTFPSDDCLASTRRTLRRTRRHIRSTRQRIERMKQWLVHRGVLSRDDLGRPGHPAPFLLAAAALQGHRTLSAWELWTVLRWYAHNRGYDGNTRWSRGEEEPEDTEKQANARTLMEKHGTGSMSETVCACLGLKPAGHGHRISSELPYKTLNAAYPRRVVENEVLALFERHVGKIPGFDAETASGIFNPAERDSKYRRSDELDASYRASGIELPRRYHGGLLFGQLVPRFDNRIIARCPITWAKTFDEAVGEGRTEAEARKLADKFAKVPSAKCPEFLGFRFASLLANLKVDDGQPLPKHLRRHLWELAQQRGRLTHRELKKEITSAGHKPYNLDATFTIHPDSEDALTLDPVAEFPQKTQMLKPVWDVIDETTRKQVLEIWRKGGSVSLAAILRMDGPTDAALQGCKAAHAASQKRSRNKEALVSFEDFIAQPLAPKKISGRAPYARPVLKQVVAEVLEGYHPRKASKATDPENGEDKPENGVLYELGIPGSRVRQLQAERPIDQLTNNHLVRHRMLILDRLVDDIVAEFCKDGAEVGQIVVEVARELKEFSGMTAKQIASELNSRLKDFKAAVAYLEKHAPKLEPTGGIIRKCRIAMDLGWHCPFTGESYDAYDLPKLEREHIIPYATRNSNALHALVLTWPEVNRMKGKRTARQFIAEFEGKPVEGKSNLSLFTLRNYDAFVEKLDTKGHDDDRRRKKARKALLATNDFEDKELGFTDGQLTQTSQLMKLAMGALRQKKDASGKSIFERTHIDPIPGPVTAEIRKSWKLTGTLALACPEIIDAEGELLTKNEIRGLTHLHHALDAATLALAAHYFPLRNKGQNQTGLIWRALMKRNRTKEEKELLHRLGIFDTFQRSRGDNQTIETDVRLRDLDKAVKEALARSLAEGRVMQHVPADRSGVKAKLTTWGVTGINGEGEDARVQLRQRSSTVEDGKRKIDTKTCEERAGKLLGVAPKSGTGKLKEVKGAMIIEENYGIALDPAPVVIPFHDVPRRLDEVQKKNGGHSVRVLRNGMLIRLSGQGSRDGIWSIYTVQASLKVDLVRPGTVGRPKKGANVWREVAIQGLLKNGLEILPRRYTGYPITD

SEQ ID NO: 17621 - protein, 1027 aa, unidentified
  REGION 1..1027: note = Cas Enzyme sequence
DGNSRWSREEVTDDDTAKETNAKALMTQHNTKSMAETVCACLKLDPAKANKTISSHLPYKTLNAAYPRTTVQKEVLALLQTHLGKIHGLDEKTLDLLFTPDLLSDEDRDFLKAADVKLPKRYHGGLLFGQLIPRFDNRIISRCPITWAKTYDEAIAEGKSEAQARKLADKFAKVPAAKSKEFLEYRFSRILANIRADGKPVDKELRQQLWDLAEKQGRLTHADIKKAVKQHCGDVSTNLEAYFKLHPDSEEALVLDPVMDEVRKADGSQAKLSPFWIHLSDETRQEVIDQWRTGKAVSLAWIAERAGENPSLAEAFQKEFSELKPKKGQARFSSLNEYLQGVRIAPKIPSGRAPYARPVLRQVAEEIKNGWDATKANKVTEPENGEDKPANGILYDLGIPTSRVRELQNERPIEQLTNNHLVRHRMLILERLLDDLVEEFVSKERPVSRVVVEVARELSQFSGMTAKEIATELNSRLKDFKSAVAYLENHAPEMKVNGSIIRKTRIAMDMNWCCPFTGEKYEVTTLPHMEREHIIPYATRNSNALHALVLTWPQVNRMKGKRTAKQFIMESANLPSRQVQGLERLTLFTPKQFDEFVDKLDTKGHPDDARRKRARKALLATANFEDKELGFTDGALTQTSHLMKLAMRGLTQRFPNVSCDSIPGPVTAEIRKAWNLTGTLALTCPEVIDPHSGETLPKNDIRGLTHMHHALDAATLALAAHYFPLQARGQDQKGKIWQALLRRYRTAEEKAFLHKLGVFDRYERTRRDKDGKEYQVTDVRLRDLSKSVKEQLSRSLAKCRVMQHIPADRSGTKAELLTWGIVSIIGDNALIIQRSNRSLLELDADSPQRRWKDKPPTKEAVKLLKEHGHLLKSNEKRLVKRGINKLTTEKLARLLGPASPEIGGKLLAIRGALVIGDNFAIALMNQSPILIPFHQIHRTLASLTASNGGKLPRLIRIGTLIKIPRGTWKGTWRVISVKNSEAYGISVDLAYPHGIKLVKGNAKVPQMLLDGLEILPRRYTGHPLDNE

SEQ ID NO: 17622 - protein, 1075 aa, unidentified
  REGION 1..1075: note = Cas Enzyme sequence
MKDKQKNTLSQTADLELAFDVGHSSIGWAVLQSVSPAPAQTETPSVNLLGCGVVTFGANDCLASHRRAFRRQRRHIRSTRQRIARIKILLKQLGVLDEATLNQPGCAWPWRLAAQVLQGGKRLTWAELWDVLRWYAHNRGYDANRRWSAAEAQAQQEDSEKEANARTLMDKHRTKSMAETFCRELGIDLSGKKKSSTKRFKGLKAAFPREIVENEVRKILQAHHDILPGVDGRLEEALFTNWQAIPCPNLKLPNRFQGGLLFGQLVPRFDNRIISQCPISGQKVPSRNSNEFLNFRWAMQLANVRIARFGELKLSPLSPGERRELDQQMRRVGAMTAEQFKKTVRNVSNAIQDNLDTMLMHPDAKEALTLDPVQKLVRSTELAPFWELLPERLQSRLRGQWRRGKVFSLAQIRTQLAGYGDVAAFDTAVQKQLEARHVKSRKKDKPLTREDLLERQFPPQPIKLAGRAAFARPLLQQAYAEVMDGQHPKEPGGCLFLSEEIRQRQLAREIAAQTNNHLVRHRLLILERLLNGIINEYAGKDKTRIGKITIEVNRDLREMSGKTAKEKAQDLGLRIANHHAVAAKLEKAFAEENTRIPITAGLIRKARIAEDLGWKCPYTGQDYEPRQLVSRYVDKDHIVPRSHRASDALDSLVITFSAINKWKSNRTAWEFVEQEQSKPVPDLPHLSIMSLSRYRQFVESLETYKGHDDDKKRKKRRKELLLLPKYEDKEFTPRDLTQTSQLVRLGAQVLKRAFAGHEQPPIVVSLPGSVTAAVRKAWKILGCLSLANPQVLDENGEVKNKTDIRGITHLHHALDACALGLASHFIPNHGRVWELIVKRTVNDAEKEELMALGIFTFSANHRFEMRDLDNRLKEQIRQRLAEKRVVQHVPARMGGLRVEQNTWRVVEVKAGKARIQQRIRQADESRPLKQTEEKTSKLLGLQPGKLSVNKGVLIIPDNYGVALDPEPTIIPFHKVWERLRELKKADGGKRPRVLRNGQLVKVPQGKFMGIWRVFSVKNNTSGIAVDLGFPDVVRLKNKMAGHKINVLLASLLKNGMRVVKPPLTGVPTWPTTSSA

SEQ ID NO: 17623 - protein, 1075 aa, unidentified; identical to SEQ ID NO: 17622
  REGION 1..1075: note = Cas Enzyme sequence

SEQ ID NO: 17624 - protein, 1089 aa, unidentified
  REGION 1..1089: note = Cas Enzyme sequence
MKSTANFKNQNRLQIAYDVGHSSIGWAVLADTESAGPEIFGCGSVIFPADDCLASQRRAFRRQRRHIRSTRQRISRIERLLSHVGAMTSAQLEAKHKPAGGHAAPWLLAARALRGGPLLDWPELWDVLRWYAHNRGYDGNRRWSGVDAKQDLEDVEKVGNAMALLDKYGTSTMCETFCAISGLDPLGKKISTNLSGKDRPKAMNAAFPRENIEAEVRRVLEAHKGRLKDCNDEFISALMDDWRAVHCPDISLPGRFQGGLLFGQLVPRFENRIIASCPITFEARYQQALTAHGHENANREAAKAAKVPAKNCAEFLRYRWAMLVANTRIATGQGRETRPLSVQERTGLDKIMTAQGHMTRAGLKAVVCEVAGDRPNNLDQMLMHPDAEKALVLDPARKALSKQPWQAVFDSLADIDKRYFLNVVRRGKPVMLRDLVNVAGVAAEDAINEFVAKAGKSKSKTKAAPDRNVLLGEQLRVNKLAGRAPYSREVMRAAAEFVFSTDKHPTEEGGPLYRSEEIRKAQLRRAVDEQTNNHLVRHRLKILSRLHRDIINGYARGDAAAVERVAIEVNRDLRNLSGKTAKEIASDLGKRLANFKGVADKLEKAFEGKNIRVSAGLIRKARIAEDLGWQCPYTGQSFDAFDLLHRKVDKDHIIPRSERGSDSLDSLVITFAEVNKMKGKRTGLRFVEEFSGQPVPGMPHLTVRTRAQYLDAVSKLECRNGHDDDRRRKKSRRELMQISEYVEKAFTPRDLTQTSQLVRLGAQMLESLFMDVPRKPVITSLPGSVTGAVRKSWKVTGCLAVANPDVLEPVNESEEDQPRIRPKTEIRGITHLHHALDACVLVLADRFLPRNGRSWELLVKRRLSPAEQTEAKGVFGKHIQISADGQIQLADLPPFLKEQIGRRLAERRVIQHVPSEMHGLRVEQNPWRVLTVQDGMATIAQSTRNEEGIRIKKQKAEKVTKLLGLEPQGHGKLKANKSVLVIAENFGVALDPEPQIIPFHKVWHRWQELRARNGGKPPRLLRNGMLIGLEGGVEKRRGLWRVCSVKNNSSGIALDLSKPDECKASWINVLLKSLLRDGLIIVKPPLCGG

SEQ ID NO: 17625 - protein, 1230 aa, unidentified
  REGION 1..1230: note = Cas Enzyme sequence
MNATGKIQPSTTNADLQLAFDVGHSSIGWAVLQLVGRQSARAETPRVTILGCGVVTFGADDCLASKRRTYRSQRRHLRATRKRIAWMEKLLVHLGVLSTEAFEAVHMQAGGDSFAWQRAAEILTNARSQKPLPKLGWPELWNILRWYAHNRGYFSPPWANREEDSIADDNDVPDTEKVERANAIMREFKTVTMAETISAYTFRYEQEVAEWQQKKRADKPPHFKGLKAAFLRESVVWLEVRDLLTALKNKLHKLDDALIRTLLGNDPDPMKDREAWHTIPCPVIKLSGRYHGGLLFGQVIPRFDNRIIGVCPIQFARRQAELIAAGFSADDAKDKAAKESKLPSKATPEFLRFRWAMQLANIFGARAGERETRALSADERKQITERAERQGAFAKGEFKKAVREIAGWPDKLSRDNLDNLLMHPDAEKALVLDPAQREVHNSKLAAALTALPERFRKRLLGKLRRGQSVSLKQIHGWLAGADATAFDAEVQRIIEAAATKHSKKQTQLTRDELLAEKLAAEFPKGRAPYARPVLRQAYEEVMKGFDPRAEKRDNQPRGCLCQTDELKEAQLQRRLEDQTNNHLIRHRLLILERLLRDLIAAPEFAKGDKSRIAGMTIEVNSELRDLSGKTRKAQEQDLGLRFGDFKRVSAKVEEACKRRGIRVTAGIIRKARVAEDLGWRCPYTGKDFCIDTLLDGVMDKDHIIPYADRESDSLDSLVMTWNEVNKWKDKRTAMQFIRDEGGKRVPGRPELEIMALAVFQKHVAGLDTRKGHNDDRNRKKRRIRRLLTEHYEEKEFTPRDLTVTSHLVRLGAQVLQRSFPKDQRPPVVSLPGSVTGEVRKAWKLIGCLEAANPAVMEEVEERDEATGEFKKVRRAKKKNDIRGITHMHHALDACVLALASYYFPRNGTVWSTMVKVGIDREADDDRRLWLAMTKRQPTPAEAALLKTTGLYQPDAQGRMHLDKLPEQLRQQLHQRLAEKRVVQHIPTDMAGLGKRIRQNTTGILRVISPLGETIWSRRNNSDTELDTLRKHIATALDRDKYRLELTAPIAEDDEPAESTSIPKKAKKPVLKAVSHVLGFLPNTGHGKLMNQKGVREIRDNFGIAILDHAPEGEEKFVIIPWHKVWPRMQELRVKNSGKPLRILRIGTLIRVPSKTGRSDYRGTWMIRGTKLNQKSGVLVNLTAPDTIETDGSGRDDIFENVGLKALVQGGLEILKTPLTGIISPPLKPAE

SEQ ID NO: 17626 - protein, 1092 aa, unidentified
  REGION 1..1092: note = Cas Enzyme sequence
MSPKLEFSFDVGHSSIGWAVLQSSAVVSPVANAPRVNILGCGVVTFGADDCLASKRRDYRRQRRHARSTRHRIAQLEKLLAHLKVLSADQLKQKHQQAGGHAAPWFLAARVLASNGAAKYLLDWPQLWDVLRWYAHNRGYDGNRRWSAQEAEAQSEDTEKEKTANALMEKHGTTTMAETLCKALGLEPLGDKQSSKENFKRLNAAFPRSIVEKEVRRLLELHQKKLPAITDTFLKSLFEDWRAAKISDLKLPDRYQGGLLFGQLVPRFDNRIISTCPITGEKVPSKNCPEFLKFRWAMTLANIRVAGAKEKELRPLAADERKKINVVMESEGALTPRELTKLVRETTGCTRDNLDTMLMHPDAKDGLLLNPIQKLVQGDKLKTLWPTFSPRVQKRARDLWERGKPVTLEHICGIAKKLGESLANFEAKLNKLADSANTKRSKKAGSLDSEALLKEPLTIKKSDGRAAYARPLLVRAYAEVMAGKHPKEDGNSLCVTEEMRQAQLQKQIDQQTNNHLVRHRLLILERLLKDLIADSAFANGDKSRIARTTIEVNRDLREMSGKSAKEIQQDLGRRLANHHGVAAKLDADLDGRTFNGKPIQITAGLIRKARIAEDLGWTCPYTGKTYDAIDLVSRQVDKDHIIPRSLRPSDSLDSLVVTFAEVNKMKGQRTAWKFVSDEQGKVVEGSPQLSIVSLTRFKQWAESLETYKGHDDDKRRKKKRKELLLLPNYEEKGFVPRDLTVTSQLVRLGAQIIKKTFAGSEKPPMVVSLPGSVTGTVRKGWNLLGCLELAAPQVKEADGGIKNKTDIRDVTHLHHALDACVLGLASYYLPNNGGLWEVMIKRNPNDGEKALLRSTGYFDFDSQGRFGLTELQDILKEQIRQRLAEKRVVQHIPADMSGMRVEENTRGITAIKDARVFLRQQSRDAKTGKLSIKPTEESANKVIGLKPGKLTPQKGVRVITDNFGIAILDHAVEGDDKFSIVPWHKVWPRLQELKAKNSDKPPRLIRNGMLIRVPKKSGRSDYRGTWMIRGTKFNRKSGAMVNFTAADTIETVGSGRNDIYENVRVQALVEGGLEILKTPLTGIISSPLKPTE

SEQ ID NO: 17627 - protein, 1029 aa, unidentified
  REGION 1..1029: note = Cas Enzyme sequence
MEKLLAHLKILSGEQLKQKHQQAGGHAAPWLLAARVLASNGDAKHLLDWPQLWDALRWYAHNRGYDGNRRWSAQEAEAQSEDTEKEKQAIALMEKHGTTTMAETLCKALGLEPLGDKQSSKEHFKRLNAAFPRPIVEKEVRRLLELHQKRLPAITGTFLKSLFDDWRAAKISDLKLPDRYQGGLLFGQLVPRFDNRIISACPITGDKVPSKNCPEFLKFRWAMTLANIRVAGAKGRELRSLAADERKKINAVMENEGALTPKELAKLVRETTGCTRDNLDTMLMHPDAKDGLLLNPVQKLVRGDKLKTLWPAFSPRVQKRVRDLWERGKPVTLERVCGIAKKLGEPLANFEAELNKLADSANTKRSKKAGSLDREALLKEPLTIKRSDGRAAYARPLLVRAHAEVMAGKHPKEEGGCLFITEEMRQTQLQKQIDQQTNNHLVRHRLLILERLLKDLIAEPAFANGDKSRVARTTIEVNRDLREMSGKSAKEIQQDLGRRLANHHGVATKLEEDLDGRTFNGKPIQITAGLIRKARIAEDLGWTCPYTGKTYDAIDLVSRQVDKDHIVPRSLRPSDSLDSLVITFAEVNKMKGQRTAWKFVSDEQGKVVEGSPQLSIVTLTRFKQWAEGLETYKGHDDDKRRKKKRKELLLLPNYEEKGFVPRDLTVTSQLVRLGAQIIKKTFAGAEKQPVVVSLPGSVTGTVRKGWNLLGCLELAAPQVKEADGGIKNKTDIRDLTHLHHALDACVLGLASHYLPNNGGLWEVMIKRNPNDGEKAILRSTGYFDFDSEGRFGLTELPDALKEQIRQRLAEKRVVQHIPADMSGMRVEENTRGITAIIDDRVFLRQQSRDAKTGKVSVKPTDELIGKVVGLKPGKLTPQKGVRVITDNFGVAILDHAAEGEEKFVIVPWHKIWVRIFKGFKNETGETIEKSLVERNGGKQPRILRIGTLIRVSNPKNKDYKGIWMIRGVQLNQRAGYLVDISEPDVIEYRVPKRKDCKQNVGLKALVQGGLEILRTPLTGIISSPLKPAE

SEQ ID NO: 17628 - protein, 1091 aa, unidentified
  REGION 1..1091: note = Cas Enzyme sequence
MNGKQIISQKSSPERICEADLQLAFDVGHSSIGWAVLQDRKAIDLLGCGAVIFRADDCLASTRRAYRRQRRHIRSTRQRIARMKVLLAHLGVLTKAQLDQPGCAWPWLLAGRVLQGGKLLTWPELWDVLRWYAHNRGYDGNRRWSAAESEAASEDTEKEETAKTLMNKHGVQTMAETFCAMCGIDPLGEKKSANLPGDKRPKGQNAAFPRATVESEVRRILQAHFGKLSRVDANLERSLLGRNNQDKTAWQAIPCPDLKLPKRYEGALLFGQLVPRFDNRVISTCPISGEKVPSRNCPEFLNFRWAMQLANIRVSRLGEKELSALTVTERKQMDSLMRAQGGMAVEEFKKQVRQVSGAIRDNLETMFMPPDAKEALLLDPVTRLIQSNEVKSFWAFLPERLQKRTRGQWRRGKSISLAKIRQQLSDLGGDIASFDAEVTRQLDTVNTRGRKKDKSTTVGQFLKQTLSIKKLDQRAAFARPLLKKAFEQVMAGKHPKEEGGCLFVTDKMREAQLTREIAAQTNNHLVRHRLLILERLLADIVKEYAAGAKTRVAKITIEVNRDLREMSGMTSKQKAQDLGLRIANHHHVVQKVEEDESLMNILRKRRAKVTAGLIRKARVADDLDWTCPYTGQRFQPVDLVTKRVDKDHIVPRADRFSDSLDSLVITYSPINKWKGKRTAWQFVEQEQGKAVPDLPNLSIMSLARYKHLVESLDTFKGHDDDKRRKRNRKALLLLPVYEEKEFTPGDLTTTSQLVRLGAMALKKAFLACDRQPVVVSLPGSVTGAVRKAWRVIGCLSLANPQVLDENGEVKKKDEIRDITHLHHALDACVLGLASHFIPNDGRTWELIVKRRWTPAEEKELRALGIFDKDSEGRFQMRDLDSELKEQIRQRLAERRVVQHVPARMDGLRVEQNMWRVVAVKEGEATISQRIRQPDGTRTVKRGEEKVGKLLGLEPIGGSGKLKANKGALVIPDNFGVALDPQPAIIPFHRVWPRLKELKMANGGKMPRVLRNGQIIRVPNGKRFKGIWKVFSAKNNASGMALDIGSPDVVRLKNKTQGHKINVLLASLIKDGMEMQKTRLTGLPACPTTSSA

SEQ ID NO: 17629 - protein, 1050 aa, unidentified
  REGION 1..1050: note = Cas Enzyme sequence
VVTFGADDCLASKRRDYRRQRRHARATRQRIAQMEKLLAHLKVMSAEQLKQKHQQAGGNAVPWFLAARVLASNGEAKYLLGWKELWDVLRWYAHNRGYDGNRRWSAQEAEAQEQDTEKEKNANALMAQHGTQTMAETFCKVLGLDPLGEKQSSAANFKRLNAAFPRPVVEKEVRRLLELHQKKLPGINDAFLKSLFDDWQAAKVPDLKLPARYQGGLLFGQLVPRFDNRIISTCPITGEKVPSKNCPEFFKFRWAMTLANIRVAGAKEKELRPLTGDERKKINAVMESEGALTPTELKKAVREMPGCERNNLDTMLMHPDAKDALLLDPIQKLVRGDKLKTLWPTFSPRVQKRARDLWLRGKLVTLDRVCGIAQKLGESLAEFETALNQIADAANTKRGKKEGSFNREALLKEPLTIKKLDGRAAYARPLLVRAYAEIMAGKHPKEEGSCLFVTEEMRQTQLQKQIDQQTNNHLVRHRLLILERLLKDLINEPAYANGDKSRVAQVTIEVNRDLREMSGKSAKEIQQDLGRRLANHHGVAAKLEKDLDGKTYNGQPIQITAGLIRKARIAEDLGWTCPYTGKTYDALDLVSRQVDKDHIIPRSLRPSDSLDSLVITYSEVNKMKGQRTALQFVSDEQEKTVDGMPQLSIVSVTRFKRWAEGLETFKGHDDDKRRKKKRKELLVLQSYEEKGFVPRDLTVTSQLVRLGAQNIKKTFAGVEKAPVVVSLPGSVTGTVRKGWNLLGCLAVAAPQVKEADGSLKTKTDIRNVTHLHHALDACVLGLAAHYLPNNGGLWELMLKRNPNEMEKTMLRSTGYFGFDKEGRFGLTELPEALKEQIRQRLAEKRVVQHIPADMSGMRVEENTRGITAIKDGRVFLRQQSRDAKTGKLSIKETEESANKVIGLKPGKLTPQKGARVITDNFGVAILDHAAEDEEKFVIVPWHKVWPRLQELKPRNAGKVPRVLRIGTLVRVPKKAGRSDYRGLWMVRGVQLNQKAGFLVDLSSPDVIQYRVSGRDDCAQNIRLQSLYDGGLEILKAPLAGIASCPITSSA

SEQ ID NO: 17630 - protein, 1510 aa, unidentified
  REGION 1..1510: note = Cas Enzyme sequence
MNDKEKNLPANKYGEADLELAFDVGHSSVGWAVLDNNSEFCSASFSFPGVRASGVLLFPSDDCLASVRRQLRGQRRHARATRKRIERIARFLLRVLSKKQKSNATLIKHLEYYLDSNPQNRANLQGKGHPAPWLLAARVLCGGDLLDWSQFWDVLRWYAHNRGYDDNVPWARQSENRSPSDQAQQAQEQDRKRQARAIALMKCYGTKRMAETVFCYLFDEADSGRCDFDPRKVDRLPFFQRYFKEEECIFPRETVKEEVRQILNAHRTMIESAGISPNIFIDALLDDWRVLPEEFLGTPESKNRIWLPKRYGTRKTRHLPDGRVRQERTHAGLLFGQLIPRFENRIISTCPFTFARRYIQFLNQGVTEEQWRLLPKSWKSRIRPHQSLAEEIARHLARIAAKVPTRASREFLQYRWTMLLADLAILGKSNVVSRRLSANERKHLDNEMQKRGTFSVDELRELISIAAPGCEAANLDDIFHETPERAKELFVDPAKNFAASSELAKNLFPLLPDRLQRRVLNELRRGRSLKPSSLLELLKQFGYVKEASDFEAKVQWLQDAENLNANRGGRGKSMISARKAKSRSVPILERILKLKPLSGRARYHREILKQAAQEVLDGFDPNKKALDPKNPDDKSEQKTKDGCLVETPEMVSLALGHASSGESAETAFPSWLEKWRKKRSRRGELANETLFQKYGEACAREVYEARTSNQWLSGQTNNHLLRQRLLLLRRLTDDIIVEFANGKAERIAGVTIEVARDLLAFSGLQKKDIGSDTKGALKSIKAQHYRVEEKLRREFAPEGKEYLITGELLWKAKIADDLGWRCPYTNDPISGFQLAKGEMDIDHIIPRSKRLTNAMEACVITYKGINQKKKNMTALEFVTRFQTKHIGSLTKGIRRLDDYLNFVKNLKLCRPPKARTQTNGESELNEEFENDNTGAIELNPKYLPGTDRLHPDYIRRRKRQRLLKIKSASDEDLGFTRRDLTITSHLNRLAQFALLRALPHLRPNDFVSLPGVVTGSVRDMGGWQLLGLLGRPNVCGERAMRKVKKINYETKEIERNPQTGEELWKEVPRKKNELRKLTHLHHAIDACTLGMLAHILPKDGKLWEYIAVGDLTEIQAADFGKRSQEFKRRGHPFSSLFTLVPIPENEREEESEKPRTHRVRSIWNKQNKELLHWVKESIGSALEARRVRLHIPAERNGMPTNQTVYRVLTSLNAPGYIPQLARAVLSAKEEQLKRLDEAVANEKNKGRLKKLSLERDALAKLLNRLKDFVQNVWLINRVRKDSETGKDVINRLKEYEDWRRRNNGERAPEAADETSQEDLDADAEEDAAKSKKSNRKKREPNLLRPFNPDKHKLLYLFDVVSRDRVIGLPPDNKIAQARLLPLKAGKELGANFAAVIFPPIEVNGEKQWRDGKEIIVLPFFRVHHSLEQLKAQGKKIQLLRNGALIHVPKGDRYGWWRVISVKDTEAYGKAVDLAAPDGVEKIKGNAPLTVLLKEGMKIISSPLTGHDIRR

SEQ ID NO: 17631 - protein, 1087 aa, unidentified; identical to SEQ ID NO: 16016
  REGION 1..1087: note = Cas Enzyme sequence

SEQ ID NO: 17632 - protein, 1114 aa, unidentified
  REGION 1..1114: note = Cas Enzyme sequence
MNQKNFLISYDIGYASIGWSIMNSADSSRQDPDILGCGVVTFPTDDCLASTRRNLRRTRRNIRATRMRIDRLKKYLSHIGFLSRKELDADGHPAPFFLAARALLGEQQLTALELWQVLRFYAHNRGYDGNTRWANAIENDDEDGNEDTEKLANAYNLMKKFEKQTMAETICAVLELDPTKSTATFTEKNPAYKTQNAAFPRNAVLNEVTLILAKHQHLLSLAHAAHLMQDDLTLEQRDNLSKAGIKLPKRYMGGLLFGQLVPRFDNRIIARCPITWAKLYDQVMEKENDEEKARHVADRDAKVPVKNCPEFYRYRWARLLANIKVDGKSLDAKCRTELTSLAEASGGLSKKEIEKYLKECLGKQIVTNLEAYFNLHPDSEDALVFDPAIKFAHSNAQGMQHFWPLLPDNVKKLSVSRWRKGKSISPSEWIERMSLMNLDTSSIDAAIKTVDKAQKEKKGKPHKSCLNKAIKPKLPSGRAAYSRTVLKQVFEEVMAGYDPTKPAGKTSASDGENKPQDGILYGLLAPGSRVRELESQRSLDSLTNNHLVRHRLLILERLTQDIIKQYTGNQPEKVTQVIVEVARELKEFSGSTAKEISSELNSRLKNFKSAVKHLEDNGISRDMINGSLIRKCRIAMDLGWTCPFTNQKYDVTDLTKLEREHIIPYSARATNALHALVLTFPEVNRMKGKRTARQFIQEHEGQTVPNTNLSIMTLKQYDSFVDKLSTKGHPDDSKRMKARKALLATAEFDEKEQGFTEGHLTQSSHLIKLASRQLRPVLPSATINHIPGIVNAEIRKAWRLTSTLALACPDVIDADGNAKPKDEIRNITHLHHALDAAVLGLCAHYIPLTQRGQDVKGKIWQAMLKRNKSEDEKRFLLSLRCFKSFPKDQGRSQGHDVRLMDLAAEVKNSLARKLAECRVVQHLPSDRSGARTELTTWRVLGFKGEGDTAEIALRQYSTTVEEGKRIKTRKDTTEKAGKLLGPRPIGGKGKLNDIKGAIVIAQNYGVALDPEPTIIPFHKVHWRVYDKSNPASLINHNSGKVPRILRNGMIISVKQGTWRGVWKIKSVKSTQAYGLSLDLSRPESLKLGKGNAPVSRLLEDGLELMSPDLTCTFI

SEQ ID NO: 17633 - protein, 1073 aa, unidentified
  REGION 1..1073: note = Cas Enzyme sequence
MKAWFAHCGVLTREDLDRPGHPAPFLLAAAALQGHHTLTASELWTVLRWYAHNRGYDGNERWSNAAETTDDGSDDTEKVETAKSLMKEHGTNTMAETICACLDLKPKEHLQKISSFQPYKTLNAAYPRNTVACEVALLLQKHQSSIPGLDSEVIRLIMQSAPLSDDDRSKLKEANIKLPQRYCGGILFGQLVPRFDNRIISRCPITWAFLYEREIQSGQSEEQARRVAERDSKVPTVKCEEFLQYRFARLLANIKANGEPLSAQLRQELFTLAQEKGRLKYGDLDKTIKAALGKGVVTNLDAYFTIHPDSENALVLNPALAFAQSHQPIAAVWELLPPEVQTSAVRGWQRGNGITLADWLKDGSVPEATKIKLQAAFEKDYVIAAKRKKKGVLSKDAYLSQIRKPADLSGRASYARPVLRKVVEEVLAGFDPSKPARSQAHPEGELKALDGVLYPLLDPSSSVRKIQDARPLDSLTNNHLVRHRMLILERLTDAIIKEFCGGKVEQVERCVVEVARELKEYSGMTAKDITGELNSKLKHFKDAVKYLETHVPHLALSGSLIRKCRIAMDMNWQCPFTGEKFDAADLPKMEREHIIPYSTRASNALHALVLTWPEVNKMKGKRTARQFIMDEGSKEVLGKANLTLLTLNLYDALVEHLDTMGHLDDYRRKKARKDQLATTTFEDQEQDFTPGQLTQSSHLMKLALRGLANKFPNAKTDPIPGIVNAEIRKAWNIIGTMALACPEIIDAETGKAKPKDEIRGITHLHHALDAATLALTAHYFPLQYRGTDRKGLIWEALLKRRKSPEDWNLLRTLKIVQKDSEGRMRITTPPNEVKEQLARKLAECRVMQHVPADRKGSKAELTTWGVVAIIGKEALTIQRTNRGSLELEKSNGNGRSPRKWVDKAPSKEAVSLLKDYGHLLSARDRNLVQRGICKLTTEKLSKLLGPQPTHSQGKLKAVDGALVIGENYGLALDPLPTIIPFHAVHKTLELLRAQNDGKPIRVLRNGMLIRVKEGTWKGTWRITSLKESKAYGLSADLAKPDGIKLTKGNAKIPQMMLSGLEILPLNYAGFANS

SEQ ID NO: 17634 - protein, 1046 aa, unidentified
  REGION 1..1046: note = Cas Enzyme sequence
MRIERLKKFLLSIGFLERVDLDAEGHPAPFFLAAKALLEKHKLSKLELWHVIRWYAHNRGYDGNSRWANDVEEDEDENEDTEKLANAYNLMTKYQKRTMAETVCAVLELDLNQTHASFTEKNSAYKTQNAAFPRKNVLEEVGRILALHSDLISPEHAVMLMSDDLTIAQRKIIQQAEIKLPKRYFGGLLFGQLVPRFDNRIIARCPITWARIYDEQCAAGKDDDSARHAADRDAKVPVKNCKEFFRYRWARLLANIKVNGNALNKEVRQSLTDIAERSGGVSKSDIDKLLKDVYGKAVQTNLEAYFNLHPDSEEALVLDPALKFALSKSQGMQHFWPILPENLQKLSLSRWQHGKSISPAEWITRMQSKGADVKPLEAAIRLVDQSQKPRKGKPVKSCLHKAIKPKLPSGRAPYARPVLQQVYGEVMSGYDPTKPAAQTSASEGENKPVNGVLYALVDPKSRVRELESLRSLDSLTNNHLVRHRLLILERLTKDIVKQYADNRAENVTQVIVEVARELKEFSGSTAKEIASELNGRLKNFKEAVKHLQKNGISDDLINGSLIRKCRIAMDLDWRCPFTGQKYDVQDLNKLEREHIIPYSARATNALHALVLTFPEVNRMKGKRTARQFIIDHEGKEVQGSHLSIMTLKQYDSFVEKLSTKGHPDDTKRMKARKALLATTEFDENEQGFTEGHLTQSSHLIKLASRQLKPQLPTAKIEHIPGIVNAEIRKAWRLTGTLAMACPDVRDERGEIRSKDEIRGITHLHHALDAAVLGLCAHYIPLTQSGKDVKGKIWQAMLKRNKTEEEKRFLLSLRCFKPFLRDKGHTQETDVRLIDIPAEVKNELSRKLAECRVVQHLPADRSGAKTELTTWRVLDVKGEGDAAEVSLRQYTTTVEDGKRIKNTKITTEKAGKLLGLRPATGDGKLSRIKGAIVIASNYGVALDPEPCIIPFHKVHWRVYDRSNPDSIINRNGGNIPRVLRNGMLIKVNNIPGKEGVWMIKSVKASMKVSLIRPHEIGVEKMWRDVLIKTLIKNNFESLPNSYVGDLH

SEQ ID NO: 17635 - protein, 1067 aa, unidentified
  REGION 1..1067: note = Cas Enzyme sequence
MTQQVPRPFEIALDIGHSSIGWAVFQNGEKFDLLGTGVVLFPADDCLAIKRRAYRRQRRHVRATRQRIERLKLLLLHAGVLSEVELKEPGCAWPWKLAAEVLTGSGRLLTWRELWDVLRWYAHNRGYDGNARWSRSEEADSDDTEKEKKAISLMDEYGTKTMAETFCRVLKISPLGVTKSSRERFKGLNAAFPRHIVYAEVRSILEKHQGILPQLTPELLRALVGHDHEQNKTWDDDAWQAVAVPAVRLPKRYKGSYLFGQSVPRFDNRIISSCPITYQRVLAETGDASKAARDSKVPVKKCREFLLYRWAMILANLTVNSGHGVRPLTADERKAIHQVMIKGDPEMKCEAGHLTKTQLKKVLKQKIGDATNNVDSYFLTPHAEDALWLRPEKLPSGRAPYTRQVMKQAIREVFEGKHPTEKGNSLYLSDDIKEAQLQRTLDEKTNNHLVRHRVLITRRLVQYIIKSYTSADASRIGRITIEVNRDLQAFSGKTNKEIEGELNQMLKDHSGVVKQLEKKFSEASKPYRITAGLIRKARIASDLGWRCPYTGKDYDAIDLAERAYDKDHIIPRSLRPSDSLESLVITSPEVNKMKGNRTGLQFIRDEGGKDIAGSKSVGQMKPNLFSEKEYRQFISKLDIRNGHKQDRDRKKKRRALLELEKYEEKGFLPKDLTQTSHLVRLAATEIEKEFSGLENKPRIVSLPGSVTGEVRKGWKLYGCLAAHNPEVQKLLDRKKDEPDLNIKKELRDLTHLHHALDACVIGFASHFIPNEGNLWEILVKRNRRPHEDELLVQMGNGYFIRDAKGHACLHEFSPDLEQQITNRLAECRVVQHVPKRMGGLAGLEENTRGITAIEVPDAKAGSGKKSKEPKLKEIWNNQSGQPIPDLQNMEGILVRLQQYGPRDAKNHDMRVRKPSREKASKLLGLRPENGSGKLRAIKGVRVVEANFGLALWRKNGKADGEPMARIILWHKVWPQLKAIAVKENGGKWPEVLRAGQVIHVPKSGKQSNYQGYWKIKGAEDQEQRGMTLKISRVDSASTEKIAAAVKTLLECGMMVVTSGLTGVPLNM

SEQ ID NO: 17636 - protein, 1080 aa, unidentified
  REGION 1..1080: note = Cas Enzyme sequence
MNGKGKVLAAKPNFGIAFDVGHSSIGWAVLQTEGRAEIAGCGAVTFRADDCLASARRGYRRQRRHIRSTRQRIARMKVLLKHLGALKPEQLDQPGCAWPWQLAARVLCGGKLLTWPELWDVLRWYAHNRGYDGNRRWSAADAEAIADDTEKEENAKTLMGKHRVGSMAETFCMELGVDPLGQKRASTVRFKGLNAAFPRAIVEGEVRRILQAHSGKLPKVDAALERALLGRDNRDRTAWQSIPCPALRLPKRYEGALLFGQLVPRFDNRIISKCPVSGEKVPSRNCAEFLNFRWAMQLANVRVARFGEKELTPLTAPERRQLDAAMRKQGGMGAEEFKKHVRQAAGAIRDNLDTMLLHPDAKEALLLDPVQKIVQSSDLRPLWQILPERLQKRARGQLRRGKTITPARLRAQLEELGLSVSAFDAEVTRQLDAANTRNRKNDERISRQGLLNRPFAAKRLDGRAAFARPLLKRAAEEVMAGKHPKEEGGCLFVTEEMRQAQLSREIAEQTNNHLVRHRLLILERLVGDIIKEYAGGDKARVAGITVEVNRDLREMSGMTAKQKAQDLGLRIANHHHVVKKLEEDESLMRVLRKQGTRITAGLIRKARVADDLGWACPYTGQRFEPVDLVTKRVDKDHIVPRASRASDSLESLVMTFSAINKWKGKRTAWQFVEQEQGKPVPDLPNLSITSLSRYKQLVESIETFKGHDDDKRRKKRRKDLMLLPVYEEKEFTPRDLTTTSQLVRLGAMALRKAFLGCKRQPVVVSLPGSVTGAVRKAWKVLGCLSLAAPGVLDENGEVKKKQEIREVTHLHHALDACVLALASHFIPNNGRIWELIVKGRWTPAEERELKTLGIFSWDSEGRFQVRDLDKTLKEQIRQRLGERRVVQHIPARMEGLRVEQNTWRVVSVKDGEATLRQRVRAADGSRPGKTTAEKVTKLLGLQPVSGRGKLLVNRGTLVIPDNFGVALVEPEPVIIPFHKVWPRLSELRAANGGRMPMVLRNGQLIRVPGGKSFKGVWRVFATKNNASGMALDIGSPDVVRLKNKTEGHKINVRLATLIRDGMEVLRTPLTGFAACPAPSS

SEQ ID NO: 17637 - protein, 1047 aa, unidentified
  REGION 1..1047: note = Cas Enzyme sequence
LLGTGVVLFPKDACLASARRGFRRSRRNIAARRSRIDRLKNYLAGLGVLSRDQLDANSNSYPWLLAARILASDGKKTLTWEELWSVLRWYAHNRGYDGNALWAGDDADAGDKEDTDKVKNSIALMEKHKTATMAETVCKALGLDPMGEVKASRIYFKGNNAAFPRGVVTEEVRRILAAHAGKLPKVDDALSDILLRNAATSGLELPARFKGGLLFGQYVPRFDNRIIPACRITGKNTPLKRCPEYLLYRWGRLLNNLTVFGADGQIRTLLPAERQALHSRMEADGFFTKRTLNAALKDVTGCTPANTESFFLTEEMEEALVLDPVKKLLATNQIMKDLWPQLSAESREKAQSSLSAGKKIRLGDILAEMETAGQDTTAASDALASHQKKAKKKNADLATRRLSADYPKGRAAYCREILAKTFDESISGKDSTKEGGCLYETEEIRNRLLREPLVQQTNNHLVRHRLLVFERLLAHMVEEFAGGDEKRIAATVVEVVRELQEFSGLNSKEITHKLNEKLGNFRSVVKNLEEAIANSEERVAITGSLIRKARILEDQGFVCPYTGTHLSYNHLLADRLEIEHIIPRSLRPSDALSSCVMTFRSVNDMKGQRTAMQFICEEQGREVPGHENIQITTKKAYVDYVAKHKKQYPQKSDDRRRCERRAELMLMERYDQRNADFTERDLTQTSHLNKMAIRLVKQRIGIDAKHLPGNVTAFIRQKLHIDECLFNAVPRLQTAAKGQPKSSKRKKKAEEAPVEPIQDDMPPRKLTKADIRELTYLHHAMDAVTQGLALLLFAPEDWPLLVKRNLPDSEQRHLKARYPFLDFSADKHISIQDLPEDTLHTISERLAECRVVRHIPAKMHGIIVDQTTWGTVAAGAITTLRQKTTEKNARCDENGKRFIKTTEKKRSLLLGGPDAPDGKLAKIKGAILVTENWGCALDPSPTVIPHFKVYPQLRALREKNGGRPIRILRKGSLIQVKAGTYQGIWSVASIKDNADGICLDINAADKVKLENRSDDSKINVRLDSLRKSGLKILKPKLTGACPTTSSP

SEQ ID NO: 17638 - protein, 955 aa, unidentified
  REGION 1..955: note = Cas Enzyme sequence
NRGYDGNALWAGDDADAGDKEDTDKVKNSIALMEKHKTATMAETVCKALGLDPMGEVKASRIYFKGNNAAFPRGVVTEEVRRILAAHAGKLPKVDDALSDILLRNAATSGLELPARFKGGLLFGQYVPRFDNRIIPACRITGKNTPLKRCPEYLLYRWGRLLNNLTVFGADGQIRTLLPAERQALHSRMEADGFFTKRTLNAALKDVTGCTPANTESFFLTEEMEEALVLDPVKKLLATNQIMKDLWPQLSAESREKAQSSLSAGKKIRLGDILAEMETAGQDTTAASDALASHQKKAKKKNADLATRRLSADYPKGRAAYCREILAKTFDESISGKDSTKEGGCLYETEEIRNRLLREPLVQQTNNHLVRHRLLVFERLLAHMVEEFAGGDEKRIAATVVEVVRELQEFSGLNSKEITHKLNEKLGNFRSVVKNLEEAIANSEERVAITGSLIRKARILEDQGFVCPYTGTHLSYNHLLADRLEIEHIIPRSLRPSDALSSCVMTFRSVNDMKGQRTAMQFICEEQGREVPGHENIQITTKKAYVDYVAKHKKQYPQKSDDRRRCERRAELMLMERYDQRNADFTERDLTQTSHLNKMAIRLVKQRIGIDAKHLPGNVTAFIRQKLHIDECLFNAVPRLQTAAKGQPKSSKRKKKAEEAPVEPIQDDMPPRKLTKADIRELTYLHHAMDAVTQGLALLLFAPEDWPLLVKRNLPDSEQRHLKARYPFLDFSADKHISIQDLPEDTLHTISERLAECRVVRHIPAKMHGIIVDQTTWGIVAAGAITTLRQKTTEKNARCDENGKRFIKTTEKKRSLLLGGPDAPDGKLAKIKGAILVTENWGCALDPSPTVIPHFKVYPQLRALREKNGGRPIRILRKGSLIQVKAGTYQGIWSVASIKDNADGICLDINAADKVKLENRSDDSKINVRLDSLRKSGLKILKPKLTGACPTTSSP

SEQ ID NO: 17639 - protein, 1080 aa, unidentified
  REGION 1..1080: note = Cas Enzyme sequence
MKQGQIAFSFDIGHSSIGWAAFQVSDAPGTFHSLLGTGVVLFPKDACLASARRGFRRSRRNIAARRSRIDRLKNYLAGLGVLSRDQLDANSNSYPWLLAARILASDGKKTLTWEELWSVLRWYAHNRGYDGNALWAGDDADAGDKEDTDKVKNSIALMEKHKTATMAETVCKALGLDPMGEVKASRIYFKGNNAAFPRGVVTEEVRRILAAHAGKLPKVDDALSDILLRNAATSGLELPARFKGGLLFGQYVPRFDNRIIPACRITGKNTPLKRCPEYLLYRWGRLLNNLTVFGADGQIRTLLPAERQALHSRMEADGFFTKRTLNAALKDVTGCTPANTESFFLTEEMEEALVLDPVKKLLATNQIMKDLWPQLSAESREKAQSSLSAGKKIRLGDILAEMETAGQDTTAASDALASHQKKAKKKNADLATRRLSADYPKGRAAYCREILAKTFDESISGKDSTKEGGCLYETEEIRNRLLREPLVQQTNNHLVRHRLLVFERLLAHMVEEFAGGDEKRIAATVVEVVRELQEFSGLNSKEITHKLNEKLGNFRSVVKNLEEAIANSEERVAITGSLIRKARILEDQGFVCPYTGTHLSYNHLLADRLEIEHIIPRSLRPSDALSSCVMTFRSVNDMKGQRTAMQFICEEQGREVPGHENIQITTKKAYVDYVAKHKKQYPQKSDDRRRCERRAELMLMERYDQRNADFTERDLTQTSHLNKMAIRLVKQRIGIDAKHLPGNVTAFIRQKLHIDECLFNAVPRLQTAAKGQPKSSKRKKKAEEAPVEPIQDDMPPRKLTKADIRELTYLHHAMDAVTQGLALLLFAPEDWPLLVKRNLPDSEQRHLKARYPFLDFSADKHISIQDLPEDTLHTISERLAECRVVRHIPAKMHGIIVDQTTWGTVAAGAITTLRQKTTEKNARCDENGKRFIKTTEKKRSLLLGGPDAPDGKLAKIKGAILVTENWGCALDPSPTVIPHFKVYPQLRALREKNGGRPIRILRKGSLIQVKAGTYQGIWSVASIKDNADGICLDINAADKVKLENRSDDSKINVRLDSLRKSGLKILKPKLTGACPTTSSP

SEQ ID NO: 17640 - protein, 1080 aa, unidentified; identical to SEQ ID NO: 17639
  REGION 1..1080: note = Cas Enzyme sequence

SEQ ID NO: 17641 - protein, 1079 aa, unidentified
  REGION 1..1079: note = Cas Enzyme sequence
MPQDQIAFSFDVGHSSIGWAAFQIEDSSDSFHSLLGTGVVLFPKDSCLASARRGFRRSRRNIAARRSRIDRLKNYLAGLGVLSREQLDANSNSYPWLLAARVLASDGKKTLAWEELWTVLRWYAHNRGYDGNALWADDDADAGDKEDTEKVKNSIALMEKHKTATMAETVCKALGLDPLGEVKSSRIYFKGNNAAFPRGVVTAEVRRILAAHAGKLPKVDDALSNILLQNAAACGLELPARFKGGLLFGQYVPRFDNRIIPTCRITGKNAPLKKCPEYLLYRWGRLLNNLTVFGADGQIRTLLPDERKALHARMKADGFFTKRTLNAALKDVTGCAPANTESYFLTEEMEEALVLDPVKKFLATNKVFCAVWPHLDAESREKIESSLSAGKKIRLGDILADMETAGQDTAPARDALAALQKKAKKSADLAERRFSADYPKGRAAYCREILAKTFVESMAGKDSTKGGGCLYETEEIRNRLLREPLVKQTNNHLVRHRLLVFERLLDHMVEEFAGGDKQRIAATVVEVVRDLQEFSGLNAKEIAQKLNEKLGNFRSVVKNLEEAISHAEEKVPITGSLIRKARILEDQGFICPYTGAPLGYPDLLADRLEIEHIIPRSLRPSDALSSCVMTFRAVNDMKGQRTAMQFICEEQGREVPGHENIQITTKKTYESFVAKHKKQYRFGTDDRRRCERRAELMLMDRYDQRNADFTERDLTQTSHLNKMAIRLVKQRIGIDAKHLPGSVTAFIRQKLHIDECLFNAVPRMQKAARGGTKSPKRKKKGDEAPVEPIQDDMPPRKLTKADIRELTHLHHAMDAVTQGLTLLLFAPVDWPLLVKRNLSDGEKRQLKARYSFLDFSADSHIGIQDLPDATLQTISERLAECRVVRHIPAKMHGIVVDQTTWGIVAADAITQLRQKTTVKNARCDETGKRFVKTAKEKRTRLLGGPDAPDGKLSKIKGAILINENWGCALDPTPTVIPHFKVYPQLRALREKNGGRPIRLLRKGSLIQVREGTYKGVWSVASIKDNADGICLDINSTDKVKMENGSDDSKINARLGSLLKAGLKILKPKLTGACPTTSSP

SEQ ID NO: 17642 - protein, 1078 aa, unidentified
  REGION 1..1078: note = Cas Enzyme sequence
MSFSLSFDIGHSSIGWAAFKFPKNQLEILGCGVVTFPAEDNQNQQRAGFRRQRRHIAATRNRIKRLEAFLVQAGALSVEDVEYCRENPNPWPWLLAAQVIVTNRGLNWRELWPVIRWYAHNRGYDGNALWAGEDSDPDDVKKVQTARELMEKNNTSSLCETVCKLMDIDLKVQKNPKLRHYFKGENAAFPRDVVVAEVRKVLERHLGILDGMTQELIEALLDDWKRVSEVGFDAKLPARYFGGLLFGQMKPRFENRIIPNCRVTGEKTPSKHSREFYRFRWAMLMGNLRVADPFEGGSRALSPTEREQLNVAMATSGYLTKTTLKKVLVKDLNLEPTNLDAMLLIPEMEKALVLDPALREMSGTKYKKIWKEIPNTWHSALLNQLFNGRNYRSKPASLAQWRSRIESKGALSVELDSALTDAYDSECKLLAKKKGVGELPSYEAFLNRSLRIAPSNMASGRAPYARVKLIEAVEAIMKGEDPRAVGGVLEETASVRQRQQKEGVDQNSNNHLVRHRLKIFEKTLIDLVNRYADGDASQVEWVGVEVVRDMVEFSGKTAKEKAKIIGEQLWHHRKISKYLEKEREAAGGSWEITAGLIKKVRIADDMGWKCPYTGKIYNLNQIIHGDVDREHIIPRSKRPTDAMHALTLTFSTINKEKGARTAMQFIEATKNDSRTLTPKQFYEFVSKLKKSNGPSKDDERRCMKRKVALLTRDYEPRGKAKEKSEETAIDGFTEGSLTQTSYLNKLAAQRVHHWFSEQLEDGSKLPKVMQLSGSVTAATRRGWNLLSPLEAACPETRGKSKTEIREITHLHHALDAIVIGLSAHYFPLDGRLWTLLSKRSIKDPSAQAYMRAQLGDLISFSSSGSWQLEPLEDSLISQIVERLKEKRVVRHNPRTMRGLRVQQNVWRVEDEAPDDPSKMLIRMKPRNEDGDKVLKQKSERKTKLFGSDPKDVTGKLKDLKGVLIVEDNYGMALDPEPKVIPYQQVWAQLQQLKKQNGGRTVRVLRNGHIIRVQKGRYRGLWRVHSIKDANMGLVLDIASPELVRVSNGVVGAKLNVRLKTLLSNGLELLNLDSSSHEV

SEQ ID NO: 17643 - protein, 1113 aa, unidentified
  REGION 1..1113: note = Cas Enzyme sequence
AVLQVPAPDAPSLLGCGTVIFQADDCLASRRRAFRRQRRHIRSTRQRIARMKTLLSHLGVLSPDALDKVSSSSPWFHAARVLLARDREKLTWPLLWDVLRWYAHNRGYDGNKTWSRHGQDAVAEKEDTEKVENARSLYNRYKTHTMAETWCAVCGIDPLGTKTSCHLPGDKRPKALNAAFPREDVEREVAAILSAHIGHLPHVDESLLTALLSDWHAIPCPEIRLPARYQGGLLFGQLVPRFDNRIIATCPITYERHYQRLLAETGNEESSKDEALKLSKVPSAACPEFFRYRWAMQLANIQITSPAGLRRLSVEERKLLHQQIRARGYFTKGDLKKAVRTLTGGVPDNLDQMLLHPDADKALVLDPVQRLLTSSDLAPALATLPEPLKKRLLGRLRREDRLTLTAIREWLGADTAAFDAALETRLNVAATRRSKKAAPVTREILLATELHVAPPSGRAPHSRALMTEVFDFVLSTDRHPAEDGGPLFRSEAIRSAQLQRAIDEQTNNHLVRHRLKILDRLHADLLKEFAHEDTSRVKKITIEVNRDVREMSGKSTQEIAKELGQQLANFKSVVKKLEAAFEGKGIKIGPGLIRKARIAEDLGWKCPYTGQDYDAFDLLNRRVDLDHIIPRSLRPSDSLDSLVVTFVNKMKGKRTAVQFIEEEQGKPVEGLAQLHIKTLSRFLKDVENLKPSSDPRKLKKHGIYKGPIDDLLRCWLRKQRLQLRDYVDKEFTPGDLTKTSQLVRLGAQGLQKNYPENPPVITSLPGSVTGAVRKSWRLLGCLGAANPAVTDETTKTEVRSITHLHHALDACVLAFASHFIPRDGGIWELLVKRSLSEPEQARLLAVGHLFQRDAGKRVSLTDLPKNFKEQIRKRLAERRVVQHLPKDLSGMESKETLWRIFDPEDIHPNSRRLATWLAEKKISIPPFESSTALIICRKRRGAVDDDSTGGKIFRETKTWRWVYEIKDKSALIGLTPEGNPSHAKLNKIKAVKVLGKNFGVALDPEPKLIRPHKVWHQLTSLHKRNQNHPVRVLRIGSVIQIHKKDGLSDYRGIWTVRGVFFKQKGGFMVDLSPSDYVQYRRVRGAFEGVRISTLMKCDLELLNPPLSGRISSH

SEQ ID NO: 17644 - protein, 1071 aa, unidentified
  REGION 1..1071: note = Cas Enzyme sequence
MTLEKLSFAFDVGHSSIGWSVLTAPASGMPDILGCGVVLFEKDSALAIQRRQHRQQRRHIRATRQRIARMERLLSSLGVFTAGELKSKHIANGGSPTPWLLAARVLASNGQQTLNWSELWDVLRWYAHNRGYEPIGADEDEEENKEKRAHAREGMERFGKQTMAETICAWLGQDPLAPRSGTTESYKAKDAAFDRHVVREEVRRLLTSHIGKLPCIDEDFIRALLDDAQAKPCAGIRLPRRYTGGLLFGRLATRYHNRIIGRCPISGAKLPVKDCPEYYRFRWALLLANITVATAADSPLRELTATERAELTKIAERDGYFTPAEFRKTVRTLTGAVRDNLDQMFMDATAAENLVLDPALKLATTNSWIGPLWPHLPENTRRHALNHWRRGRTQTLADLRSKAAASGADLTGFDSALAQLCTAPARKSRKKEPIPPPTADEILSTRFAAPLIGGRAPYARPLLIQAYQQSMQGRHPRAEDGCLFETPEQRRSRDQRTIDQQTNNHLVRHRLQILGRLVAQLIADPAYANGDAARVERITLEVNRDLREMAGLTAQDIAKEMNERLRSHAQVSKRLLAELPPGTRINASLIRKARIADDLNWQCPYTGHDFEPVDLVTRRVDLDHIIPRSLRPSDSLDSLVVTFSEINKWKGNRTAWQFVADEETKAVPGLPHLHIKQLRRYEEDVRAFDKRGHIDDQRRKKRRIEKLLLARYEEKGGGFTPGQLTQTSQLARLGQQVLRAPFTHLAQPPVFVALPGPVTARVRAAWDALGCLAEAAPGVLEKTKDADGREHFVVKTKTEIRNITHLHHALDACVLGLASALIPNRGDVWRLLLERKLKPDQRADLEALNLGDFDANGGFRLRDLPHSLKQQIRTRLAERRVVQHVPADMSGLRVEENTRGVLKRENGRVFLRQRKKNTNGEFVVNRTDELESKVVGLNPEGKLAKIKGVRVVTDNFGVAILDDEKLPPAERFVVIPFARVWEQLETLKARNGGRSPQVWRNGQVIKLPKGPRAGHWRIFSIKNTSNMGLVLDLGTVEAIRPTWINVLLKTLLRNGASRAITTLAGSEARNA

SEQ ID NO: 17645 - protein, 1094 aa, unidentified
  REGION 1..1094: note = Cas Enzyme sequence
MKPSDLTLSFDIGHSSIGWAVLTQRKPHPDILGCGSVIFPKDDCLASARRTHRRSRRNIRSTRQRINRMKQLLEYLGVLSRKELDRHPGHPAPHWLAAKALVSEKPELSWAELWDVLRWYAHNRGYDGNARWSRQEQDDEDTEKERAAKSLMDNHGTSTMAETVCAELRIDPLSSRFSSNKPFKTLNAAFPRHIIRDEVLALLEKHQDHLPKLDATLISCLISRDRSTDQTAWQSIIVPGMELPKRYQGGLLFGQLVPRFDNRIIGTCPISGEKIPNKSCREFLEYRWAMLIANIRCDGKPLSVKQRQAVDTLMREKGRLTPTELRNEVKALTGSQNNNIKASFEIHPDSKDALVLDPSEDYFHKAGTKPKQSTDPAGIWVFWPHLAEQTRNRIRGRWHKRRPVTLQWMLDDAAKHQIDASALQGAIDKAYAADQKKKKPAYTIRERLLNRPYGPAWPSGRAPYSRTVMKKVIDFVLSTDRHPTEAGGRGTDAGPIYRSPEVLKKERDRTIAHLTNNHLLRQRLSILSIDSPGRNSLLTDIINEYAGGNLTRVTDIVVEVARDLQHYSGMTAKEMAGELTKRLSQFNEAVKHLETHAPDLPITGSLIRKCRIALDLAWHCPFTGKDYDAYTLRDLEREHIIPYVDRPTNAMDAQVLTWPEVNRMKGKRTALEFIIDVGGQSVDGKKNLSLFTKKQYEAFVDKLKVANKFTYPDDYHRQTARKKWLLMERYDRKNHEFTQGALTRTSYLNRLSQSQLAKRFSDPDTGDCRIRIHALPGQVTAEARKSWDILHTLDTASPECAGKNKTKIREITHLHHALDAATLGLIQHYLPGTLKGQKENEKGAIWKALLERYKSPGQIALLLRTGVFKQTLRTDRKGNPRPDAELIDLKSEVKNQITRRLTEKRVTQHVPADQSGAALEQNPWRVWQIKGTPGDPHAEVILRQRASIVEKGRRVFKHKETREKAGKLVGLKPGKLKKNKSVLIISENYGMALDPEPEIIPFHDVPRRLKNITEKNGGQKPRVLRNGMTVQVSQGRYTGIWKIRSIKANASGLAVDMSKPHLEQPSKINVLVSSLLKSGLEILTPPLTGLNSSD

SEQ ID NO: 17646 - protein, 1042 aa, unidentified
  REGION 1..1042: note = Cas Enzyme sequence
VLTKTQIDAPGHSAPHYLAARVLLSKQPILTWLELWHVLRWYAHNRGYDGNSQWARNEINTGDTDKEKAALELMKKHGTEGCSMAETICAALGVNPLSDKQSSAKPFKTLNAAFPRKIVQHEVLDILNIHLGQLPKLNRDFINTLIAPESNFERDAWKTIPVPNINLPKRYAGGLLFGQLIPRFDNRIIARCPISGNKVPNKATSEFLNYRWAMILANLRIEGQPLSVEQRQFLNNKMMAKGRLTATELGQLMAQFSGSKNNNTKSYFELHPDASDALILDPALALFNEEGTGSKNLKPFWHCLPEIIRNRALGRWKKRRIVDLHWMQTQCASDPKARENLTSAIDIAFSIDQKKKKPIYLTRDHFLTQSFAPAGLSGRAPYSRTVMKETVDFVLSTNRHPTEASTDSLKAGPLYRSKAVISEERKVPIPHLTNNHLIRQRIDLLLRLVDDIIEEYAQGDCRLVTDIVVEVASDLQTFSGLTKQDMDKELAKRLSHFKSAVKKLEEDAPDLPLTGSLIRKCRIAMDMDWKCPFTGKQYEVHQLPNMERAHIIPYADRPTNSLDAIVLTFPWVNHLQGKRTSMAFINEMANDQRFLTPNKYKNYINGLKIAKKSTHPEDYRRQLNRQKLMLLERYDSKEQGFTQGSLTQTSHLNRLSAGQLHKKFLDPISGDSTVNIHTIPGQVTAETRKAWRLLGTLSMACPEVVDQNGETKNKTEIRSITHLHHALDAVVLGLTHSYLPGFISGHMFNNKGSIWNAMLKRNKNEAELSLLLQTGMFTKCTQNGENNSTNCYEVRLNDIPKAVKQQVAERLAEKRVVQHIPADQSDYDLEETSWRYLCDYEGQAVILQKISRDLLISKNSGDFEGWGNLPTSKETQALLAVKAIRETLIKYNINIKLIERGLLKITTEPYRSLIGLKEGKLNALKSVKIIKQNTNYGITLGISPKLIPFHNVPSQLQIIRAENGGKSPDIIRKGTYISVRSGTWKGAWRVTSVKQSKAYGLSVDLVFPHMVSKGKGNAKIFNMLEDGLRIHRNNLIGIYINV

SEQ ID NO: 17647 - protein, 1117 aa, unidentified
  REGION 1..1117: note = Cas Enzyme sequence
MNKLLFSFDIGHASIGWAVLDTTAERLPQLKGCGSVLFPTDDCLASTRRQLRRQRRHIRSTRTRIARIKKLLAHLGVLSLAQLDEPGGPWPWKLAARVHAGGPLLSWRELWDVLRWYAHNRGYDGNRKWSRDDEEDSEDTEKEKAARALMEKLGKPTMCQTICAKLQIDPLSSDKKSSPIAYKTSNAAFPRDIVLHEVMDLLAKHVGKLPQVTPALITALCAEDNTPKDGKSVRDVLKELGLDARLPGRFVGGLLFGQAVPRFDNRIIGECPVSGEKRPLKDCREFLEFRWAEILANVTVRRAKDGDKETLTVEQRAKLTAMARDAGGFTAGEFKKAVLEVSGAEASNADLMMTHPDAEEALVLDPARRFVRTNGMMKAVWDDLPEVLQKRLLGRWNKHRRVTWAWLLQQPDAPKTLEAKLKAAWQETKQKPRKGDAEPTWEDRVKQSLSPNFASGRAPYSRAVMMQAVEQAQQGKHPREAGGVLEITEERKERERQKEIDELTNNHLVRHRLKILLRLVEDMVKTYAEGNPEQVDRCVIEVARDLVEFSGKTNKEVAQELGIKLKNFKDVSKRLVSDLEGTTIPIGAGLIRKARIADDLGWICPYTGKEYDAVTLARGKVDKDHIIPRSQRPSDSMDSLVVTFDAVNKWKGNRTAWRFVEQEQGKQVPDRPDLTIVTLRQYEAFVTKLAGEKKPSRFTPGAGSMDDKLRQWSRKQKMLLKDYEEKEFTPRDLTVTSHLVRLSARQIEKRFKHLQNTDRIVSIPGSVTGVVRKSWNLLGCLAPACPEVMAMLPTLDDKRQLILDAEGKPSLSLQVRPKGDIRDITHLHHALDACVMAFASHFMPKDGRLWEQIVTKKVLKHDEEAFRNRYGWHGLLKLAEPKNESDKGRTRRLEVLDLPQTFKQQIVDALKERRVVQHVPADMSGARLEMNTWRVVKTEGDQVTLRQRTFGPKDVDLETGARKRTTKEAKERASKLVGLKDGKLSALKGALVIGENYGVAILNAAVVVNEEERYRIIPFHQVKLQMLELTKLNKGRAPLVLRGGQLIRVKSGNFPGTWRIFSVKNNSNAMSLDIGWPDVTKLENKKEGHKINVRLKSLLAGGLELLNHNLLGSDSTP

SEQ ID NO: 17648 - protein, 1102 aa, unidentified
  REGION 1..1102: note = Cas Enzyme sequence
MNASTKIQPAKTAPALQLAFDVGHSSIGWAVLQSVDGATARAANPSDINILGCGSVVFRADDCLASSRRAYRRQRRHIRSTKHRIARMKIVLKHLGTLTENELNKPGCAWPWLLAARVLRGGILLSWPELWDVLRWYAHNRGYDGNRRWSAAEAEAQKEDSEKEANARTLMGKYGTKSMAETFCAMSGLDPLGKKKSTNLPGDKRPKGQNAAFPREVVEGEVRKLLQAHSGKLKGVDSNLENVLFSDWLAIPCPDLKLPKRYEGGLLFGQLVPRFDNRIISTCPISGQKVPSRNCPEFLNFRWAMQLANIKVGKSSDRELRPLDADERMKLDKQMRERGYLTPRELKDAVRTITTCERDNLDTMLMHPDAKEALLLDPVQKLISSDELQPFWKLFPERLQKRLRGQWRRGKFVSLAQIRGQLASVAAVCDRRTNGGDDTSPLQAFDAELQKQLDAQNSKAKNKEKQQTREDFLQKQFPSKSLKMDGRAAFARPLLKQAYEDVLAGKPHPKEEGGCLFITQQIRDAQLHRTLAEQTNNHLVRHRLLILERLLADIIKEYANGEKGRIAKITIEVNRELREMSGKTAKAKAQDMGLRLSNHHAVAKKLEEALADAKINGRPVQITAGLIRKGRIADDLGWTCPYTGQKYEPINLVTRYVDKDHIVPRSERASDSLDSLVVTFSEINKWKGNRTAWQFVSEEQGKPVPGRPNFSIVSLTRYKQFVEGLESFKGHDDDKRRKKKRKELMLLPKYEEKEFTPGDLTQTSQLVRLGAQVLRKNLPHLTTGNVTSLPGSVTGAVRKNWKLEGCLSTANPQVLNDDLEKTTKTKTEIRDITHLHHALDACVLGIAANYFPNLKLGASSLWELLIKRKFSEQEKKILRAIGLHQFDSEGNAHLKDLAKQIKQQIRERLAEKRVVQHIPARMDGLRVEQNTWRVVAVKEDQVVLKQRIRQPDGSRPAKIAEEKPAKLLGLNPTVQPGKLAKNKGALVIPENFGVALDPKPTIIPFHKVWARLQEIKNVNNGKMPRILRNGQLIRVKDGKYKGVWRIFAAKNNASGMALDIGSPDVVRLKNKTEGHKINVLLSSLLKSGLDPIRASFTGGSSK

SEQ ID NO: 17649 - protein, 1065 aa, unidentified
  REGION 1..1065: note = Cas Enzyme sequence
MIKTMPSQATSSHKEGTLTLGLDIGHRSIGWAVLKKDLQEATPELLGCGTVIFRGGDCLNSQRAGLRRSRRNIRSTRSRIRRMEKALAHAGVLPKEQFDRLHAAGKGDPAPWWVMARWLTGVIPSLSPGEFWQILRWYAHHRGYDANRGWIKEDGEEDSKRTEETRKEMAKAGVNTVAEFLCLKSGCKPSDRQPAFGKAFRGSKDSMLFARSTVEAEVRKMVDAHVGKIKGLDANLRNTLVGEADDSWGSTAWFGDKRLPKRYRGSLLFGQLIPRFDNRIISACPFEPEPLNKEVGRKVPSKANWEFLNFRWAMTAANIRIRVAGMERALTSDEMKKFFQACWDEGDIKPATGKDSKIQKNSDKLRGILKKAGLDFSSGDNLDQLVVLPDSLKAFRLVPIGSGLKAFRAIWACANDFQRRWLRNRLLKGDELTPAEIFAKPQPIFVEWKRNAATQTLFQGKDSALLKEAFKGEVLDGRAAYSRPILIKAFKEVMDGKDPREIKGCLFRQGETALEAAVPLDRRTNNHLVRHRIRIAEKLRKDIVKEYAGGQAKAFGQVVIEINRDLPGLSGKNAKEIAAAESGKLRNFNDVKQQLESSLTGHKIQITAGLLRKARIASDLDWTCPFTGQRYSALEIVRGVYDKDHIVPRSSRVSDSLSSLVVTKREVNKFKGNRTGLQFVKEEGGKSIPGTSLSVVTEDQYRSFVENLQPPTRMKDDVRRSDIRKRLMLTAHAPKVDDVGFLPKDLTQTSYLAKLALQELRKGFAADGAKVDVRPLTGLVTATARKSWKLLGCLVPACPEAKDAAGSNDKQAIRKLTHLHHALDAVVLGLSGLLLPREGNVLAALAARNQNESSRRLLKSKMGEMIIISEDRAQLADLPKVLKDSIGAKLAEGRVAQHIPGTWSGTKSQLTMWGVVEKKNGRVDLRQKGEDGMKSNNVRQDSIIEAPSLPGVFQIDENFGILLSNPPEMIPWNRPYKQMGKAKKTKLLRRGNLISVKGRYAGIWRVVGTKCLSSGVIQLDLLYPGAVGLVDKQPLISRRNVALSTLQKDGMEVLSTKLTGCPITL

SEQ ID NO: 17650 - protein, 1110 aa, unidentified
  REGION 1..1110: note = Cas Enzyme sequence
MKNTTQNIQLAFDVGHNSIGWSVLKVQGEAPEIAGCGSVIFQKDGCLATKRRAYRRQRRNIRATRQRITRLKQLIFSLGVLSHEQLNRVSSSSPWHLAAGVLEGTRKLDWPELWDVLRWYAHNRGYDGNRQWAANGTVEEEEDTEKVENARGIFAKHGTTTMAQTLCAELELDAKGGKAASRIRFKGLNAAFPRESVTAEIRAVLDAHKGLLPGVDDAFIRSLIGKDHSDRDAWKAVPVSGLKIPNRFHGSLLMGQNIPRFDNRIISRCTVLFDRILQQKLDEGMDRESAEAEAQKLSKVPSKKAPEFLQFRWAMLLANVLVTGVEGKSRSLSVDERKAVHLKIRERGAFTPTQFKLEVMTATGAIRSNLEEMLSHPDADKALVFDYATRETQRGTLGLVWPSIDDHNKTRIKRLLRDGKTITIRDVVVGNDSAISALQNSLTASATRKATSKARATTKSLDELLSETVCIHPINGRAPFSRQIMKEAVADVMDRGIHPTMEGGVLYRGESIRLAQVQRKLDDQTNNHLVRHRLLILERLHHDLLEEYAEGNPDLVERITIEVNSDLREMSGKNAKEAAQEEGLKLADFKGVTKLLEAQLDGQSIQITAGLIRKARVAHDQGWKCPYTGKDFDALDLVHRRVDKDHIIPRSLRQSDSLDSLVITFSEVNRMKGQRTAVAFIEEFGGKVVDGRPELSIMSLASFEEGVSKLDTRRGHDDDKRRKKNRKRLLMLKDYVDKEFTPGDLTRTSQLVRLGAQLLERPYLGSSKRPVITSLPGSVTGAVRKSWRVLGCLSKANAAVTVESTKTDVRSITHLHHALDASVMALASHFLPRDGGIWELIVKRKLSPNDQQRLLDRGRQFARDSEGRVSLIDLPTFLKNQLSDRLAEQRVVQHIASDMSGLASEETVYRVLDPNDPHPSAKKLMKLCAARGIEVPDAREDVALIVSRKRRSPIESGDLLHETPTWRWTYRIEKKSKLLGLESKQPTSGKLKTLKAVKIIGENFGLALDPEPEVLQLSSVWTRLRELRQAHGRPVRILRNGDLITLSSANVPEQRRGNWRVMSVKNNTTGLALDLARPDETKATWINTLVQSHLKNGLKIVDARLSGVMK

SEQ ID NO: 17651 - protein, 1115 aa, unidentified
  REGION 1..1115: note = Cas Enzyme sequence
MKKLLFSYDIGHASIGWAAMDTTTEHKPELLGCGTVLFPTDDCLASNRRQLRRQRRHIRSTRTRIARIKMLLAHLGVLSAAQLDEPGGPWPWKLAARVHAGGPLLSWQEMWDVLRWYAHNRGYDGNRKWSRDDEEDSEDTEKEKAARALMEKLGKPTMCQTICAKLQIDPLSSDKKTSSIAYKTSNAAFPRDIVLHEVIDLLEKHVGKLPQVTTALITALCAEDNTPKDGQTVREVMKGLGFDARLPGRFVGGLLFGQAVPRFDNRIIGECPVSGDKRPLKDCREFLEFRWAEILANVTVRQTKDGDKAPLSVEQRAKLTAMAREAGGFTAGEFKKAVLDVSGAVASNADLMMTHPDAEEALVLDPARRFVKTNGMMKVIWDELPSALQKRVLGRWNKHRRVTWAWLLAQPEAQQTLEAKLKAAWLETKRKPRKGDAEPTWEDRVKQSLKPNYASGRAPYSRVVMMQAAEQAHQGKHPREAGGVLEITEARKERERQKEIDELTNNHLVRHRLKILLRLTEDMVKTYADGDAAQVDRCVIEVARDLVEFSGKTNKEVAQELGIKLKNFKDVSKKLTSDLDGTTIPIGAGLIRKARIADDLGWTCPYTSKEYDAVTLARGKVDKDHIIPRSLRPSDSLDSLVVTFAEVNKWKANRTAWKFIEEEQGKPVPGRPDLTIVTLRQYEAFVSKLAGEKKPNRFTPGAGSLDDKMRQWSRKQKMLLKDYEEKEFTPRDLTVTSHLVRLSARQIEKRFAHLRDSGRIISIPGSVTGSVRKSWDCLGCLAPACPEIMEMRPTKNSKGELILDSEGKPSLSLQVRPKGDIRDITHLHHALDACVIGYASILIPNNGKLWEQIVTKKVRPNERAAFSQMHSWNKMLKLSSPTDAPNENTTLKLHLDDLPAEFKKQIVERLKERRVVQHVPADMSGARLEMNTWRVVKAEGGKVTLRQRTFGPKDVDVETGARHRRWKPDEIVDESRILGLKKGKLSKISGALVISENYGVALLPEPIMIPFHDVKGRLLKLAEGGAGRSPRVVRSGMLINVPAGDFKGLWRVRACMKDSTKGILFDLSMPDRIQYRAKGVSWCRRDVRLKSLLKVGMSIIDSSYCGVSTEVITVR

SEQ ID NO: 17652 - protein, 1111 aa, unidentified
  REGION 1..1111: note = Cas Enzyme sequence
MAASSNSSIASPTLDLAFDIGHSSIGWSVLESISDHELPSIRIRGTGVVIFEKNSALANQRRLHRSQRRHVRATRQRIARLEKLLVQLGVFTAAEIAAQHAPAAGHSAPWLLAARILASEKTTAPRLLTWPELWHVLRWYAHNRGYEEINTDKSSATDPSSPAVTDDPESDTAKVAATKEQVARLGTHTMAETVCRWYALDPLGNQISNHKSDYKRADRKLYVFERPVVVAEVRRILTAHLGHLPQLTPIVIKAIVEDHQALPLTALRPPKRFKTHLMGDGQLSGGYLFGRLTCRYDNRIIGHCPLSDPPQKLPLKECREFYLFRWGLLLANIRVASPADSALRALTPVERSALHAQALQQGYFTPGKFRDTVRELTHAVRDNLETMFLEANSKENLLFDPVQKLIHADKLVSDLWPKLPEPARRKARALWKRGKTLTPASLRTLCLKHQADASAFDQALHQLTQPVAPAQKSRSKKPAAPPPSLDQLLSRPLTPEKLSGRAPYARPLLAKAFEESIAGRDPRAEGGCLYQTPEARAARDDARPLDEQTNNHLVRHRLAILEKLLRDLLATYAAGDAARVRQLTLEVNRDLRTMSGKDSEAIAKEMNERLRSHDSVSKYLADKLPPGTKLSGTFLRKARVAADLDWTCPYTGVEYDPIDLYEKRFDLDHIIPRSVRGTDALEALVVTHSAINKMKGARTALQFITDHASQPVPGHTNLSLLTVDRFKAFVEKLPIKGHPDDTRRKKRRKELLLLATYEAKSGDFTSGQLTQTSQLARLAQTVVRAPFKDLPADRRPRLVALPGQVTAAVRKGWNLTGTLATACPAILEPDGTPKHKSDIRSLTHLHHALDACVLALATRLIPNHGSVWQLLTQRRLTEPQKVELARLNLFDFDAEGHFRLRDLPKPLLEQLRHKLAERRVVQHLPADMNGMRVEENTRGVIERKDGRIYLQQQKRDAEGALQLNETDEAEGKVIGLHPGKLSAQKGVRVISDNFGVAILADPALSPEQRFVIIPWHKVWHRIQELKARNGGKRPLVLRKGQIITIPTGRYLGQWMIRGVKLDQKAGHQLDLSAPDFIDYTVSGRIEARRNVSLKTLIKDGLKLTDLRLCGA

SEQ ID NO: 17653 - protein, 1109 aa, unidentified
  REGION 1..1109: note = Cas Enzyme sequence
MKLRLALDIGHSSIGWAVLTEKSQAPVPPDLLGCGVVLFEKDSALASQRRLHRQQRRHVRATRTRIRRLEVLLAHLGALPKEELAARHAPGSGHPAPWQLAARVLTGGGNKLLTWPELWAVLRWYAHNRGYEPWGQTDESDPESAEDTEKVERAKAEMASLGTDSMAETVCRWLGVDPNGPAKLSHESSKNLRQQKAAFPRDIVRAEVQSILAHHLGKLTGVTEDFIRVLMDDGRAVACPGLVLPRRYRGGLLFGRLQMRYDNRIISCCVHTAAARYAELCAKGLSVPDARLKAEREAKVPGKKSPEFLRYRWGMLLANLRMAFGDGKELRSLTRQERAALHELMFHEGRLTKTQLRAAVRALPGWQRDNFDNLFLHPDAERALILDPVQALIQGHTHLRAVWPTLPDRLQHRIRNRWWRVDPANGRPHSVTLAELREQLSHYGGDVGSFDAAMASALANPAKPKARSRKVGAPADPLTVPLSIAKALASLRGRAPYARPLLAKAFDEVMAGGDPKGKEGCLEETDAVKRYRETRPFDQQTNNHLLRHRLLILGRLLRDLVADPAYGAGDPKRFTGVTIEVNRELRDHSGLTAHDIAKDLGLRLKSHREAVAWLEEAGLQPNGSLIRKARVALDLDCRCPYTGELFEAVHLRDGQADLDHIIPRSMRPSDSLDSLAITFPAVNRWKGRRTAWQFIQECGGQAVPIEHLRATGESRQLAIMTPQRFKEFVAHLDIRGHDDDARRKRRRKEFLLMESFEEKDRDFTPGQLTQTSQLTRLARIALRRALPQLADHDLVALPGSVTGSVRKAWNLMECLATVNPAVLDAEAGKLRPKDEIRGITHLHHAVDAVTLGYASALLPNRGDLWRFLSSRKIPKDHWDDFRLLAPVEIDAEGRWRLRELLKHHPELDKRIRACLAERRVVQHVPADMKGVRLEQNTWRVEKIDRDRVHLRQKGPRNAKGIREVPKKRDEIETAKAFGLIHGRLHSVKGVRVLDGNFAVAVLRNPGVPDDQRIHIIRHNRVFHALNELKKMNGGSLPWLFRAGAIIDVPSGSRKGRWRVVSPKKSEAYGISLDLAALDGTKVAKGNAPVETLLKDGMRLLSANYAGSLK

SEQ ID NO: 17654 - protein, 1008 aa, unidentified
  REGION 1..1008: note = Cas Enzyme sequence
MEKLVVHLGIFTADELAAKHRANGGSPTPWLLAARVLASDGAQTLSWSELWDVLRWYAHNRGYEEITGEARDETEDSDESKQDTEKVENAKAALARFGKNSMAETICAWLDQDPLTERRGTTVSYKGNKCAFERALVLTETVRILAAHRGKLPHFDESLIAALTLDARAIAVPAIKLPRRYQGSLLFGRLATRYHNRIIGLCPISGEKIPNKYCPEFLRYRWAMQLANIRVAESANGELRPMTATERKSVHQAMVASGYLGVKSLKESVRSLPGIARNNLEQFLLHPDAKEGLILDPVQKLITADSKLSAVWKHLPDRVQIRARGRWRRGKSTTLAALRAAAIELGHDCSTFDAAVEVLCAPLPTKSKKKTPPPSRDELLSAPVDIRRELAKLSGRAPYARPLLAKAFEEVMAGGDPKAKGGSLEETEEVRDRRKARPIQQQTNNHLVRHRLQILGRLINDLVADPAYGSADPARFDRITLEVNRDLRKMAGLTAQDIAKELGQRLKQHGDAVKWLEQDPQVAPKISAGLIRKARIALDLGKRCPFTGESFNPIDLVTKRVDLDHIIPRSQRTSDSLDSLVLTFSTVNRWKGQRTAWQFIQDEGGKPVPDAPNLSIMTSARFKATVDALDTKGHLDDYRRKHRRKEWLLLPAYEEKARTFTPGQLTQTSQLARLAAQVVLEPFKSLQNQPQIVALPGSVTGNVRKAWNVLGCLSTAAPAVLDSDGAVKTKTEIRNVTHLHHALDACVLAFAAYFIPNRGDVWRLLSERRLSPSEQAQLAALRLFDFDSRGQFRLRDLAPELKDQIRTRLAERRVVQHVPADMSGLRVEENTRGIIKRENGRVFLRQRSPRDPDGSRPPPKKTDEPESKVVGLPQVSGFGGKLAALNGVRVIDGNFGIAILDKPDLPEPDRVAVVRFFRVSQKLHELHTINGGKKPRLLRKGMLIYVPKGSRKGTWRILSTKETEAYGIAVDLGAPDGCKLIKGNAPVSVLIHDGVEILSGNLAGSLSV

SEQ ID NO: 17655 - protein, 983 aa, unidentified
  REGION 1..983: note = Cas Enzyme sequence
MEKALAHAGVLPKEQFDRLHAAGKGDPAPWWVMARWLTGVIPSLSPGEFWQILRWYAHHRGYDANRGWIKEDGEEDSKRTEETRKEMAKAGVNTVAEFLCLKSGCKPSDRQPAFGKAFRGSKDSMLFARSTVEAEVRKMVDAHVGKIKGLDANLRNTLVGEADDSWGSTAWFGDKRLPKRYRGSLLFGQLIPRFDNRIISACPFEPEPLNKEVGRKVPSKANWEFLNFRWAMTAANIRIRVAGMERALTSDEMKKFFQACWDEGDIKPATGKDSKIQKNSDKLRGILKKAGLDFSSGDNLDQLVVLPDSLKAFRLVPIGSGLKAFRAIWACANDFQRRWLRNRLLKGDELTPAEIFAKPQPIFVEWKRNAATQTLFQGKDSALLKEAFKGEVLDGRAAYSRPILIKAFEEVMDGKDPREIKGCLFRQGETALEAAVPLDRRTNNHLVRHRIRIAEKLRKDIVKEYAGGQAKAFGQVVIEINRDLPGLSGKNAKEIAAAESGKLRNFNDVKQQLESSLTGHKIQITAGLLRKARIASDLDWTCPFTGQRYSALEIVRGVYDKDHIVPRSSRVSDSLSSLVVTKREVNKFKGNRTGLQFVKEEGGKSIPGTSLSVVTEDRYRSFVENLQPPTRMKDDVRRSDIRKRLMLTAHAPKVDDVGFLPKDLTQTSYLAKLALQELRKGFAADGAKVDVRPLTGLVTATARKSWKLLGCLVPACPEAKDAAGSNDKQAIRKLTHLHHALDAVVLGLSGLLLPREGNVLAALAARNQNESSRRLLKGKMGEMIIISEDRAQLADLPKVLKDSIGAKLAEGRVALHIPGTWSGTKSQLTMWGVVEKKNGRVDLRQKGEDGMKSNNVRQDSIIEAPSLPGVFQIDENFGILLSNPPEMIPWNRPYKQMGKAKKTKLLRRGNLISVKGRYAGIWRVVGTKCLSSGVIQLDLLYPGAVGLVDKQPLISRRNVALSTLQKDGMEVLSTKLTGCPITL

SEQ ID NO: 17656 - protein, 1061 aa, unidentified
  REGION 1..1061: note = Cas Enzyme sequence
MPSQATSSHKEGTLTLGLDIGHRSIGWAVLKKDLQEATPELLGCGTVIFRGGDCLNSQRAGLRRSRRNIRSTRSRIRRMEKALAHAGVLPKEQFDRLHAAGKGDPAPWWVMARWLTGVIPSLSPGEFWQILRWYAHHRGYDANRGWIKEDGEEDSKRTEETRKEMAKAGVNTVAEFLCLKSGCKPSDRQPAFGKAFRGSKDSMLFARSTVEAEVRKMVDAHVGKIKGLDANLRNTLVGEADDSWGSTAWFGDKRLPKRYRGSLLFGQLIPRFDNRIISACPFEPEPLNKEVGRKVPSKANWEFLNFRWAMTAANIRIRVAGMERALTSDEMKKFFQACWDEGDIKPATGKDSKIQKNSDKLRGILKKAGLDFSSGDNLDQLVVLPDSLKAFRLVPIGSGLKAFRAIWACANDFQRRWLRNRLLKGDELTPAEIFAKPQPIFVEWKRNAATQTLFQGKDSALLKEAFKGEVLDGRAAYSRPILIKAFKEVMDGKDPREIKGCLFRQGETALEAAVPLDRRTNNHLVRHRIRIAEKLRKDIVKEYAGGQAKAFGQVVIEINRDLPGLSGKNAKEIAAAESGKLRNFNDVKQQLESSLTGHKIQITAGLLRKARIASDLDWTCPFTGQRYSALEIVRGVYDKDHIVPRSSRVSDSLSSLVVTKREVNKFKGNRTGLQFVKEEGGKSIPGTSLSVVTEDQYRSFVENLQPPTRMKDDVRRSDIRKRLMLTAHAPKVDDVGFLPKDLTQTSYLAKLALQELRKGFAADGAKVDVRPLTGLVTATARKSWKLLGCLVPACPEAKDAAGSNDKQAIRKLTHLHHALDAVVLGLSGLLLPREGNVLAALAARNQNESSRRLLKSKMGEMIIISEDRAQLADLPKVLKDSIGAKLAEGRVAQHIPGTWSGTKSQLTMWGVVEKKNGRVDLRQKGEDGMKSNNVRQDSIIEAPSLPGVFQIDENFGILLSNPPEMIPWNRPYKQMGKAKKTKLLRRGNLISVKGRYAGIWRVVGTKCLSSGVIQLDLLYPGAVGLVDKQPLISRRNVALSTLQKDGMEVLSTKLTGCPITL

SEQ ID NO: 17657 - protein, 983 aa, unidentified
  REGION 1..983: note = Cas Enzyme sequence
MEKALAHAGVLPKEQFDRLHAAGKGDPAPWWVMARWLTGVIPSLSPGEFWQILRWYAHHRGYDANRGWIKEDGEEDSKRTEETRKEMAKAGVNTVAEFLCLKSGCKPSDRQPAFGKAFRGSKDSMLFARSTVEAEVRKMVDAHVGKIKGLDANLRNTLVGEADDSWGSTAWFGDKRLPKRYRGSLLFGQLIPRFDNRIISACPFEPEPLNKEVGRKVPSKANWEFLNFRWAMTAANIRIRVAGMERALTSDEMKKFFQACWDEGDIKPATGKDSKIQKNSDKLRGILKKAGLDFSSGDNLDQLVVLPDSLKAFRLVPIGSGLKAFRAIWACANDFQRRWLRNRLLKGDELTPAEIFAKPQPIFVEWKRNAATQTLFQGKDSALLKEAFKGEVLDGRAAYSRPILIKAFKEVMDGKDPREIKGCLFRQGETALEAAVPLDRRTNNHLVRHRIRIAEKLRKDIVKEYAGGQAKAFGQVVIEINRDLPGLSGKNAKEIAAAESGKLRNFNDVKQQLESSLTGHKIQITAGLLRKARIASDLDWTCPFTGQRYSALEIVRGVYDKDHIVPRSSRVSDSLSSLVVTKREVNKFKGNRTGLQFVKEEGGKSIPGTSLSVVTEDQYRSFVENLQPPTRMKDDVRRSDIRKRLMLTAHAPKVDDVGFLPKDLTQTSYLAKLALQELRKGFAADGAKVDVRPLTGLVTATARKSWKLLGCLVPACPEAKDAAGSNDKQAIRKLTHLHHALDAVVLGLSGLLLPREGNVLAALAARNQNESSRRLLKSKMGEMIIISEDRAQLADLPKVLKDSIGAKLAEGRVAQHIPGTWSGTKSQLTMWGVVEKKNGRVDLRQKGEDGMKSNNVRQDSIIEAPSLPGVFQIDENFGILLSNPPEMIPWNRPYKQMGKAKKTKLLRRGNLISVKGRYAGIWRVVGTKCLSSGVIQLDLLYPGAVGLVDKQPLISRRNVALSTLQKDGMEVLSTKLTGCPITL

SEQ ID NO: 17658 - protein, 1066 aa, unidentified
  REGION 1..1066: note = Cas Enzyme sequence
MPSQAVSSHKEGSLTLGLDIGHRSIGWAVLKKEVQEATPEVLGCGTVIFRGGDCLNSQRASLRRSRRNIRATRSRIRRMEKALAHSGVLPQEQFDRLHAAGKGDPAPWWVMARWLTGVIPSLSPGEFWQILRWYAHHRGYDANRRWIKEDGEEDSKRTEETRKEMAKAGANTVAEFLCLKSGCKPSDRQPAFGKAFRGSKDSVLFARSTVEAEVRKMVDAHIGKIKGLDANLRNTLVGEADGSWGSTAWFGDKRLPKRYRGSLLFGQLIPRFDNRIISACPFEPEPNNKEVGRKVPSKANWEFLNFRWAMTAANIRIRVAGMERALTSDEMKKFFQACWDEGDIKPATGKDSKIQKNSDKLRAILKKAGLDFSSGDNLDQLVVLPDSLKAFRLVPIGSGLKAFRAIWACANDFQRRWLRNRLLKGDELTPAEIFAKPQPIFVEWKRNAATQTLFQGKDSVLLNESFKGEVPDGRAAYSRPILIKAFEEVMNGKDPREMKGCLFRQGETALEAAVPLDRRTNNHLVRHRIRIAEKLRKDIVKEYAGGQAKAFGQVVIEINRDLPSLSGKNAKEVASAESAKLKNFNDVKKQLESSLAGHKVHMTAGLLRKARIASDLDWTCPFTGQKYSAVELVRGVYDKDHIVPRSSRVSDSLSSLVVTKREVNKFKGNRTGLQFVKEEGGKKIPGTSLSVVSEDRYRSFVENLQPPTRMKDDVRRSDIRKRLMLTAHAPKVDDVGFLPKDLTQTSYLAKLALQELRKGFAADGAKVDVRPLPGLVTATARKTWKLLGCLVPACPEAKDAAGSNDKQAIRKLTHLHHALDAVVLGLSGLLLPREGNVLAALAARNQDEPSRRLLKSKMGEMIVISEDRAQLADLPKVLKDSIGAKLAEGRVAQHIPGTWSGTKSGPTMWGVVEKNEGRVTIRQRNKGMSSTSKTDNKGEWKSLVVPLESVIESSSLSGVLRIEENYGVLLSNPPEILPWNCVYRRLRKSKGLRVFRKGNLLNIPKGRYAGIWCVAGLTLNTKSGILLNLRKPPATDESYENVSLKTLQNNSMEILSSKLTGCPITL

SEQ ID NO: 17659 - protein, 1066 aa, unidentified
  REGION 1..1066: note = Cas Enzyme sequence
MPSQAVSSHKEGSLTLGLDIGHRSIGWAVLKKEVQEATPEVLGCGTVIFRGGDCLNSQRASLRRSRRNIRATRSRIRRMEKALAHSGVLPQEQFDRLHAAGKGDPAPWWVMARWLTGVIPSLSPGEFWQILRWYAHHRGYDANRRWIKEDGEEDSKRTEETRKEMAKAGANTVAEFLCLKSGCKPSDRQPAFGKAFRGSKDSVLFARSTVEAEVRKMVDAHIGKIKGLDANLRNTLVGEADGSWGSTAWFGDKRLPKRYRGSLLFGQLIPRFDNRIISACPFEPEPNNKEVGRKVPSKANWEFLNFRWAMTAANIRIRVAGMERALTSDEMKKFFQACWDEGDIKPATGKDSKIQKNSDKLRAILKKAGLDFSSGDNLDQLVVLPDSLKAFRLVPIGSGLKAFRAIWACANDFQRRWLRNRLLKGDELTPAEIFAKPQPIFVEWKRNAATQTLFQGKDSVLLNESFKGEVPDGRAAYSRPILIKAFEEVMDGKDPREMKGCLFRQGETALEAAVPLDRRTNNHLVRHRIRIAEKLRKDIVKEYAGGQAKAFGQVVIEINRDLPSLSGKNAKEVASAESAKLKNFNDVKKQLESSLAGHKVHMTAGLLRKARIASDLDWTCPFTGQKYSAVELVRGVYDKDHIVPRSSRVSDSLSSLVVTKREVNKFKGNRTGLQFVKEEGGKKIPGTSLSVVSEDRYRSFVENLQPPTRMKDDVRRSDIRKRLMLTAHAPKVDDVGFLPKDLTQTSYLAKLALQELRKGFAADGAKVDVRPLPGLVTATARKTWKLLGCLVPACPEAKDAAGSNDKQAIRKLTHLHHALDAVVLGLSGLLLPREGNVLAALAARNQDEPSRRLLKSKMGEMIVISEDRAQLADLPKVLKDSIGAKLAEGRVAQHIPGTWSGTKSGPTMWGVVEKNEGRVTIRQRNKGMSSTSKTDNKGEWKSLVVPLESVIESSSLSGVLRIEENYGVLLSNPPEILPWNCVYRRLRKSKGLRVFRKGNLLNIPKGRYAGIWCVAGLTLNTKSGILLNLRKPPATDESYENVSLKTLQNNSMEILSSKLTGCPITL

SEQ ID NO: 17660 - protein, 941 aa, unidentified
  REGION 1..941: note = Cas Enzyme sequence
NRGYEDMTAGGKDVDDDDTLKVEDGKRALAEYGTHTMAETVCKMLGQDPLAPRTGTTVSYKRRNCAFERPLIASEVLQILAAHLGKLPGVDEALVATLMLDARAIPLPGVTIPKRFHGGLLFGRLCLRYDNRIIRTCPITNQKTPSKSCSEFLSYRWAMQLANIRITTLSSPSRPLTADERCAVHAAMCARGHLGVKDLKKAVRDIPGVTNDNLDQMLVHPDAKDALVLDPVKKLITGNREVSGIWPTLPVQLQKRLAGQWQKGKAATLAAIGKDMVALKHPTGAFDRVVDELFASLPKPRGKNLPLNREQFLTQKLSAREAQAKLSGRAPYARHLLSKALDDVLAGKDPKASGGALEETGSVKERRSDLPLDAVTNNHLIRHRLQIMERLLKAIIADPAFGNGSPDRFTHVVIEVNRDMQTMSGLTAKQIESELNDRLRGHKRVSEFLAEALPPGTPITASLIRKAIIADDLGWCCPYTGAHFDPIDLVSKQVDKDHIVPRADRPSDAMASLAITFSTVNRMKGKRTAMQFVAEFAGRPVEGEPGKTIVTPKQFEAFVNGLNVKGHEDDRRRKKARKDWFLMANYTESERTFTDGALTQTSQLGRLAAHAINRVFKDTKKFPQVVSLPGAVTGAVRKAWKVLGCLSLASPSVLEPDGTLKTKTEIRDITHLHHALDACVLALTAHCIPNRGNIWKLLCLRRLNELQKAELSALGLFDFNQDGHFVLREMNDRIKEQIRHRVAERRVVQHVPADMSGILVEANTRGIIAITDGFVHLRQRGGYDPKTGTYATKAPTKEPVGKVIGLNAGSKLAAVNGVRVIEGNYGVAILDDTKLPPDERFVIIPHERVWQRLQDLKARNGGKKPMILRNGMLIDVPTGRYQGRWKIRMITKNMKLGILINMSLPDYVMGNVSGVSECKMQVNLASLVSIGITQVPGGLLG

SEQ ID NO: 17661 - protein, 1084 aa, unidentified
  REGION 1..1084: note = Cas Enzyme sequence
MDTPVTTPDVSFSFDIGDASIGWAALSTPPRAVYPKILGCGVLLFPKDDCQNKERAKNRRQRRHIAATRNRVARIRNLLVSMGALTEEQAEAQKKGASGIMMPWLLAARALHGAALSWMELWQVLRWYAHNRGYDGNARWARAGEEEKEDIKKVQKANALMEQYGTSTMAETICAFLGVNPEDQNPHIGEKAPYFKGESMAFRREIVRGEAEKIVRSQFGKLPGCDAAFLSLLMGRDLTAEEKKRFKLPQRYAGGLLFGQMIPRFDNRIITKCPVTGEKTPLKHCTDYYRYRWARLLANLRVKEEGADNKRALTAPERAELTRRMEKTGGLTKTQLKKALEEITHADAKSLDDQFFSPETEKALVLDPVRDALSGAPFENVWPLVPEALQRRIAGEFFKSGRLSLADLLAAVRKAGADTTQMENAIRLDFLKAAKRKRKEPLTYEAYLADVKHVAEASGRAPYSRPVLRKVYEEVLSGMDPAAIADSQPPSAPEKRNGCIAITNEFLDREAEKRLDDMTNNHLVRQRMGMFRRLFGELFKTYAGGQPSRVAEVTIEVARDLQEYAGKNAKEKAALFSEKAKPFQKAEAVLRKGFEEAGIARHPTYSMIRKARIAMAQNWTCPYTGRHFSAADIANDRVDFEHIIPHALRRSDALEGLAIAFRDINIAKRKRTALEFIRSGEEGLMTESRFREYVEGLYPKSRPGRDASDEDKINWRRKQWFLREEYDERDAEFTKAALTVTSHLNKLAALEARRILRTSAKEAGLAESLPEHRVGHMVGAITGEFRKEKKWDLLGCLEPVCPEVVDPVTGKHLPKGEIRNITHLHHAVDAITIGIARNIFPGHVVKREVCEAILSRRPNPAQRSTLESMGVFFFDKDGSAHLKDMPEELRQNIIAKLAECRVVQHVPRSKHGLRAELTQWGVKHYDAEADCVKLVQYTRDSANGNARKLKEAWENPRKLLGYNPVGESKLKPRKAVVVIGVNFGIALLPEPVVLPFHKVWERLRELAEKNGGKIPTVLRQGDVIDVPNGRYKGRWQIRSTKDNAAGGAVSIAKPHLVETFKENVLVSSLIKSGMTIVRQPLIGS

SEQ ID NO: 17662 - protein, 1143 aa, unidentified
  REGION 1..1143: note = Cas Enzyme sequence
VLLSRTCLRSKQKPICTSNFALDSAADHIRKPTEGKQAMSKMFSFDIGHASIGWAAFDITNPHEPSLEGCGTVIFPADDCLASQRRDYRRQRRHIRSTRMRIARMKDFLLGLGALTREQLDAPGGPAPWKLAAEVLCGHRLLSWPELWDVLRWYAHNRGYDGNRKWSRAEIADQDDTEKETNARDLMTRHGTATMAETICARLHVDPRSSSKVTPNRAYKTLNAAFPRDVVVEEVRRILASQANVLPEIDSRFIESLCAEDNGPRNGVSVSEHLAALRWTRQLPSRYVGGLLFGQAVPRFDNRIIGVCPVNGEKLPLKSCREFREFRWAMILANIRVSDGADGMRSLTPAERAILTESIRQVGSFTAAQFRKEVASATKQGEGNTAAMMTDPNAADALVLDPPRAFVQTNKEMKVPWTQMAAPLQRRILARMNRQKPITWGWIAAQPDAPAGLADTIVKAASAKGKKSKEAVANWGTLSRRRVGPKWPSGRAPYSREVMLKAVEEVMKGGHPEESGGVLFMSEARLERERAKTIEELTNNHLIRHRLRMLDRLIRDMVNRYAGGASARVSRCVVEVVRDLAEFSGKTNKEITTELNARLKNFNDVAKRLEEDLQAVNVQIGAGLIRKARIADDLGWKCPYTGNGFDAVTLARGGADLDHVIPRSQRASDSLDSLVVTFPPVNRWKGNRTARQFVAEEQGKQVPGMPNLTIMSLSSFDAMVENLAGDEKPHRYTRGPGSLGDKIRRWNRKQRLMRDTFKEPEFTPRDLTVTSHLTRLACRQIERSIPSLQKQGSITAIPGSVTGMVRKAWDCLGCLAKAAPLILHDVPQRDDRGNPVFDKDGKPVVRSVPRPKGEIREVTHLHHALDAAVMGFVAALLPRDGKLWEQIVTGRIPGSAAAGFRKAYEWTGMLKVAAPRNGGGTHRLELLDLPDNYKRALTDRLAERRVVKHVPADMRGARLKLNSWRVVSVKDGRVFLRQRSFDPKNNNPESGARKRSWKTEEVSRSGLVGLEPGKLSRARAALVIAENYGVAVIDRTEAGGSERVQVVPFHQVKKHLDELTALNGGARPLLVRNGDTIVVQTGTFAGRWRVFSVKNAKVGVMLDLGQPDTIRPLNKTEGHKINVKFGSLLAGGLVVVGRDLTAG

SEQ ID NO: 17663 - protein, 1080 aa, unidentified
  REGION 1..1080: note = Cas Enzyme sequence
MSGKEAHLTFAYDIGHSSIGWAVLEGKSGNAEPELLGTGVVTFPADDCLASQRRTFRRQRRHIRATRQRIDRIAKLLNHLEVLTPEETSKRGNSSPYLDAAEVLNGVKHLTWFELWNVLRWYAHNRGYDGNKRWKRGEPEEDAEDTEKVANAHQLMRKHGTDTMAETVSAALGLKLGSNRRSSQRGYKTLNVAFPREIVVNEVRKILELHEGKLKKIDRDFIETLIAPDNSRAAAQAWSRISVPEIHLPKRYTGGLLFGQLVPRFDNRILTRCPFSGEKVPAKACMDYYRFRWAMILANIRVDGAPLSSEARKDIDQRMREKGRLTKSELAKAVEEATGSNDHNLKTYFGIHPDSEKALEVDPARAMAYSGENKRTGLYPFWNELSESVKERAINRWKKNKPVTVGWMIEAMEQTGENTEGLEQVVETEWNKRGKGKKKSSYLTRDHVYRKPFVPSEISGRAPYSRAMMKATTDFVLNTNRHPSEKGGPLERTPELLEREQKRHIDDLTNNHLVRHRLKILKRLTSDMVRSYAGNDPDKVKTVVVEVASELKEFSGKTTKEIESELKGKLKDFNDAVKYLEKKKVPNISGSLIRKCRIAQDQNWTCPFTGQKFDPHNLTHMEREHIIPRSIMQTDAMYALVLTYPEVNRMKGNRTARRFIEEEQGNLVTGRDNLSILTSRRYENLVDKLPTKGHPQDVSRMKKRKQLMTVMDMQERETGFTEGSLTQTSQLVRLAAAQLSKNLPSIDPHHVISFPGQVTAIVRKSWDLLGCLSAPEVCGDRVKDKTKTEIREITHLHHAVDAITLAYASFYFPRNASWEGATQPGALWRAMVARNPTEDQCLLLERCALFYSRPNRSGRKRYELEDIPRTLKAQAAERLAEKRVVQHVPADMHGMKAELNTWGVMDIDGDPKNPNTRVSIRQNTIQEVVDSTRIRKKKTETEKAGKLLGLNPKNGTGKLKDINGVLVIKSNYGMALDPEPTIIPFHKVWHRIQNLKELNGGQHPRILRNGMLIKISGHSEKRDGIWKVFSVQSSLKIDLGKPDLIKRESKGIQVWREVKVDTLLKKDCLEILYYPFTGNP

SEQ ID NO: 17664 - protein, 1004 aa, unidentified
  REGION 1..1004: note = Cas Enzyme sequence
MMPWLLAARSLTGHPKGQLTWLQLWQVIRWYAHNRGYDGNCRWSGNLDEESSEDTQKEKNANALMQKHQTKTMAETICAVLEVDMDNDKPQLRKYFKGENVAFPRRVVVNEVRRILENHTNTLAGCDRDFIALLLDDVPESERKIFRLPQRYSGGLLFGQMIPRFDNRIIGKCPISGDKLPLKHCQEYYRFRWAMLMANMKVMDSETQISRPLTPQERRTLNCEMEAAGRMTPTQVRNKLEDITQASAASIDSQFFTVEGDDALELNPVKRVINRNFPKFWNALPLKWQKQFAGQIFKFKKCQLQQLIDKLEGCDAWTEDLARAVEVDYEEAISRVRKNKPTYENWLQKIETIGISGRAPYSRAVMRKAYNEAMQGMHPAAIAEHQPKGIQAINGCLVRTQEILDKEAEVPLDQRSNNHLVRQRIRIFLRLLEDMIKNFANGDLGQIGDITLEVARDMREYSGKNAKEKAAAFTAKTKPFNDASKKLEEMFKEVGITKMPTYSMIKKARIAIAHNWECPFTGVKISPADIAYDRVDFEHIIPKSKRTTDALDALVVTFREVNKRKGNRTALQFIKEDQGQAVSIPGASTSQNVEIRTERHFLSFVDALKPKYNPRSLSNASDEDRIRWKRKEWLRIEHYNERDADFTPRDLTTTSYLNKIAAIEARRYIRDKRIACGLERNQSPEDRIRHMQGSITHYFRTHWRLLDCLGSVVPEVVERIGHDSRLLPKAEIRNITHLHHAVDAIAIGFARACVPNQDKATCEAILRRRVHSEDRLLLERLGIFQFGTDGKHILRELPEEILKTVMDALNEKRVVQHVPRCMSGLGIELTQWGVEGLNDQTGRVMLRQYGGRDAKTNKRVRKHEQANPGRLLGYTPEGDSKLKPRKAAIIVSTNYGIALIPKSPTVIPFHNVWKRLKSIEQETGVRPPVLRLGDVIDIPESMANKYGGKWRIHSVKDNASGVSVDMAQPHLVKAENKKDGCRMNVKVKSLIKEGMTILETDLTG

SEQ ID NO: 17665 - protein, 1062 aa, unidentified
  REGION 1..1062: note = Cas Enzyme sequence
VYHNGDMASRRNAPDLQLAFDVGHSSIGWAVLQANPDVEIAGCGVVIFRADDCLASARRGYRRQRRHIRSTRQRIKRMKALLLHLGVLTQTQLDKSGCAWPWKLAARVLVGGKTLTWPELWDVLRWYAHNRGYDANRRWSAAEAEAEKEDTEKLENAKTLMDKHGVKTMAETFCKELGVDPRGAKSSSMTRFKGLNAAFPRGVVEAEVARILQAHFGKLKGADEKFAAALFSDWRAIPCPKIKLPQRYQGGLLFGQLVPRFDNRIISICPISGQKVPSRNTPEFLNFRWGMLLANVRVARLVDRELKPLTVEERRELDRLTRAEGAMTAKQFTDAVEKVTGAIRHNLATMLMHPDAKDALVLDPVQKLVTTGHRAALWPTLPERIQKRARGQLRRGKPVTLGDLGNEVPAFHAQVQSILDKTAGRGRKKDKALTRDDLLREILQVRKLDGRAAYSRPILRKAFEQVMDGKHPAEDGGCLFVTEQTRQAQLSRSLTQQTNNHLVRHRLLILSRLLNAIVKEYADGDKTRIGKMTIEVNRDLREMSGKTAKEVAQDLGLRLANFKNVVKKLEGDESFMRELNQRGLHHIPPGIIRKARVAEDLGWRCPYTGMEYEPVHLLTRRVDKDHIIPHADRASDSLDSLVITFSAINAMKGKRTALQFVNEEQGKTVEDLPNLSIVSVNRYREFVEGLEAFRGHDDDRRRKKRRKDLLLLPSYEEKEFTPRDLTVTSQLVRLGALTLKREFADVKQPPVIVSLPGAVTGEVRKAWDVLGCLGLACSQVLDVEGKPKTKTEIRDITHLHHALDACVLGLASHFIPNNGRVWELITKRNLTSAEQKELIALNVFATGPQGRVQLRDLRPERKEQIRQRLAEKRVVQHIPKRIAGLRVEQNTWRVRGSKDGDVTLQQRIRQPDGKRPLKQAVERASKLIGLEDGKLHRLSGALVVGENFGVALDPQPTIIPFHKVWPRLQELKKANGGKLPRVLRNGQIIYIPKGTYSGVWKVFSAKNNKSGMALDMGRPDVVRLRNKTDGHKINVLLSSLLKDGMTIVDAPLTGVSSAPKQS

SEQ ID NO: 17666 - protein, 1062 aa, unidentified; identical to SEQ ID NO: 17665
  REGION 1..1062: note = Cas Enzyme sequence

SEQ ID NO: 17667 - protein, 992 aa, unidentified
  REGION 1..992: note = Cas Enzyme sequence
LAGRVLAGGKTLTWPELWDVLRWYAHNRGYDGNRRWSAGEAANEKEDQEKVQNAHALMREHDKQTMAETFCAVCGIDPMGAKCSSNIDPAKRFKAKNAAFPRGIVEAEVARLLRTHFGKLKGVDEKFATAMFSDWRALSCPAIKLPIRYQGGLLFGQLVPRFDNRIISKCPITGQKVPSRNTREFLSYRWGMLLANVRVARLADRELKPLTVEERKELDKLMRAEGSMTAKQFTEAVEKVAGSIRHNLSTMLMHPDAKDALVLDAVQECLTTEKPMPVKALFAALPTRIQKRARGQLRRGQSFTFAALYEAAKQAEELVAAFDAAVQQQLDKAAGKGRKKDKPLTRDELLAKSLSVRKLSGRAAYARPILVQAFAEVMNGKHPKEEGGCLFVTEKMREAQLNRTLAQQTNNHLVRHRLLILARVLKDIIEEYAGGDKKRVGKMTIEVNRDLREMSGKTAKEKAQDLGLRLANFKSVVKKLEEAFEGKQIRITPGLIRKARIAEDIGWVCPYTGEHYDAFDLLHKNVDLDHIIPRADRPSNSLDSLVVTFPEVNRMKGKRTALAFMKEAETKQVEGLPRLTLKSLNHFKADIEALRPGSDPRKAKRRGAVTGPIDDDLRRWKRKELLLKVEKWDGGDFLPADLTVTSQLVRLGAQALKREFIDLEEPPVTVSLPGAVTGEVRKAWDVLGCLSKACPEVLDAEGKVKTKTEIRDITHLHHALDACVIGLAAHFIPNRGRVWELITKRRLTAAEQSELVALKVFTPESHGEVRLNDLKPERKEQIRQRLAERRVVQHIPKRITGLRVEQNTWRVQSIEDGDVTLTQRIRQPDGKRPRKQVIQRSGKLIGLEPGKLQTLKGALVIGENFGVALDPTPTVIHFHKVWSRLRELKKVNGGKMPRVLRNGHLIRVSEGSRAGLWRVTSIKQTEAYGLALDLAYPDSVGLSRPNAPILQLQAEGLAIVGTSLTGFDASAVMYAAIKRRPRKLKTEQSESS

SEQ ID NO: 17668 - protein, 916 aa, unidentified
  REGION 1..916: note = Cas Enzyme sequence
MEKYGTGTVAETICAFLGLNPTGEKRSSRKYFKGQNVAFPRDVVVDEVQKILEAHKGILPKLDDKCIRVLLKNATEQSVVKLPARFRGGLLFGQYVPRFDNRIIGKCRITGKNTPLKSCKEFLLYRWGRLLNNLTVMDLIKGIRVLEPAERKALHAEMLERGFFDKKSINEALTRITYCEPANTESYFLTEEMEEALVLDPVKKYLASKKDKDLKELLPLFSEQGRKIFATKLSRGKTVRLCNFIEKMKKMGEWDSSALEAKIAEIQSKKDKKGNANKILTKPFSVAFPDGRAPYSKEILKKAFEESLHGKDPTMEGGCLYETPEIRKRLLEMSLSEQTNNHMVRHRLMIFERLLDDIVSEYADGNAERIGDVIVEVVKELKEFSGCSSKDLGAKENEKMKNFRMVSEKLEKDATELGVPVTGSLIRKARLLEDQDFTDPYTGTPLSYNELLKKPETGKKEERLLEVEHIIPRSLRLSDALDSCVMTFKAVNDMKGQRTAMQFIKECEGQNVPATNLTVSTLKDFEKWCEAHGKKKLGRGYGKEDVDRCKRRAKLLLLEKYEERNADFTNRDLTQTSYLNKMAIRLVEQKFKGVKARHLPGVITGFVRKKMNIADALVSAVPRMQKEAKDGITKTKMRELTHLHHAMDAITQALTGIFFRTEDWKILAQRRIGKFDRARLENRYSKILKFSADGEVLMSELPKALRENIRQRLEECRVVQHVPARMNGMVVDQTTWSVEKFDEDTGKVKLSQKRRDKDGRRIPPKTAEEKPSKLLGYGVPAGKLKSIKGVVQISRDENWGCVLDPEPCIIPYFKVFPKLRELIAKNGGKRVRILRKGQIISVPAGAYRGVWVVWSIKDNAGGIAVDMSAVDRVNLEKVRTADSKVNVTLSVLLKDGLKIEKPKLTGVPQCRSTLLQ

SEQ ID NO: 17669 - protein, 1060 aa, unidentified
  REGION 1..1060: note = Cas Enzyme sequence
MSATGKRDLVFSFDVGHSSIGWNVLKETDAGPEEIALGTVIFEADGCLASKRRTYRRMRRTIRSRRQRVEAIEKLFAQQGILSRKQIEEKHAPGKGNSAPWLLAAAVLSSKGKFALKPDELFDVIRWYAHNRGYDGNRRWAGNAGDEGGDSDREKAAFSLMDQHKTTTMAETVCAQLGLQPDGHKKAAMAAYKNKEIGAAFPRKTVVSEVRQILGAHVGKLKGCTPEFIEALCGDLKNDWQIIPIPEFEKQKTYRGGLLFGQKVPRFDNRILSFCPVTDTPTPLKSAKEFLEFRCAMFLSNVRVGAVGDSMMRPLTQSELADLWQKIHKAGYLTEDQFKKTIRGFDGVTQDNLDALMTIEDTAKNLVVDPPLKLLSSSTVLKAPVSLLSAEAVEELLSILWKKNSVTLADILANIPEADREATVDAAFKKDKAAIKKYGTKERWLEGKTYHAEFDSGRAPYARAVMQKAVEEILNGLDPRAKGGCLYLTDEMLQRQEDRSIDELTNNHLVRHRLLILQRLFKDMVDEFCGGDRGLVQTVVVEVNREVSEMSGKTNKQIAQEEGLKRADHKKAVEKLEEAVKESGEPIKVTAGLIRKARIAQDLGWTCPYTGEKFSPMELIYGQVDLDHIIPRSERLSDSMAGLVVTFSEVNRWKGKRSALQFVTEEQGRPVQGKGNLRIQPLADYQKFVSGLKTFGGHASDEARRKSRKAYLMLPSYEDKEFTPRDLTISSYVAKLAVQQLKKEFKQVSRPPQVISLPGRLTGEARKAWKLTGLLKAVHAEIKDETTKDEIRGLTHLHHALDAAVMGLMAHCTGNLSDGTTWQLLLKRSLLPHEKNLLQSNMSNIAFDGNRAHLLDVPDELKEQLRKRLLERRVVQHVPASMEGMRVDENTSGVIGFDEKTGKVKLHQFGKPTESRVPGKLLGYEQSGSKLWKHRGVRIITENFGVALASEPEVIRWHKVYPHLSAIEAKDGKWPVVWRRGQIIIVPEGRQKGVWRISGIDENMRDGIIIKICSLDGLERAREARIKSLLRSKAHLVKTRLTGDEICRITSSTSGAQVSG

SEQ ID NO: 17670 - protein, 1055 aa, unidentified
  REGION 1..1055: note = Cas Enzyme sequence
MSASELKQRHKQAGGDSFAWKRAAAILKAKREGASLPPVVWPELWDILRWYAHNRGYDGNSRWARASEETSGLESDSEKEQTARALMNEYKATTMAETIAAYTEHYEREVALWVQEQRKDKIRHFKGLGAAFPREIVIAEVRSILEALKGKLPHVDDTLIRCLLSDGNADVVAWSVIPVQGLQLPKRYQGGLLFGQLVPRFDNRIIGQCPIWYARRAAEMKAAGISEGHALRRAAIEAKLPSKNSPEFLRFRWAMQLANLFGVRPGQTESQPMTAEHRRKLTILAEQQGAFSAGEFKKTVRSITGWTRDNLDQTLLHPDAENALILDPVQRAIRNSPLKEIWPELPPIIQKRLRGKLRRARSVKIGTVRQWAGEMPSFDAILHHHIDRTNTKKGRGKELLTLDALLETEIRIEFPTGRAPYARPVLRQTIDEILNPSDPLSPRHPRESGGCLEQTEHLREAQLCRRLEDQTNNHLVRHRLLILERLLNDLISAPEFASNDKRRISSLTIEVNRDLRNLAGKTAKEIAQDLGIRLGDFKRVAANVEAECQRRGIQITAGLIRKARIAEDLRWTCPYTGQKYELAALIDGAVDKDHVIPHADRQSDSLDSLVITYSAVNKWKGRRTALQFITEEGGKPVPGQPSLSVLPLERYKSFVEALDIRNGHDDDKQRKKRRKQRLLLAVYEEKDFTPRDLTVTSHLVRLGAQVLQRHFLDLPRDERPPTVSIPGSVTAEVRKAWNLLGCLATASPQTAGKTKTEIRGVTHLHHALDACVLGLATHFFPRHGSLWAAMVKAGKVNAEEGPTLWRAMVQRRPSTQEQALLRGTGLYRADPEGRMRLGDLDNSVKDEIRLRLAEKRVVQHLPADMSGVKIEENTRGIAGMDGDRVLLRQLAPRDAKSGIRLAAKKTPERPEKLLGFKPGGGIGKLQKQAGVRVITDNFGVAILDFASDPEERFAIVPWHRVWHRLRELRVKNQGRRVTLIRNGNLIRIRAGNFAGIWRVFSAKNNSSGMALDIGWPDVVRLQNKTEGHKINVLLASLVKGGLEVIPSNLVGTSSS

SEQ ID NO: 17671 - protein, 1349 aa, unidentified
  REGION 1..1349: note = Cas Enzyme sequence
MQKYYLGLNIGTNSVGWAVTDENYNLCKFGGKRMWGIRLFDGAQTAEERRLNRSNRRRLSRQKQRIDLLQELFAKEIAKVDPTFFIRLNESRLYMEDKSTGAKFPLFADPGYTDKEYYKEYPTIYHLRQELIKNPESHDIRLVYLACHHILKNRGHFLINGSFSDLKNLSFVCREMLDAFNELSKYQLMISDIDALEKILSDRKQQKSAKVKELVQIFECGPREDKSDAKICKGILSNLCKFLVGAKGNITRLFDTDFDEMETSSFSFGDSKYEDSLLPSLEENYPDYANVIQKIKAMYDWSVLVEIMAGENYLSFAKVNAYKKHKENLSILKSLMKKYCTPDVYQRFFYKTDEKSNYGNYIGAIHNNGHSYTMKKCDEETFYKSLSKILDKLVVQQADQITLEILKKEAENQTLLPLARTKANGVIPNQIHIQELRAILDNAKTYLSFLNETDEYGTIAEKIIRIAKFKIPYYVGPLSTRHKEQGSNTWIVRKQEGRIYPWNFEEMVNLERSNNEFIRRMTNKCTYLIGEDVLPKNSLLYSKFMVLNELNNLKIRGHKISVELKQELYKELFCKKAKVTGKALLVYLKKKDAELTLEDISGFDADFKSSLSIYIDFKNHILREQIDDGKYQSIVENIIKWKTIFDADSKMIEKMIAREYPNMFSSEQIKKICRLKCRGWGNFSSRFLNGIQGENTETKECFTIIEALWKTNYNLMQLLSKQFTFKDAIDCINADKVGKIDKVTYENTVKDLVVSPANKRAIWQTVQITEEIKKVMKCEPEKIFVEMARGGEKEKKRTISRKERLLKLYMDYKDENRDWIKEIESRDEQDFTNRKLYLYYTQIGRCMYSGEEISLEELMQKNSKWDKDHIYPQSKIKDDSLDNLVLARKDINNNKSNKLLSTGIQDKMKKYWKMLLQHGFISKKKYDRLIRTEDFSDEELSGFIARQIVETRQSSKAVAELLDRLNEHTEIVYVKAGLVSDFRHDNNLLKSRRINDYHNAKDAFLNIVVGNVYNAKFTANPRNWIKKNRNTNYSIRRVFDYTVKRGSTIIWQGVKDGGHSIDAIKKTMARNDILHTERTYCEQGELFNATLIKKGNPNAIGLKKGLDPMKYGGYSSPKTSAFAFIEFDGKKGWQNHLVEIPVYIANIAARQPEYIKNYLEEKKGYQNVIVKKYPIQKNALIKLDGYPARLRGANEKSITLKNAVQLVLKPEYYETIRNVEKYLEYIDKDESVSKAARFSHTELDKLYDELCFKAENSIYKKRPANQSATLKNGQKTFLAITNLKEKAQVINNIITMFRCDATTTTNLKTIGGSVNAGGMQVNKNTLTSQKVVLVHQSVTGLFVTEEELL

SEQ ID NO: 17672 - protein, 919 aa, unidentified
  REGION 1..919: note = Cas Enzyme sequence
MAAVAPPSFRPGLTLGIDLGTNSLGTALVRTDLDLIEFMGVRVFPAGVEGNLEEGKEESRAAKRRQARLARRQTQRRQRRMYKVFHLLQRMGLLPAGNRVEVLDRLQHELEQRYPETTVLPWFLRARALEHALAPHELGRALYHLAQRRGFLSNRVGGKEDDKERSEVKATIKGLAEAIEAAGKRTLGEYMASLGAREKLRNSAESSGHYTHRSMFEHEFALIWDSQRVHHPEILTENRRAALHHAMFHQRPLKDQSYLVGQCELEPAEKRAPLRLLAAQRFRVLGFVNNLRLRLDDGNERKLTPNERAVLLDLCEKREKLTIAKARSEIGISKGQKFTIEEGGEKNVPVNLTATRLRAALGQTWDGLTPLQKDDLVEDVGDGKRNPTDEGLERCGRDKWGLPQEIAEALGKVRLPDAYGRYSLRALVALLPAIEEGLTVEDAIRALYAGARKSAEPLPLLPPVRDEKMKTLLGEIRSPAVQRSLTELRKTVNAIIRRYGLPEKIHIELARDLKKSKKERQKQTEINRDREKLRQEATGELRKHDVVRFANPRNSDIEKYLLATEARWQCPYTSKKYGVTDVFGDHPQVDVEHIIPRSRSLDDSYLNKTLAYRSANMEKGNRTPREWLFESDQEQYDRMIGVVSGFDPRFEVGKKLRRFSMELSDPDSLLKEFTERQLQDTRYASKLACRYLGVLYGGTSDASGNQRVFASAGQVTAKLRRAWDLDRILSPDKPEKSRDDHRHHAIDALTVALSSTTLIRALATAAGEADRLFRRKIILPVPWVGFGEQARSAVENIQPSHRPMRKLSGPLHKETFYSRPRKHAVGTDRKGKPIEEECVHYRVPVTSLSSAKSFESIVDSRVRAAVEERAAQLGGGGNRFEKNWPELVTRKGQTVPIKRVRIRKVEASSRSARTGESDL

SEQ ID NO: 17673 - protein, 1054 aa, unidentified
  REGION 1..1054: note = Cas Enzyme sequence
MSTSRSPQGLPSGLVLGIDLGSGSLGTALVNPAAERIEFLGVRIFPAGVEGDLETGREEPRSAKRRQARLARRQTQRRQRRLYKVFHLLQRMALLPTGRRVDVLCQLQRDLERRYPETTVLPWFLRARALDHPLEPCELGRALYHLAQRRGFLSNRVGGKQDEEERSIVKGAIKGLRAAIQDSGKRTLAEYMVSLDPHLTPLRNKPEFSNHYTHRSMFQDEFALIWDEQRPHHPKILTEHWRARLFHALFHQRPLKDQSYLVGPCELEPDEKRAPLRLLAGQRFRILGFVNNLRLRLEDGAERKLSPNERAVLLDLCEKSETLSFAAAKRALGLSKTLKFTVEEGGEKNVPVNLTATRLRAALGSAWDEFSPVQREDLIEDVGDGRRCPTDEDLETCAREKWGLPAELAEALTRVRLPDAYGRYSLKALRELLPALEGGLTVEEAIRQHSRYAATRKPADPLPLLPKVSDVLGEIRNPAVLRSLTELRKTVNAIIRRHGKPDYITIELARDLKKSKKERQRETSRNREREKLRQLAVEDLRKHDPVRFANPRGYDMEKCMLAMEAKWRCPYTGNQYGFTDVFGEHPVVDIEHIIPRSRSLDDSYLNKTLAYRSCNAEKGNRTPREWLFDSDGQRYDQMIQVVKSFDSRFEVGKKLRRFAMELSDPDSLLREFTERQLQETRYASKLACRYLGCLYGGVIDNLGRQRVFACAGQVTAKLRRAWDLDRILSGKPEKSRDDHRHHAVDALTVAVSSPGIIRDLATASGEADRLFRRKVILPVPWAGFGEQTRSAVEGIQVSHRPMRKLSGPLHEETLYSRPRARDVGTGGGPNAKECVHYRVPVTTLSSARDFQNIVDSRVRAAVEEKAANLGGGGNKFLNDWPVLNTRKGGVVPIKRVRIRKVQSVVPIGQGPARRFVIPGSNHHAEIVARLDTANRDARYICHTVTLLEALERKRQHVPVVQRDHGPGCRFVCTLSEGDLLEARRPEDPQTRIWKVRSVRQSGQLDLTPSLDARMKKDLEEDGLVWSPAVGSVFLNRAARKVAVTHLGEVVPAND

SEQ ID NO: 17674 - protein, 1094 aa, unidentified
  REGION 1..1094: note = Cas Enzyme sequence
MSGALRRTKDRLTLKRPGNRLFDKLLPAYSNQEAMSMADLSLPQAHKGLILGIDLGSSSLGTALVNPEGEEIPFLGVRIFPAGVVGDIEEGREESRSAQRRDARLARRQTQRRQRRLYKVFRILQRMGLLPLGPRVEVLYELQRELERRYPETTVVPYFLRARSLDQALTEHELGRALYHLAQRRGFLSNRAGGKKDDAEERSKVKGSIKGLRAAIEAAGKRTLGEYMASLDPRVTSIRNKPEFSDHYTHRSMYLDEFNLIWDAQQPFHSGILSAQFRAKLHHAMFHQRPLKDQSNLVGQCELEPEEKRAPLRLLDAQRFRVLGFVNNLRVGLDDGNTRTLSANERALLLDLCEKSEKLSIPAARRALGFARTSKFTIEEGGEKNVPVNLVAGRLRAVLGDWWDNLTTEAKADLVEDVGDGKRCKTDEELELCAREKWCLAPEIAEELSKVRLPDAYGRYSLKALRELLPALEKGLNVEEAIRSHPQYLESRKVAEPLPLLPPVKDVLGEIRNPAVLRSLTEMRKTVNAIVRRYGKPEFIQVELARDLKRSKKERQLETGRNRDREKLRQLAVEELQRHDSVRYSNPRGTDIEKYLLAMESNWHCPYTDRKYGFVDVFGEHPSVDVEHIIPRSRSLDDSYLNKVLAYRSANMEKGNRTPHEWLHESDVERYDRMIALVNGFDSRFEVGRKLRRFSMELSEPDSLLAEFTQRQLQETRYASKLACRYLGVLYGGEVDAEGNRRVFACAGQVTAKLRKAWDLNQILNPVGKPEKSRDDHRHHAVDALTIALTSSKMVRDLANAAGEADRLFRRKIILPVPWVDFAEAARMSIEAIQVSHRPARKLAGPLHKDTLYSRPRKYAVEIDKKGTPVEKEYVHLRVPVVKLGTRAAAEVIVDVRVREAVMAKAEELGGGGNKFQNNWPVLHTRHGGSVPIKRVRVREVKSVVPIGKQGRERFVSSGSNHHAAIVAEMDTKDSVKRYVFSTVTMLEAFERKRQGLPVVQREHGPGMHFLCTLSDGDMVEGKRPGDAVPRIWKVHTVDKNGRIFLSAAVDARKKDEIKKAHDHWEPTVNSMFGAGGARKVLVTHLGELISAND

SEQ ID NO: 17675 - protein, 1118 aa, unidentified
  REGION 1..1118: note = Cas Enzyme sequence
MLDSPRTGSAARAHRPYILGLDIGTNSIGWVALAVDEKGQPANLLTAHARESPSMGVRIFEAGMENLGQGKGREESRAVKRRSARLHRRQLKRRARRRRKIFRLLQQAGLLPAIEKETGGFDAARDSLFKHLDEQLSREFAADEPKLAGDAHERLPYLLRTRGLDQPLTALQLGRALYHLAQRRGFWSNRKADAGDKESGQVKQAIRELDEEMQSTDTETGEVFARTLGEYLFKLDPDTRRARSRWTARGMYKHEFETLWKAQSAHHASVLTPEFKKLLHRAIFHQRPLKSQRHLIGLCEFENGRDRCLEETGELIRTKRRHRAAACLPIAQRFILLQKINDLRLQDKRPGGTSVPLEADQRRILLTALEKAPSLTFAGARKLLGIKKGDNRVFNLEAGGEKKLPGDRTNASFLELFGDRWAALDDRERESAVLELWGGGTDESLEKRAAAAKGVWAKLQPTKEEAKQLSEVRIPQDYVNLSRRALHQLVPELEQGMSYAAAYRKVYGTSMAHEARDTVPPLREVFGDLRNPVVMRALTEVRRVVNAIVAMHGKPETIRVELARDLKKNAEGREQGIKRARENEERRRTMAERIVAETHIQNPRAGDILKARLWEECGGTCPYTGRQINFATLFGESVDIEHIIPFSRSLSDSYANKTLCVADYNRRVKGGRTPVEATGGEGDAWEQMLLRMENNVAERGMPAIKLKLFRMAGEELDDYLASFAERQLSDTRYISRQARTYLTYLYGGSLERGVDGHGVTRVQVGNGQATSLLRHAIPGLNRFLRDGGKKSREDHRHHAVDALATALTGPSLIQRLADMTNSAPPNGRPGRLPRMEEPWPSFASDVDAALDAIWVSGKVQNRVRGPLHKETLYSAPRNKETGHKIDPGVEHSGETVSHLRVQLHMLKQSNVENIVDHAVRAAVQSRLAEAGESNPAKAFKPDEPESYPLFGKSRPRRIHKVRIRKKNSTRPIASGHRRRHVENSENHHLEILCTKNEQGSKKWVGKMVPLAEAYRRRLAKEPVVRRDHGEELEFLFSLAKGDVFRTREPLETGQEFRVRKLKCGATGNIQIFFSELRDARIFGKLPMKGLSLTPGSMQKAGVEKLVLDPVGRIQTCRA

SEQ ID NO: 17676 - protein, 1355 aa, unidentified
  REGION 1..1355: note = Cas Enzyme sequence
MEVQQSRAYYLGLDCGTDSVGYAAADTDYALLRSGGEPVIGVTTFDGAVTAQERRAYRVTRRRLQRRRQRVQLVQELFAPAIATVDAQFFLRLRESALYRDDRRIGGDAIPRALQNPYPTIHHLLVELMESDEPHDVRLVYAACAWLVAHRGHFLSNVSEDDLGAVLDVRGAYDALMEYFPGEKPWDCGAEAFGAALREKLNVRAKEARLRELLFAGKKPPDLVYDPDDPDAPRYSRAKMLTLLSGGRVKPGELFVHRSAEYEQIGSFSLGGKEEELAAALAQLGDDAELVLCLKALFDWAVLTDVLQGEPCISRAKVRVYEQHRADLACLKALLRKYAPEKYDAVFNGTGKEANYAAYSRHAPSRGAAPKAYAAREAFSEFLKKQVRDLPVSQDDRPAYEDMLARLDTCSFLPRQRSTDNRVIPRQLYAYELRAILARAERYLPFLAERDADGLSVSDKIVSVFNFRIPYFVGPLDPRSSHAWLTRKAGRIYPWNFESMVDLDRSEDAFIRRMTGRCSYLPGEPVLPKNALCYARFTVLNEINPLKVNGAPLTPAQKQAVYTGLFEKRQRVTLKALREFLLSEGYMQRGDTLSGVDEAGIKSALRPQLAFRRLLEKGLLTQEQAEQIIERLACTEDRMRLRRYLTREFPQLPEADVNYLARLPFKDFGRLSRRFLCGLEGADRETGEVYTVLQAMWETNCTLMELLSDRFTFAEAVQQEAQAYYAAHPQTLEARMDSLYLSPAVRRPIHRALAIVKDVVKAAGGPPSRIFIEMARGAAEQQKGRRTVSRKEQLLALYRKFGDVEVRALREQLEAKEENDLQSEKLFLYFMQLGRCMYSGQPISLDALFADKRYDIDHIRPQSRVKDDSVWNNKALCLAELNGNKGDTYPIRADIRQRMTPFWSLLHSRGLMSDEKYRRLTRATPFTEEELMGFIQRQLVETRQSTKALATLLAERYPGTEIVYVKAGLVSDFRHEFNLLKCRAVNDLHHGKDAYLNIVVGNVYHERFSRQFFRLDQPYTLKTRELFSHRVMSGGRCVWRGGEDVARVRAIVQKDALHVTRFAFCRHGGLFDQQPRRAGSSDELLPRKAGLPVERYGGYRKPTASFFVLARYAAGRRGGLMVVPIDLMAAPRFLSGGAEAEAAVRAALEGVLKQPVDAVSLPLGGRILRVNTVFSLDGFRVALAGKSNGGKILLLSPLMPLRLGPELERYVKRLESFQKKRADNPALRLDPGFDRLTPEEDLALYDALRQKLAAWPYSKRPAGQSVAEALDAGRERFLALAPEARAAQLLALLPVFGRSGAGCNLTAIGGAANVGVPMLSSALVNWKKAYDDVRIIDQSASGLFAAASMNLLELL

SEQ ID NO: 17677 - protein, 1057 aa, unidentified
  REGION 1..1057: note = Cas Enzyme sequence
MAKQEKVFAFDVGKASLGICAREGNHILGLQSLLIPAEYGATADFRSRRRAYRTRQAHKKREEWLCRLWTEAGLTPLNNDDKRLKSEFPKRGEEKIYNSALLRIALLQERPLEEWQVFKALWAAIQRRGYDKDCDWNFRNEDELLSEDSKENLESVGKYQEALYYHTNSQTEYLFPCYLEATSMGLWHWEQPDKLNVRIDSNATKVRQKGMVAPRQLVEKEIRQLFEKAQRQLPALGKVNINEFLYGPSGKAYASLSPEFAQYRGSEWDTQGVLSQKVPRFDNRILNKCQMLPKRNVCKANDPLSLQFNLLLKLKNIRFTDENGEVGRFLSCEELKNVYTLCQENLSEKKTQEITFGNLVKFIEKTVETRVMDINLAKGEKIKLNATGRSRFCRPALTIMNQILLEGTDPPDFDVTPFVQQGNNNAITQEELESLISRLGETWNGFHVGDKRYIDLESTPKEKDKNILKLIGSVNNPVVRHRLIFFWNELKKMVHQHGTPDKVILEFARGGEGLDGQKTANDWERAIKESEKRNDRIREQLEEQGLKSHKWNIERFKLAEEQQWHCPYTGERLHAGNLEHYQVDHIVPVSGDIATDAFYNKVLCTSQSNQDKGNRTPYEWLSATDEWPDFLARVTDKNSSYSKKKKELLIRNDARDLVDSYNGLAETAYIARLAQQIVALEFGWGLQTKGDNRRIFVNDGKMTAKIRKIYSLNELLLTGEEKSKLSDAKDAGQQRTVWKKNRENHKHHALDAYCISYSQDLKISRIDEQGRIHWHVPGLEESKAQLERKLIDLFPKPVRRNTKELYPLETIYGYRKRTENGKEVHYLTVRKNLIELLGKDRKKIRDIFDLDIRQDLEKHSEEIKDNKDWNNFLVAYRHPKRNGKVEAVLIIESCSDNPPQVDRAGRMIFGEFKDFGNLDTKEGRKGITRHQFKHSKANKGQLIYNSGKGWKVQQVYVHEKTNNIKQSLLNSGYKLYRDGMLFYPGCQVFIPFAFKAGKKELPGGLYKSRTIKAKGAVLLENNDGEEFLTNIKHLVEAGVELAEYHDKTVKVLSTSNE

SEQ ID NO: 17678 - protein, 1047 aa, unidentified
  REGION 1..1047: note = Cas Enzyme sequence
MGDCQRVLGIDLGIASCGWGVIEVRDKAGSIFAKDGKPAVGVRCFDAPLVYKTGKPKDAQRRSARGQRRVIRRRRQRMNAIRDLLHRNGILSDAKDEALALALRRISRPGHKPQVTPWALRAVAHDCLLTDDEFAVVLGHIARHRGFRSNSKRKATSNAAEETSKMKKAMEETREGLAKYRSFGEMLASDPKFSDRKRNRDKDYSHTAKRSDLEDEVRKIFQAQRCFGNAHATEELERQFRDKAFSQRPLQDSEDKVGNCPFEPDHHKRTAKRAPSFELFRFLQRLVNLRVAVGRAERSLRPEEIGLLLKKFGEQKSYTYNALCKDLDLDPNAGFSTIARNSEWLDIAARKGQSAFGTCVLREVLGAGPWHSLLKTPERLDRIAEILTFREDLTSIRKGLAEIGLDGPVIDRLMQAASEGAFTEFKGAAHISSLAARNIIIGMREGLVYAEACARAGYDHSARRAVSLDQIGNRITALSEAIKQVRAVAREYGPFDAIHIELAREVGKSAKERAEITRGIEERNVEKDRLKTEAADLLKRAISDDELLRYQLAKEQDFKCVYCDSQLAPIGFAANNTGWQTDHILPWSRFGDDSYLNKTLCCTRCNQHKKGRTPFEWFCQMTETEWDTFLARLENLKEMKGLKKRNFKLRDAAAVEDKFKKRNLTDTRWVTRLLANELKRMFPAPDGKRRIYTRPGAITSKLRRAWGLEGAKKENGERVDDDRHHAVDALVLAATTESLLLRVTKDFQQRKDQGRSDDILHVQQPWQDFRRDVIQVVYGENGIGGVFVSRAERRRARGEAHDATVKQIRQVNGEKIVFERRPIEKLTEKDLKRIPMPEPYGKMANPRELRDQMVEALRVWIAAGKPKAADKLPRSSKGDIIRKVRVASKDKVAIELHGGTVDRGDMARVDVFRKAGKKGKWEYYVVPIYPHQIATMDTPPNRAVKGGGSNETEWYVLDGSAKYLWSLYSNSFVEIAKSDGDVIEGYFRSLDRNTGAITISPHMNAAEIRKGIGVKTLSSFNKFTVDRLGRKFKVHRELRTWRGKACT

SEQ ID NO: 17679 - protein, 1047 aa, unidentified
  REGION 1..1047: note = Cas Enzyme sequence
MGDCQRVLGIDLGIASCGWGVIEVRDKAGSIFAKDGKPAVGVRCFDAPLVYKTGEPKDAQRRSARGQRRVIRRRRQRMNAIRDLLHRNGILSDAKDEVLALALRRISRPGHKPQVTPWALRAVAHDCLLTDDEFAVVLGHIARHRGFRSNSKRKATSNAAEETSKMKKAMEETRDGLAKYRSFGEMLASDPKFSDRKRNRDKDYSHTAKRSDLEDEVRKIFQAQRCFGNAHATEELERQFRDKAFSQRPLQDSEDKVGNCPFEPDHHKRTAKRAPSFELFRFLQRLVNLRVAVGRAERSLRPEEIGLLLKKFGEQKSYTYKALCKDLDLDPNAGFSAIARNSEWLDIAARKGQSAFGTCVLREVLGAGPWHSLLKTPEKLDRIAEILTFREDLTSIRKGLAEVGLDGPVIDRLMQAASEGAFTEFKGAAHISSLAARNIIIGMREGLVYSEACARAGYDHSARRAVSVDQIGNRITALSEAIKQVRAVAREYGPFDAIHIELARDVGKSAEERAEITRGIEERNVEKNRLKTEVADLLKRAISDDELLRYQLAKEQDFKCVYCDSQLAPTGFAANNTGWQTDHILPWSRFGDNSYLNKTLCCTRCNQHKKGRTPFEWFCEMTETEWDTFLARLENLKEMKGLKKRNFNLRDAAGVEDKFKKRNLTDTRWVTRLLANELKRMFPAPDGKRRIYTRPGAITSKLRRAWGLEGAKKENGERVDDDRHHAVDALVLAATTESLLLRVTKDIQRREDQGRSDDILHVQQPWQDFRRDVTQVVYGEKGIGGVFVSRAERRRARGEAHDATIKQIRQVNGEKIVFERRPIEKLTEKDLKRIPMPEPYGKMANPRELRDQMVEALRVWIAAGKPKAADKLPRSSKGDIIRKVRVASKDKVAIELHGGTVGRGDMARVDVFRKAGKKGKWEYYVVPIYPHQIATMDTPPNRAVKGGGSNETEWYVLDGSAKYLWSLYSNSFVKIAKSDGDVIEGYFRSLDRNTGAITISPHMNAAEICKGIGVKTLSSFNKFTVDRLGCKFKVRRELRTWRGKACT

SEQ ID NO: 17680 - protein, 1046 aa, unidentified
  REGION 1..1046: note = Cas Enzyme sequence
MGDCQRVLGIDLGIASCGWGVIEVRDKAGSIFAKDGKPAVGVRCFDAPLVYKTGEPKDAQRRSARGQRRVIRRRRQRMNAIRDLLHRNGILSDAKDEVLALALRRISRPGHKPQVTPWALRAVAHDCLLTDDEFAVVLGHIARHRGFRSNSKRKATSNAAEETSKMKKAMEETRDGLAKYRSFGEMLASDPKFSDRKRNRDKDYSHTAKRSDLEDEVRKIFQAQRCFGNAHATEELERQFRDKAFSQRPLQDSEDKVGNCPFEPDHHKRTAKRAPSFELFRFLQRLVNLRVAVGRAERSLRPEEIGLLLKKFGEQKSYTYKALCKDLDLDPNAGFSAIARNSEWLDIAARKGQSAFGTCVLREVLGAGPWHSLLKTPEKLDRIAEILTFREDLTSIRKGLAEVGLDGPVIDRLMQAASEGAFTEFKGAAHISSLAARNIIIGMREGLVYSEACARAGYDHSARRAVSVDQIGNRITALSEAIKQVRAVAREYGPFDAIHIELARDVGKSAEERAEITRGIEERNVEKNRLKTEVADLLKRAISDDELLRYQLAKEQDFKCVYCDSQLAPTGFAANNTGWQTDHILPWSRFGDNSYLNKTLCCTRCNQHKKGRTPFEWFCEMTETEWDTFLARLENLKEMKGLKKRNFKLRDAAVEDKFKKRNLTDTRWVTRLLANELKRMFPAPDGKRRIYTRPGAITSKLRRAWGLEGAKKENGERVDDDRHHAVDALVLAATTESLLLRVTKDIQRREDQGRSDDILHVQQPWQDFRRDVTQVVYGENGIGGVFVSRAERRRARGEAHDATIKQIRQVNGEKIVFERRPIEKLTEKDLKRIPMPEPYGKMANPRELRDQMVEALRVWIAAGKPKAADKLPRSSKGDIIRKVRVASKDKVAIELHGGTVDRGDMARVDVFRKAGKKGKWEYYVVPIYPHQIATMDTPPNRAVKGGGSNETEWYVLDGSAKYLWSLYSNSFVEIARSDGDVIEGYFRSLDRNTGAITISPHMNAAEICKGIGVKTLSSFNKFTVDRLGCKFKVRRELRTWRGKACT

SEQ ID NO: 17681 - protein, 1047 aa, unidentified
  REGION 1..1047: note = Cas Enzyme sequence
MGDCQRVLGIDLGIASCGWGVIEVRDKAGSIFAKDGKPAVGVRCFDAPLVYKTGKPKDAQRRSARGQRRVIRRRRQRMNAIRDLLHRNGILSDAKDEALAFALRRISRPGHKPQVTPWALRAVAHDCLLTDDEFAVVLGHIARHRGFRSNSKRKATSNAAEETSKMKKAMEETREGLAKYRSFGEMLASDLKFSDRKRNRDKDYSHTAKRSDLEDEVRKIFQAQRCFGNAHATEELERQFRDKAFSQRPLQDSEDKVGNCPFEPDHHKRTAKRAPSFELFRFLQRLVNLRVAVGRAERSLRPEEIGLLLKKFGEQKSYTYNALCKDLDLDPNAGFSTIARNSEWLDIAARKGQSAFGTCVLREVLGAGPWHSLLKTPEKLDRIAEILTFREDLTSIRKGLAEIGLDGPVIDRLMQAASEGAFTEFKGAAHISSLAARNIIIGMREGLVYSEACARAGYDHSARRAVSLDQIGNRITALSEAIKQVRAVAREYGPFDAIHIELAREVGKSAKERAEITRGIEERNVEKDRLKTEAADLLKRAISDDELLRYQLAKEQDFKCVYCDSQLAPTGFAANNTGWQTDHILPWSRFGDDSYLNKTLCCTRCNQHKKGRTPFEWFCEMTETEWDTFLARLENLKEMKGLKKRNFKLRDAAGVEDKFKKRNLTDTRWVTRLLANELKRMFPAPDGKRRIYTRPGAITSKLRRAWGLEGAKKENGERVDDDRHHAVDALVLAATTESLLLRVTKDIQQREDQGRSDDILHVQQPWQDFRRDVIQVVYGENGIGGVFVSRAERRRARGEAHDATVKQIRQVNGEKIVFERRPIEKLTEKDLKRIPMPEPYGKMANPRELRDQMVEALRVWIAAGKPKAADKLPRSSKGDIIRKVRVASKDKVAIELHGGTVDRGDMARVDVFRKAGKKGKWEYYVVPIYPHQIATMDTPPNRAVKGGGSNETEWYVLDGSAKYLWSLYSNSFVEIAKSDGDVIEGYFRSLDRNTGAITISPHMNAAEIRKGIGVKTLSSFNKFTVDRLGRKFKVHRELRTWRGKACT

SEQ ID NO: 17682 - protein, 1069 aa, unidentified
  REGION 1..1069: note = Cas Enzyme sequence
MAAIAIDDDGKPTEILSAISLIHDSGVDPDSAKSAATRLATSGIARRTRRLYRRKRKRLAKLDKFISSQGWPLKEFEEYEDPFYPWRVRAELATTAITNQQELGEKLSIALRHIARHRGWRNPYSKVTALYAVAKPSDALVSIQEQCATELGHPIPPTTTVGQLVASMNLGKTRLRGEDSLLAARPRQSDNANEIHAIAKVQGLSNELVKQIIDHVFAAESPKGSAAERVGKDPLQPTKKRALKASDAFQQYRIAALIGNLRIRGGKKNRRLTAEETRLVFDYLRSLPAKQEPTWQLVAEQLKIDRGNLVGTAIMTDDGERAGAKPPVHETNRLMESTKIKPLATWWKSADADARAVMVKALSNAEVDDFDSQAGVQVQEFFFGISDKDHEELDKLHLPIGRAAYSEDTLDRLTKRMIGEGMDLYEARQAEFKIPNDWAPPAPEIGERVGNPAVDRVLKATARWLNAAERQWGAPKSVNIEHVRDAFMSESSARELDRDNQQRAKRNVKVVAEMQEKLGIEGRPSRADVWRFQSIQRQNGKCAYCGTQISYKNSEMDHIVPQAGEGSTNTRDNLVAVCRECNSSKSNIAFAVWAENTSRPGVSVQKAVERTRHWVTDSGLRKPEFDKFRKQVCDRLRRKATDEPIDARSLESVAWMANELRSRIAQKFKDGDTKVRVYKGALTAEARRASGISGKLEFVDGKGKSRLDRRHHAVDAAVVAFMSHYVAETLALRSNMKFDQELRRKAPQWREFTGADHVHQVEWTKWKYRMQALAELLNNALAQDRIVVMHNLRLRLGNGAAHEDTIGKLTRLKVGDAISTTDIDRASSEALWCALTRDPDFDPKTGLPENPNRTIRIHGTHLTASDEITVFPVAAASVPIRDGFAKLGSNYHHVRLFQVPNGKKYKYCLMQVYTVDLLKFRKEDLFTVELKPQTISVRTCEAPLRKALANGTAEYLGWLVSDDELFVNISSFDTPGIVKLREEYGPVNRWRLAGFNSNTQMVLRPLYLSKEGLKPDVDPEIKKIIDNRGWFVTVNKLFSTGHVTVVRRDALGRPRLYSAAHLPICWEVK

SEQ ID NO: 17683 - protein, 1429 aa, unidentified
  REGION 1..1429: note = Cas Enzyme sequence
MKKILGLDLGTTSIGYAYVIEDEQYQNSEIIQIGVRVNPLTTDEQTNFEKGKPISINADRTLKRGARRNLDRYQERRANLIHALFKGDIISKETKLAEFGKRTTHSTWKLRAQSAKERIEKEDLARVFLTINKKRGYKSSRKAKNEDEGHAIDGMEVAKKLYEENLTPGQLAYSFLMESKKQIPDFYRSDLQAELDKVWDFQKQFYPEIFTDEFKKELEGKGQRATSSSFWGKYKFNTAEIKGFRDEKKIQAYKWRSEAVYQKLEKEEVAYVITEINNNLNNSSGYLGAISDRSKELYFNKETVGQYLYKQLLKNSNIRMKNQVFYRQDYLDEFETIWNEQRKYHLELTEDLKQEIRDIVIFYQRKLKSQKGLVSFCEFESREIEIENGKKKTIGLKVAPKSSPLFQEFKIWQIVQNLLIKNKGSKKRIAKNEKEANLFEEEQEIFPFDLEEKMKLFEELNLKGNLSEKTLLEILGYRNQDWEINYTQLEGNRTNKALYEAYLKILDIEGYDVKDLLKIKSNKDEVELGDLNISAHDIKMMVKQIFETLKINTGILDFNPELEGKEFDLQPSYQLWHLLYSYEGDESASGNEKLYDLLEKKFGFKREHGQVLANLTLSDDYGNLSSKAIRKIYPYIKENNYSTACELAGYRHSASSLTKEEIANRPLKDKLEILKKNSLRNPVVEKILNQLVNVVNALIEKNSKRDENGNIVEYFKFDEIRIELARELKKNAKERAEMTTNINATKLAHEKIFKLLTSEFGVKNPSRNDIIRYRLYEELKNIGYKDLYTNTYIPREILFSKQIDIDHIIPQAKLFDDSFSNKTVVFRKDNLDKGNKTAIDYIESKYGEKNLVDYLNRVDSIFEVGKKNKEEGISKAKYLKLIKKESEIGDGFIQRDLRDTQYIAKKAKNMLYEITRSVVSTTGSVTDRLREDWDLINIMQELNFDKFKKLGLTELVEKKDGTFKERIIDWSKRNDHRHHAMDALTIAFTKHSHIQYLNNLNARKNEKNKLHGNVIGIETKETHIMIDDHGNKNRVFNLPIPNFRQVSKEHLENVLVSHKAKNKVVTKNKNRTKSKTGDRIKIELTPRGQLHKETVYGKYRYYESKLEKVGIKFDLDTIEKIADPHYKKLLLERLSDNANDPVKAFGGKNSLSKKPIFLNDGKTKTLPEKIKLVWLEEDFSVRKDLTPENFKDEKSIEKIIDVGVKKILLSRFRKFGSDPKKAFSDLDKNPIWLNETKGVSIKRVTISGVKNAEPLHNKKDHFGNEILDKEGKSIPVDFVSTGNNHHVSIYRDEKGDLQEKVVSFFEALERVNQGFPVVDKTYNQHLGWQFLFTMKQNEYFVFPNSSIDFNPREVDLLNPENAKIISTSLFRVQKFTIKDYFFRHHLETNVEDHSKLKGVTWKREGLIGINNIVKVRLNHLGEIVKVGEY

SEQ ID NO: 17684 - protein, 1429 aa, unidentified
  REGION 1..1429: note = Cas Enzyme sequence
MKKILGLDLGTTSIGYAYVIEDEQYQNSEIIQIGVRVNPLTTDEQTNFEKGKPISINADRTLKRGARRNLDRYQERRANLIHALFKGDIISKETKLAEFGKRTTHSTWKLRAQSAKERIEKEDLARVFLTINKKRGYKSSRKAKNEDEGHAIDGMEVAKKLYEENLTPGQLAYSFLMESKKQIPDFYRSDLQAELDKVWDFQKQFYPEIFTDEFKKELEGKGQRATSSSFWGKYKFNTAEIKGFRDEKKIQAYKWRSEAVSQKLEKEEVAYVITEINNNLNNSSGYLGAISDRSKELYFNKETVGQYLYKQLLKNSNIRMKNQVFYRQDYLDEFETIWNEQRKYHLELTEDLKQEIRDIVIFYQRKLKSQKGLVSFCEFESREIEIENGKKKTIGLKVAPKSSPLFQEFKIWQIVQNLLIKNKGSKKRIAKNEKEANLFEEEQEIFPFDLEEKMKLFEELNLKGNLSEKTLLEILGYRNQDWEINYTQLEGNRTNKALYEAYLKILDIEGYDVKDLLKIKSNKDEVELGDLNISAHDIKMMVKQIFETLKINTGILDFNPELEGKEFDLQPSYQLWHLLYSYEGDESASGNEKLYDLLEKKFGFKREHGQVLANLTLSDDYGNLSSKAIRKIYPYIKENNYSTACELAGYRHSASSLTKEEIANRPLKDKLEILKKNSLRNPVVEKILNQLVNVVNALIEKNSKRDENGNIVEYFKFDEIRIELARELKKNAKERAEMTTNINATKLAHEKIFKLLTSEFGVKNPSRNDIIRYRLYEELKNIGYKDLYTNTYIPREILFSKQIDIDHIIPQAKLFDDSFSNKTVVFRKDNLDKGNKTAIDYIESKYGEKNLVDYLNRVDSIFEVGKKNKEEGISKAKYLKLIKKESEIGDGFIQRDLRDTQYIAKKAKNMLYEITRSVVSTTGSVTDRLREDWDLINIMQELNFDKFKKLGLTELVEKKDGTFKERIIDWSKRNDHRHHAMDALTIAFTKHSHIQYLNNLNARKNEKNKLHGNVIGIETKETHIMIDDHGNKNRVFNLPIPNFRQVSKEHLENVLVSHKAKNKVVTKNKNRTKSKTGDRIKIELTPRGQLHKETVYGKYRYYESKLEKVGIKFDLDTIEKIADPHYKKLLLERLSDNANDPVKAFGGKNSLSKKPIFLNDGKTKTLPEKIKLVWLEEDFSVRKDLTPENFKDEKSIEKIIDVGVKKILLSRFRKFGSDPKKAFSDLDKNPIWLNETKGVSIKRVTISGVKNAEPLHNKKDHFGNEILDKEGKSIPVDFVSTGNNHHVSIYRDEKGDLQEKVVSFFEALERVNQGFPVVDKTYNQHLGWQFLFTMKQNEYFVFPNSSIDFNPREVDLLNPENAKIISTSLFRVQKFTIKDYFFRHHLETNVEDHSKLKGVTWKREGLIGINNIVKVRLNHLGEIVKVGEY

SEQ ID NO: 17685 - protein, 1084 aa, unidentified
  REGION 1..1084: note = Cas Enzyme sequence
MRIRVGVDVGTHSVGCCAIAVDPAGAPVRILSALSLIHDAGIGEDGKKKATSRRELAGTARRARRLLRRRRRRLQRLDALLGRLGYPIVDLAEQKDPYLVWRVRAQLVQEVFPEKTRRYAVSMALRHIARHRGWRNPYARPESLLAPAPESDFMRAMRERVMNTTGEVLDEGFTPGQAMAVVALNNRVAMRGPDGVLGKLHQTDNANEIRRICETQGVSEQECRELILAVFASESPRGSSRSRVASDPLPGQGNFLRAPKCDPEFQRFRVISIVANLRIAGRDGAQRPLLPRERKKVVTFLLESMSEDLAWGDVAERLGVRRQNLRGTASMTADGERASAQPPVDVTNQVMGSCRIKPLRLWWADADAERRGAMVRYLYEGADDSECAEFLGSLSEEEQGKLDSIHLPAGRAAYSRESLALLSEQMLATDDDLYAARKHVFHVDDSWKPPAEPVGAPVGNPSVDRTVKAVARFLNGVADVWGTPEAIQIEHVRAGFSSERTARELDHDNDRRFRQNQKAVDAIKKAYGIQGEVRHSDVVRYTAVMVQDSVCVYCGGTIGYLTCQLDHIVPQAGPGSNNRRENLVAVCERCNRSKSNTPFATWAQDCGISGVSVEEAVARVRRWRNIQAGRAQSAQLRRLQKNVIARLRRTDEDPEIDARSMESVAWMANELHHRVQSAYPSAEVAVYRGSLTAGARRAAGIDSRVNLLGERGKKDRLDRRHHAVDAAVIALMNPSVAKTLAERSSQRWAQRLSGQEETWKSFTGATPGARDRFDSWRDHMLRLTELLNAALAEDRVCVTENLRLRLGSGNAHHEIVRPLARHRLGDGLTAVQVDRASSPALWCALTRQPDFTPRGGLPPSENRVIKVHGRRVTADDNITVFSQKPGDDAAEKPFAAIAVRGGFATIGLTIHHARLYRIEGRKPVYAMLRVFSHDLLPYRRDDLFSVPLALQTISVRCAWPKLRAALAEEAATYLGWVVVGDELEVPMESFAGGYIGGFRKEFPNITRWRIRGFESATVVKLRPNVLAAEGLTEAIGDVAKIMDEAWRPSVNVLFSTHPTVVRRDALGRVRHSSAAGLPTTWTVR

SEQ ID NO: 17686 - protein, 1111 aa, unidentified
  REGION 1..1111: note = Cas Enzyme sequence
MTPLSQLPRYRIGIDVGENSVGLAAISYDDDDHVIEILSALSYIHDGGKLSGTDKAPLSRLAGAGVARRTRRLRRRARSRLKKLNLYLAEQSFPPELDSQTYEVWHARYQLIHGFIENEVERNSKLALAIRHIARHRGWRNPWWTFLQVQRAAEEKSPSTSLLKMWENVATKYKFPDDEICSVGVLGFLGVTQGNPNRRLRHSTAEDRKSRENVFFDRVMAEDNFSELSAILVEQKVDSQVSTQILKLVFEQKMPHVPKDRVGDDSLDPSQKRSTRAGLEFQRVRMLNAISNLRIVDAGTNRPLSPEEFEETLTFLTNWKDKSTKPNQSDVAHLLGLNPAKVKFPTWDENQGSIAFFDQTSLEIVNKFSEKDPLGAWWRRANFIEKSDFVDFVTDNSEESHEDDASYLHLLEEESTAEALGGLTLTSGRAAYSRKTYQRILLVMEEQHCSERDAILQVFQIKDDWQPPLPDINDPIEHPTVDRVLTVVRRFAMACNAKWGIPESITVEHVRNAFIGSSALAGLKYDVAQRTLKNDQIREELGASSSGRIRKADLRRYKQIQRQNSQCLYCGTTLIFESCQLDHIVPQADGGSNKEENLVAVCTHCNKSKAALPFFTWANSGVKPDVSLEGSVTRLKTWDRGKQSKTQWSRFLKNVEARLLLTSEDDSLDERSLSSTAYAALEVRNRLTSLYVNTLSLPLVKCPEIRVYSGAINSIARRSSGIDDFLQLRGKTEKNRLDRRHHAIDAAILTTINDSVAVTLAKKNWIKRSEESTGGKTTRWKEYDGSSPQYVQNYHHWKTTCASLADEVKRSIDSDKIAVVRPLRIGPSSGEGAVHDDTLRPLEVVDANQGLTSEQVRRLSHPTLLNKVWDQLESDMSLTPENAVRVLGEKVKLFSGTAAQIAVRGGSCQIGNSVHHARIYAFRKKDGFNFGWIRVFAGEFPHIGFSKDGVDVLRQPIPYGSQAMLKANPTLLKLIQSGEAKEIGWITRNDEVEFDFSEKALIPGESDDGILSSFMRIYPEKRWIITGLGSAVELKISPSILSSEGLTKEHPELATSIISRRSYVRPSVNQFLLWPNLKIIRRSILGVPRWNDRGLPYSWEPLKVAQEIFGD

SEQ ID NO: 17687 - protein, 1111 aa, unidentified
  REGION 1..1111: note = Cas Enzyme sequence
MTPLSQLPRYRIGIDVGENSVGLAAISYDDDDHVIEILSALSYIHDGGKLSGTDKAPLSRLAGAGVARRTRRLRRRARSRLKKLNLYLAEQSFPPELDSQTYEVWHARYQLIHGFIENEVERNSKLALAIRHIARHRGWRNPWWTFLQVQRAAEEKSPSTSLLKMWENVATKYKFPDDEICSVGVLGFLGVTQGNPNRRLRHSTAEDRKSRENVFFDRVMAEDNFSELSAILVEQKVDSQVSTQILKLVFEQKMPHVPKDRVGDDSLDPSQKRSTRAGLEFQRVRMLNAISNLRIVDAGTNRPLSPEEFEETLTFLTNWKDKSTKPNQSDVAHLLGLNPAKVKFPTWDENQGSIAFFDQTSLEIVNKFSEKDPLGAWWRRANFIEKSDFVDFVTDNSEESHEDDASYLHLLEEESTAEALGGLTLTSGRAAYSRKTYQRILLVMEEQHCSERDAILQVFQIKDDWQPPLPDINDPIEHPTVDRVLTVVRRFAMACNAKWGIPESITVEHVRNAFIGSSALAGLKYDVAQRTLKNDQIREELGASSSGRIRKADLRRYKQIQRQNSQCLYCGTTLIFESCQLDHIVPQADGGSNKEENLVAVCTHCNKSKAALPFFTWANSGVKPDVSLEGSVTRLKTWDRGKQSKTQWSRFLKNVEARLLLTSEDDSLDERSLSSTAYAALEVRNRLTSLYVNTLSLPLVKCPEIRVYSGAINSIARRSSGIDDFLQLRGKTEKNRLDRRHHAIDAAILTTINDSVAVTLAKKNWIKRSEESTGGKTTRWKEYDGSSPQYVQNYHHWKTTCASLADEVKRSIDSDKIAVVRPLRIGPSSGEGAVHDDTVRPLEVVDANKGLTSEQVRRLSHPTLLNKVWDQLESDMSLTPENAVRVLGEKVKLFSGTAAQIAVRGGSCQIGNSVHHARIYAFRKKDGFNFGWIRVFAGEFPHIGFSKDGVDVLRQPIPYGSQAMLKANPTLLKLIQSGEAKEIGWITRNDEVEFDFSEKALIPGESDDGILSSFMRIYPEKRWIITGLGSAVELKISPSILSSEGLTKEHPELATSIISRRSYVRPSVNQFLLWPNLKIIRRSILGVPRWNDRGLPYSWEPLKVAQEIFGD

SEQ ID NO: 17688 - protein, 1397 aa, unidentified
  REGION 1..1397: note = Cas Enzyme sequence
MARKLKNINGPWYAGIDLDGTSVGFVATDEYGEVLYHKGQPVMGARCFKEALHASEARMPRTVRRRLQRARGREREMERMFAPAIAPTDPDFFVRRRMSYKLMRDDIAADPAAAAWQGLLDGYPTLAHLDVDLMESDTPRDPRLIFWAVANHVVRRGHFLMEGHDVTSANSDPSAQVETLVRELDALGEACGEDIEFDDGALADMGGSWTAREFQKAVSGAVSVTGDDIDAKIARAQAKALGDLVAGYKANMDAFALEGEQIGKVSVSDADALDEFLANCPDRLAPTIEAARGLYSAWRLQGLLSFAPGKTLSHNQVAQYEVYGRQLRTLKDLALKYIVRADSADGPDEDGLALYRDFFGGPKRSGRRGYDKILVKKHDGAKRNMGYTAYDLNLIPYEEFKKRVERLFKGTDAVKDPAYADMVAALGEHRFLRRIHTTDNSAIPYQLHAEVVGRIIDKQGSFYPWLKDAGPHILKVLTSRIPYYVGPLDSSAAPVDAHGKARFAWSRRLPGHERAFVAPWNYEEHIDTDAAAEAFIRRMTGKCTYLVDEDVLPANSLIYERFRFLNELAGIRYTEDGQDWLPLDAAMRAAVVEAASDGSVMTLNRIENILSRDFTMAHPHVKGVSDAKRMTSRLSVSAWMANLLGVKTLTAAQKSMAEDLILWNTVFEERSILKRKIAKEYGDVLDEDAIDAFCAKRLKGWGQLSERLLTGVWADTARGDMCIMDVLEQGAPYGRFRGTSMNLMQALSDTELGFRAKIEEIHAAALEKAGELGIDALPGSPALRRGVSQAMKVIEDMTSVAGCAPAKVYVEVTRTASNKLKGRRSQSRAQEIEAALKALDEDARRDLDAARLLRELGMFDEKEINERLYLYFKQAGKSLYSGRPIDIARIASADYCVDRILPRSVRKDESLDNKVLVLYAESLDKKESILVPQPVQRKMAPFWMHLRRVGLMTERKLNALMRTQISERMLKSIVGRQLTETSQECKLIAAVLEATYAGVKVVPVKAGVASSVRRRAGIPRSRKANRYYHAHDALIALTTGRFIETRAPMWSNNRAFYERTMRDIEAQERRGGADSELDFFSGGFFRDLVDYDTAEVLWDSDFERERLVRACSWKNLRVTFAPYEEGGAFWKQTVYSPRDSKTKLIPVKGDRDAALFGGYSAQTFAYFMIYESEGKKGNLFRFAPVPTSIASKATDSLTELYARSLCRESGERFIRVVRDRILKETVYEAYGERFRIKGQKTAGPVRQLALDTSDTRLLRIVERMVDGEQPSPRRDLESDAQVLCRLWARLLELAPANFPRVSKVLKLGALKTPEEVFSDAEADDIAKTVRAVAESEVQVVELLSGIRGTADVRSLGGSAFAGTLSMTFDKIINDPKAGFAIVDISAAGLHERVSTLG

SEQ ID NO: 17689 - protein, 1397 aa, unidentified
  REGION 1..1397: note = Cas Enzyme sequence
MARKLKNINGPWYAGIDLDGTSVGFVATDEYGEVLYHKGQPVMGARCFKEALHASEARMPRTARRRLQRARGREREMERMFAPAIAPTDPDFFVRRRMSYKLMRDDIAADPAAAAWQGLLDGYPTLAHLDVDLMESDTPRDPRLIFWAVANHVVRRGHFLMEGHDVTSANSDPSAQVETLVRELDALGEACGEDIEFDDGALADMGGSWTAREFQKAVSGAVSVTGDDIDAKIARAQAKALGDLVAGYKANMDAFALEGEQIGKVSVSDADALDEFLANCPDRLAPTIEAARGLYSAWRLQGLLSFAPGKTLSHNQVAQYEVYGRQLRTLKDLALKYIVRADSADGPDEDGLALYRDFFGGPKRSGRRGYDKILVKKHDGAKRNMGYTAYDLNLIPYEEFKKRVERLFKGTDAVKDPAYADMVAALGEHRFLRRIHTTDNSAIPYQLHAEVVGRIIDKQGSFYPWLKDAGPHILKVLTSRIPYYVGPLDSSAAPVDAHGKARFAWSRRLPGHERAFVAPWNYEEHIDTDAAAEAFIRRMTGKCTYLVDEDVLPANSLIYERFRFLNELAGIRYTEDGQDWLPLDAAMRAAVVEAASDGSVMTLNRIENILSRDFTMAHPHVKGVSDAKRMTSRLSVSAWMANLLGVKTLTAAQKSMAEDLILWNTVFEERSILKRKIAKEYGDVLDEDAIDAFCAKRLKGWGQLSERLLTGVWADTARGDMCIMDVLEQGAPYGRFRGTSMNLMQALSDTELGFRAKIEEIHAAALEKAGELGIDALPGSPALRRGVSQAMKVIEDMTSVAGCAPAKVYVEVTRTASNKLKGRRSQSRAQEIEAALKALDEDARRDLDAARLLRELGMFDEKEINERLYLYFKQAGKSLYSGRPIDIARIASADYCVDRILPRSVRKDESLDNKVLVLYAESLDKKESILVPQPVQRKMAPFWMHLRRVGLMTERKLNALMRTQISERMLKSIVGRQLTETSQECKLIAAVLEATYAGVKVVPVKAGVASSVRRRAGIPRSRKANRYYHAHDALIALTTGRFIETRAPMWSNNRAFYERTMRDIEAQERRGGADSELDFFSGGFFRDLVDYDTAEVLWDSDFERERLVRACSWKNLRVTFAPYEEGGAFWKQTVYSPRDSKTKLIPVKGDRDAALFGGYSAQTFAYFMIYESEGKKGNLFRFAPVPTSIASKATDSLTELYARSLCRESGERFIRVVRDRILKETVYEAYGERFRIKGQKTAGPVRQLALDTSDTRLLRIVERMVDGEQPSPRRDLESDAQVLCRLWARLLELAPANFPRVSKVLKLGALKTPEEVFSDAEADDIAKTVRAVAESEVQVVELLSGIRGTADVRSLGGSAFAGTLSMTFDKIINDPKAGFAIVDISAAGLHERVSTLG

SEQ ID NO: 17690 - protein, 1397 aa, unidentified
  REGION 1..1397: note = Cas Enzyme sequence
MARKLKNINGPWYAGIDLDGTSVGFVATDEYGEVLYHKGQPVMGARCFKEALHASEARMPRTARRRLQRARGREREMERMFAPAIAPTDPDFFVRRRMSYKLMRDDIAADPAAAAWQGLLDGYPTLAHLDVDLMESDTPRDPRLIFWAVANHVVRRGHFLMEGHDVTSANSDPSAQVENLVRELDALGEACGEDIEFDDGALADMGGSWTAREFQKAVSGAVSVTGDDIDAKIARSQAKALGDLVAGYKANMDAFALEGEQIGKVSVSDADALDEFLANCPDRLAPTIEAARGLYSAWRLQGLLSFAPGKTLSHNQVAQYEVYGRQLRTLKDLALKYIVRADSVDGPDEDGLAHYRDFFGGPKRSGRRGYDKVIVKKLDGAKRNMGYTAYDLNVIPYEEFKKRVERLFKGTDAVKDPAYADMVAALGEHRFLRRIHTTDNSAIPYQLHAEVVGRIIDKQGSFYPWLKDAGPHILKVLTSRIPYYVGPLDSSAAPVDAHGKARFAWSRRLPGHERAFVAPWNYEEHIDTDAAAEAFIRRMTGKCTYLVDEDVLPANSLIYERFRFLNELAGIRYTEDGQDWLPLDAAMRAAVVEAASDGSVMTLNRIENILSRDFTMAHPHVKGVSDAKRMTSRLSVSAWMANLLGVKTLTAAQKSMAEDLILWNTVFEERSILKRKIAKEYGDVLDEDAIDAFCAKRLKGWGQLSERLLTGVWADTARGDMCIMDVLEQGAPYGRFRGASMNLMQALSDTELGFRAKIDEINAAALEKAGELGIDALPGSPALRRGVSQAMKVIEDMTSVAGCAPAKVYVEVTRTASNKLKGRRSQSRAQEIEAALKALDEDARRDLDAARLLRELGMFDEKEINERLYLYFKQAGKSLYSGRPIDIARIASADYCVDRILPRSVRKDESLDNKVLVLYAESLDKKESILVPQPVQRKMAPFWMHLRRVGLMTERKLNALMRTQISERMLKSIVGRQLTETSQECKLIAAVLEATYAGVKVVPVKAGVASSVRRRAGIPRSRKANRYYHAHDALIALTTGRFIETRAPMWSNNRAFYERTMRDIEAQERRGGADSELDFFSGGFFRDLVDYDTAEVLWDSDFERERLVRACSWKNLRVTFAPYEEGVAFWKQTVYSPRDSKTKLIPVKGDRDAALFGGYSAQTFAYFMIYESEGKKGNLFRFAPVPTSIASKATDSLTELYARSLCRESGERFIRVVRDRILKETVYEAYGERFRIKGQKTAGPVRQLALDTSDTRLLRIVERMVDGEQPSPRRDLESDAQVLCRLWARLLELAPANFPRVSKVLKLGALKTPEEVFSDAEADDIAKTVRAVAESEVQVVELLSGIRGTADVRSLGGSAFAGTLSMTFDKIINDPKAGFAIVDISAAGLHERVSTLG

SEQ ID NO: 17691 - protein, 951 aa, unidentified
  REGION 1..951: note = Cas Enzyme sequence
VNKQYSLGIDFGSNHIGLALVCQTDDANHPQFAGTLHYSPAQLKKKLGPRPQLRRMRRTRKSKRSRLKKLTNRLRSIGLDESQINKLVVFCRRRGWKSLFGESEIEDKQDSEEIVFRYSREDFFLALEKEITSLIPLDRQTKTLSVCEKVLNRHGNTHDEMRQLRIDNRGVSRCAWKGCHLITPRRHNAIKEALAQFVYLIIDIDQVKNDNTLKENIDAGLERLEELGKRLRSANIANHPPERHDAIKTERKVLLKKIRAELVPIKDLANSDTWKTNRANIMNIIEKSRGRNRYCRHHSGEFVKYQIAGKPIPFKNTLLDRDLISRLEQVLFQRIWRYIEGRILPLADAPINRLVVERVAIDLLAGSWKQIQKTSATAREDMYQSGPKKGFDSTLAMLKEEFNGLCAYCGKKHTNILEREHILPKREFVFDSYLNLVPSCPDCNRKLKGGRSLTAARLTIHPDAYDEYQKYLSKKFRNKPLHHLHAIKKGILNLMKDKKRTWEAERYLALVAMNFSETTGTQRGPRPLARYLSEKLKLKFGAPPKIDFIAGRHTALWRQVAFPGFDKAEDKTKDNSINHALDAMILACKLPKPNLLEGANLPLRLFKSWVEGVKRAAPVPGENGIPTIPATEFAVPGFEDVYPGNYISVDMAKFNWNSRESSVQRQGIYGWNNHVDMPTMRSAASACAAEFIEADKTKSTSGRQVKINKVIDNILHPHLKAALIEARDKDKTRDACANALTEWIRKTIKGSLKTASFSKHPADQSRKQLLQDFADGKINAIPETIGIKMLRPSHTNAIDLLRMNSRGHVIHRYWSDPAVIAKIAAYPKNGDRVDRSKLIDFDWRQNWAVIPIKKRIPLPEEVILMGRAFGQPLPDEKAWLEGLERYLSKIGVKEYAFIQKGCVAVYENGTQFYVRNFSSTQGFKTSLLKGIVGIKRTPFVDNITFNRVIDI

SEQ ID NO: 17692 - protein, 1043 aa, unidentified
  REGION 1..1043: note = Cas Enzyme sequence
MRRLGLDIGTNSIGWCLIEDDARIIDIGVRIFSDGRDPQSGTSLAVDRREARSARRRRDRYIGRRSAFLDALIAHHLMPADADEAKLIAALDPYVLRAKALDEKLEPHEIGRALFHLNQRRGFKSNRKAERKSGEEDGKIASGARALDMAMAEDGADTLGQFLARRDVKRVRMGGENQDYDFYPQRRHVEWEFQRIWKEQAKHHPALLTETARAALHRILFFQRPLKEQAVGLCTFVSSERRLAKAHPLFQQRRLYEEVNQLEVTTPGEANRKLTLDERDDLIRELRGKRKVSYATLGRRLKLAPGQSFNKASETRTEMLGDEVRAALGDKKRFGDAWAHFDSDRQWTIVERLLEEEDPDALHAFLTGDCGLDDDHAKATAKAALPEGYGRLGPTATARILDELKKEVITYDEAVRRCGWHHSDHRTGEILPQLPYYGELLSREIPPGTQDPNDPIEKRWGKITNPTVHIGLRQLEKLVNAIIAVHGRPDEIVVELARELKLNEKDKEEHNKRIRRDTAAAIKRSEKLTQEGFIDSGANRMLLRLWEDLNPANPLDRRCPYCGDPIGMRALFSGEADVDHIIPYSRSLDDSAGNKVVAHRNCNRIKGNRTPYEKWGQDADRWDIISAQAARLHKSKQWRFGPDAMAKVEKDGGFLARQLTDTQYLSRLAGSYLGSLYATKDEGSVYVIPGRMTAMLRRLWGLNDILFDHNIVDNKHSNAPKNRLDHRHHAIDAAVIAVSTRSLMQRIARTAGLSEDKNLDRLFEGLDQPWPGFREELRERLLATTVSHKADHGRKGKPAPGKDATAGRLHNDTAYGLTGETSPKGLPIVVHRVPLASLKPADIADPDRIPDAPLRAALDAATAGKTGKDFEAAIARFAKTDPQFAGIRRIRVREPLSVIPIRDKAGRVYKAYAGSSNARYNVWRMPDGSWKHEVVSMFDAHQQGHTDNRPHPAAKKILCLRQNDLIAVERNGAPREIMRVIKFTLSGQMAIVSHNETGKLADRHKDPDDSLVIFNPTAGGLKKIKARQIRIDPLGRIFDPGPR

SEQ ID NO: 17693 - protein, 1049 aa, unidentified
  REGION 1..1049: note = Cas Enzyme sequence
MRRLGLDIGTNSIGWCLVEDDARIVDIGARIFSDGRDPQSGTSLAVDRREARGARRRRDRFIGRRTAFMDALVGHGLMPADADEARLLADLDPYGLRARALDQPLEPYQIGRALFHLNQRRGFKSNRKAERKTKDQEDGKIATAARELDMAMAAEGADTLGQFLDRREIKRVRMNSEAQAYDFYPQRRHYEWEFQRIWEEQARHHPALLTETARAALQRILFFQRPLKEQPVGKCTFVPSEDRLPRAHPLFQERRLYEEVNHLEVTTPGAANRKLTIDERDLLVRVLREKRKVTFSSLARSLKLQPGQSFNKASETRTELAGDEVYAVMKDAKRFGDRWAHFTREEQWTILERLIEEENPDTLHAVLTDEWGLDEDHAAATAKAPLPELYGRLGATATARILDELKKAVITYDVAVKRCGWHHSDDRTGEILPQLPYYGELLAREIPPGTQLPTDPPEKRWGKITNPTVHIGLRQLEKLVNAIIRVHGRPEEIVVELARELKLNEKDKEEHNKRIRRDTAAAQARSRKLTEEGFADTGANRMLLRMWEELNPANPLDRRCPYCGEPIGMRLLFDAQGGADVDHIIPYSRSLDDSAGNKVVAHRACNRAKGNRTPHEKWGGDDDRWDTITAQVARLDKRKQWRFGPDAIARVGKDGGFLARQLADTQYLSRLAGRYLASLYPTKDDGSVYVIPGRMTAMLRRLWGLNSLLPDHNIVDNKHSDAPKNRLDHRHHAIDAAVVAVTTRSRLQHIARTAGLAEDKNLDRLFEGLDQPWDGFREELGERLSAVTVSHKPDHGRRGKPAPGKDVTAGRLHNDTAYGFTGDFAADGKTPIVVHRVPLTSLKPADMTNPDRIPDPVLRDALHAATDGLSGKEYDKALARFANEHPLFKGIRRIRVCEPLNVIPIRNKAGRIYKGYKGDANARFDVWRLPTGKWVSDIVSMFDAHQPGASDRRPHPAAKKVLSLRQNDMLAIERDGGPREIVRVVKFSGNGQIALARDNEAGALKARDATTNDVDPFKYVLSSGGGLKKLKARQVRIDPLGRILDPGPR

SEQ ID NO: 17694 - protein, 1081 aa, unidentified
  REGION 1..1081: note = Cas Enzyme sequence
AAGGANRETKKRLVALDRLLSEEFGWPLPNLEEYPDPYEPWHVRARLLDGYIADDAKRKEMLSIAMRHIARHRGWRNPYMKPASLASLPYPSEFLTNLNQDVSRVIGRKFASDATQGQLVDAFILGSLSLAATPELQVLEESEKDSSKNKPRDIVLSRVRGDKGVIEGKLHQSDNAEEIRRICATQKISQEQVHRLIEAVFKAKDPRKVGAKLVGHDELPGQEKYIRAERAHPAFQKFNIVATLTNLRINEAGSKRRLSSKELQMLTNYLSNVGPKDEVTWFDVAEKLKIDRSDLQGTARASYDGQAALKYPPRDLTSVSINKSKVKALKDWWKHASEDQRGQLIDYLSNSDRLDTPKTDDELDDLTKLTQSFSEKDLEELEKISLPTGRAAYSVNSLTRLTNLMLEEGIDLHEARKRLFNIGNDWKPAPEPINSPVGNPAVDRVLKQVARWIDAATERWGIPASVNVEHVREGLVSEKVVRELIRDNEARHKKNMEVAEATAKRLGLSGRVHRNHTVKYFALRRQNCQCLYCGTPISFETAEMDHIVPRTNGGSNNKRSNLAAVCRTCNASKSNIPFAVWVSSGEAGPRVSLEGTKERVKSLLLTKTDLQKEDDSLVEIYSKKEGEKFKKEIIARLESKKPEEEFDGRSLESVAWMAVELRGRIVGYYENLLKDAGQKAPQVGVYRGAITAEARKASGFENRVELLGGKGKTRLDRRHHAMDALVIALMNQSVSKLLSWRMQLRDSQRISEKPETWKEFHGFNRDDYRHWEAWIKAMRIAVELFNDALEKDDVHFSENKRLGISLAKAHDDTIKSLCSYALGDALSAELIDRAETPALWTALTKQPDFDVKNGLPEDPTRCITVNGKQFGPTDEVNFFASGAPAIKVRGGFAGIGDTIHHARIYRIDGKKTTYAMVRVFQTDLRRMKHKDLFTEPLKPSTISMRTASKTIRKALADGTATQIGWLVEGDEIRIETKWYSSGKVENKSIPELLAEYPEASSWRVCSFPEPATIRLRPNLISKEGFETDVSEYVVKIVSGKGWWVSPNILLGNGPVTVIRRNALGEERWASRAHLPVSVDLS

SEQ ID NO: 17695 - protein, 1184 aa, unidentified
  REGION 1..1184: note = Cas Enzyme sequence
MDTFRERYILGLDLGSASLGWAVVGLNDQLEPYKLLAAGAHIYDPGVEVPPTIKIARDEAILQGQDRSKAVGRRIARQMRRQNHRKNARQKALFRLLQETNLLPSYPEFAGEVLEAERHHTFNRLDKELADALCNERRRRGVDGVMLEADQALMYVLRKEALERELTLQELGRALFHLSQRRGYRPSASGDSVEEEAAAPEEQSKAKRVSKKKSAEDDSGEKDKENSKTVEAEIARLSEKMQAAKTPTYGAYFANFANNNPHIERIRHRWTSREMYRKEFDLIWQKQSEFYRESHPDLLTDELKEKIANCLFFQRPLASTEHLIGKCDLEPAEPRAPWASLEAQRFRLLQKVNDLAWFLPRTMQEEPLTPEQRVLLANELQNRGDLTFEKVCELLNLPPKTEFNLERGKKKKIEGNRIVPIMQRVFRDRWNDFSTAEQENAVELWRTPEGMEERIKKAIEQLNLDQFFAQIWAEKRPPREYCRHSRKALARLLELMETGVPYATARKALYGNPFAGKEPLPLIPQIKDAVPSITNPAVMRALNELRKVVNAIIRKYGKPYQIRIELARELRKNRKQRHDTTEANEKNHERRVQAAIRILKECQKYGYDAQGRDAEGLVRERRDDVTKMLLHMECGGICPYKGGDPISYGQLFGGEVEVEHIIPQSLMVDNSFGNLTLTFRKTNLEKLGRTPWEAFGGDGKDDQWAQIIDRVKKFNNREKLGRFQQRTPAEALAFADRRLNDTRYTSKLAGRLLMSLYGGRDVAPAETQDEMEEFKDRTGRRAIFVSSGMVTALLRDAWCLNLSDVVGEEAYKCLEAEVKDGDARQKRRNEPKKKDRCDHRHHALDAVVIALTSEGMIRRINTQAANYYSRQKLAAQPQPLTYRELMKLVRREDWPECLNEDLRTIFQKMVASRKPEHKLSGALHDATFYGKERPSKDGSMKRHQRIAISNALTDVQIENICDEGIKRAVKELGDAIGGYKKWSVEKHDWPKIPNLSTGEFVPIRKVRINITKNSRPLDTGKRWKAFGQGRPERNVEEGEIAYASFFNVQDRRGTKWVSEIVKLFEATQRVRALPKAERGKQRISERHSKFPDAVFRFSLMKGDLVELLHEGKVGVFVIRSFEADNRIKVAPINAASRDDDLKKAGHLLRLGFTEFLSMGAGEDKVPRPVTIDLLGQAHYIKLRA

SEQ ID NO: 17696 - protein, 911 aa, unidentified
  REGION 1..911: note = Cas Enzyme sequence
VGRALLHIAQRRGFRSGRIEEAQSAEKADEKKKKELGQVKGKIAELPEEFKRAGASTIGEYWSKLDPNKKRIRGWGNWSSRQMHLEEFERVWERQAPCHPNEMTPAAYRMVKRRIFFQRPLKSQAGLIGSCELEPGHRRAPLAHLLYQRFRILQTVGDLRVVSSNRLARPLTLEERAKALALLSSEQTVTFASLKKALALRGERFSHEAAERKSVPGNRTGCKLRNVFGAQWDSLSESDRNEIAGCVRSMDDKDALCRLAQRRWGLDSERAGLLADVVLEQGYGALSLAALRKLVPLMEQGLGYTEALERAYPDRLKRPVKDSLPPVDLRAIRNPAVIRSLTELRKVVNAIIHDYGRPERVQIELAREMKKTAETRKKIWEENEKRRKLREQATATIFKECGLGKPSREDVDKAVLYEECHHEDPYTGASIGFCDLFGSEAKWEIEHIIPYSRCLDDSLGNKTLCDRETNRRKGNRTPFEAFGGTPEWEAMLERVKKFGDVRKRARFATEEGVEELFRQYTERQLNDTKYASRLAAEYLGLLYGGTCDELSNKRVYTVSGGVTAQIRRGWRLHSILRDGPSQSEDKKPRDDHRHHAIDALVVALTSESAVQALSRASEQARLDHRRGFRVDDPWAGFLDDVRHVVGAIKVSHRTNHRLRGALHAESIYSPERSGQGGERRHRIRKPLSSLSEAEVKEIVDNEVRGAVEEKLQEVGQRDPRKAFKNGTNLPALKNRHGEPVPIRRVRIYISESTTRVGSGATERQVVTAENHHLAIYQGADRNGAPRWTGQVVSRLEATLRKNAREEVIAPTDERAALVMALYKGDIVEMAVPGSEDGERDLFVVRGFSVGGSGEPEITATRHNLAGEIKDLKKRGEWIRVRAGKNFRRLDPRIVLLDPLGRRVGDDGQPNS

SEQ ID NO: 17697 - protein, 1047 aa, unidentified
  REGION 1..1047: note = Cas Enzyme sequence
MGDCQRVLGIDLGIASCGWGVIEVRDKAGSIFAKDGKPAVGVRCFDAPLVYKTGEPKDAQRRSARGQRRVIRRRRQRMNAIRDLLHRNGILSDAKDEVLALALRRISRPGHKPQVTPWALRAVAHDCLLTDDEFAVVLGHIARHRGFRSNSKRKATSNAAEETSKMKKAMEETRDGLAKYRSFGEMLASDPKFSDRKRNRDKDYSHTAKRSDLEDEVRKIFQAQRCFGNAHATEELERQFRDKAFSQRPLRDSEDKVGNCPFEPDHHKRTAKRAPSFELFRFLQRLVNLRVAVGRAERSLRPEEIGLLLKKFGEQKSYTYKALCKDLDLDPNAGFSAIARNSEWLDIAARKGQSAFGTCVLREVLGAGPWHSLLKTPEKLDRIAEILTFREDLTSIRKGLVEIGLDGPVIDRLMQAASEGAFTEFKGAAHISSLAARNIIIGMREGLVYSEACARAGYDHSARRAVSVDQIGNRITALSEAIKQVRAVAREYGPFDAIHIELARDVGKSAEERAEITRGIEERNVEKDRLKTEAADLLKRAISDDELLRYQLAKEQDFKCVYCDSQLAPTGFAANNTGWQTDHILPWSRFGDNSYLNKTLCCTRCNQHKKGRTPFEWFCEMTETEWDTFLARLENLKEMKGLKKRNFNLRDAAGVEDKFKKRNLTDTRWVTRLLANELKRMFPAPDGKRRIYTRPGAITSKLRRAWGLEGAKKENGERVDDDRHHAVDALVLAATTESLLLRVTKDIQRREDQGRSDDILHVQQPWQDFRRDVTQVVYGEKGIGGVFVSRAERRRARGEAHDATIKQIRQVNGEKIVFERRPIEKLTEKDLKRIPMPEPYGKMANPRELRDQMVEALRVWIAAGKPKAADKLPRSSKGDIIRKVRVASKDKVAIELHGGTVGRGDMARVDVFRKAGKKGKWEYYVVPIYPHQIATMDTPPNRAVKGGGSNETEWYVLDGSAKYLWSLYSNSFVKIAKSDGDVIEGYFRSLDRNTGAITISPHMNAAEICKGIGVKTLSSFNKFTVDRLGCKFKVRRELRTWRGKACT

SEQ ID NO: 17698 - protein, 1047 aa, unidentified; identical to SEQ ID NO: 17679
  REGION 1..1047: note = Cas Enzyme sequence

SEQ ID NO: 17699 - protein, 1350 aa, unidentified
  REGION 1..1350: note = Cas Enzyme sequence
MDNKYVLGLDIGITSIGWSIIDEVKGKLLDMGVHMFEQAIPAQEVRLNRSARRTLRRRNWRKKQLKNAFVEFGLISKDEINQRDYLSYTANSDTFSRPEEDTVYHLRLKALNDKVSLRELLLCLYNICGTRGHFLMENINFASSEPITFDFFVEQFYEFTHAYVNFTENTKEFEKTILKPIFEKGKVKSNELKSLLKDEYTVEAEDNDALLEILKLICGFKCDLKKISESVVLVQEDKTKESVKLDELLKMDSLNEFLNNAVELHDVIAVSQILKDHNYICEVAVEKLNEVLKIQKLEHSDPDKYKEEKNNIQKKMSKAIGDRLRVVKNMENKYPNGLYVKEASDILHKQQEFYPDLITDNFIEACISTIKARIPYYIGPLSSQAKNSWINRKDGTFKYGYEYCKDALVNEEESIQNWKLNMISHCTYLPEEYALPKGSFIAETFSLLNELNILTAIDKDENRYYLTREDKLKVFDELFLKRTDYVSHKEVAELLNLKSFGPKDSRKEGKFKNRYTLYQNIISVFPQFELHSILDLFNENEKEKVDKIEDIILNLNLFDEEQSKINYFTKKLNLDEKDAKKLARCKSNGFYAFSKQFIMETKMNVDGETLLEEMLRDNSENQKNEQMTLITEATDLDGNRINFDSNKYMTLLKDTKKLSIDLLIQDGKPFIPIARPVIRALNECFKLYEEVVNTYGVPDRVVIETARDLKDSAHDGNEPAKHFDQMKNLYDYLTKQMKEQKDNAKISKQYLEDWDVIEPYLEKNKRKVELYIRQNGRDMVTGDEIDIQKLEDYEMDHILPRGFGDNSMDNLMLIKKEINGKKADRLPLEYIEAETVTNKAGKRIISSDFKRRCYELNGMKLISDKKLKRLLLASTDEAMGFINRNLVDTRYIIRELMAILRAYNTVNNYDTHIVSLRSSFTTVYRNAFNMKKNRDIGDQHHAHDASIVAIADMVLSTYYPNYDERGNNKYYQEFLKRMMESQGPDSDKSENQKLYGFIKYAYFKRFGNYPNDNDSLVSQVRATVPLYSVKAEKNYKGAFFDATIYPQKDKKKNVAREKGVLGLLGVNNDKRIYSSINCVAVDFYKYTDKKGKKVHVGIHIPKVIVNNNGEINKEQYVKLIRDYYKVPELLDENGNVKECYFRMRVFKNDLIYDTNNYTIQKFNIGSIVNKKLEMKHLYVFSYDEIYKQVIFYKKELATQFDFKMAKINPDGKKKFSDYKITEIIGCCLDNLMDIRDMNRYKGTVEKILKDKTNYQEFLETMAYLDLIVNRNCTPPSIIEQYKPVAGSIDDKTDKENKAQYVKIKSSILGIRYTYNENGKLLISGPRKAPGKYSKIKKEKFSWKICSDVLQ

SEQ ID NO: 17700 - protein, 1007 aa, unidentified
  REGION 1..1007: note = Cas Enzyme sequence
VTKLRYRLALDLGTTSLGWAMVRLNAENEPCAVIKAGVRIFSDGRNPKDGASLAVSRRNARAMRRRRGRLLKRKSRMMATLVRHGFFPKDEVARKALERTDPFALRAKGLDEALLPEQFARALFHINQRRGFKSNRKTDKKEDDSSKLEAAISQLRQAMQATGCRSVGEWLYARHQKGLPVRARYRENRIVKDDGKTKIEKSYDLYIDRAMIEAEFDALWAKQSEFNPALFHDTTRAELKDCLLFQRPLKPVKPGRCTLMPDEERAPLALPSQQRFRIYQEVNNLRLLREDLSEEPLTRQQRDLLAHALETHSKRSFLQIQQLLGISGQFNLQDEKRTELKGSSTSALLSKKEFFGPIWFTWNERQQDAIVMQLVTEENAARLISWLQAEANLDEITAERIANAPLAEGYGSLSAKALEKILPALRAEVITYDKAVLAAGFDHHSHISYAASGEILPELPYYGQHLQRHVGFGTGKLEDPDEKRYGKIANPTVHIGLNQVRIVVNALIKRYGHPSEVIVELARELRQSQEQRRDEQKQQADNQHRNMRMRKEIAQLLNISPERVRGIDLQKMILWEELSFNVADRRCPYSGVQISAQMLFSDQVEIEHILPFSQTLDDSLNNKTVATRQANRIKGKRTPAQAAADFETQGWSSTEMLQRASLMPKGKRYRFAQDGMAQWLRHDKGFLARALNDTRYLSRVAREYLSLICPQGTRVIPGRMTAMLRAKFGLNDILGLNGQKNRDDHRHHAVDACVIAVTDQGLLQRFANASASAREKQVNKLVETMPLPWDSYRAHVQRAISSIWVSHKPDHGHEGAMFDATIYSATGESKSAAKTRNVIPFGNKGLLPNSNYCIEIFKTETGRWAGEVLSTYDAYQLMRNFTSVDEGIKHLRRRQMTASGRPLLMRLMINDYIRAEVDGNLLLLQVLKINSSGSITFIRPNETNINARYTAQLAAQKAKKVGGAHDDWALNDLFFQRAFSAASLQASKARQVTVSPIGQLRDPGYSD

SEQ ID NO: 17701 - protein, 1041 aa, unidentified; identical to SEQ ID NO: 15401
  REGION 1..1041: note = Cas Enzyme sequence

SEQ ID NO: 17702 - protein, 1011 aa, unidentified
  REGION 1..1011: note = Cas Enzyme sequence
MGSKAMETVLGIDLGTESLGWALVQPDRILAAGVRVFDAGVDDLEADGKGISRNAARREARLARRRLRRLTQRLSQLADLLASSGLLPNGNYRDSVERHQLFLSMDKGLPSPYELRARALSERLEPYALGRALYHLAQRRGFMSNRKSKQSEDEAKGKVAEHLARLREEMQTEGAPTLGALLSRSALAAQRVRGQYLGRDMTAQEFDAIWESQKRFHADLLSDALRKRVHRAIFYQRPLASVKHLVGYCELEPNRRRAPMCLFSAQRFRLWQTINNIRLLDRETGELRALTDAERRMLADKLETQQSMSYGRIKTTLKLGKSVEINLERAKQEKIPGNKTNAKLREIFGAERWDTMPDSERRQVLEDWISITKEETLARRGVVKWRLSEEAARQFATLRLDEGYSAYSRPALDKLLPHLEAGCTLPDAKQKAGYSGDGSSDPWDSLPPLAESGLPALRNPVVQRSLTELRRVVNAIVAKYGKPDRIRIELARDVRQTPKQREETHKRQNKNRKAREKAAKWLEEQGYVPNGRNIEKYLLWEECGQQCPYTGKMISAADLFGDQPQFDIEHITPLPRSLDDSFMNKTLCDVRENRERKHNRTPFEAYSGTPRWDDILRRAAKLSYAKARRFRMNEAETARLLDAFTARQLNDTGWASRWAKKYLGLLYGGLNDDGIDAFGTRRVFASSGGVTAMLRHEWGLDSILGDGSGKSRDDHRHHTVDAIVVALTNDGRIKALADAARRGLEVGRRFAPLTSPWDTLRADVAKTLEAIVVSHRSSRRVRGPLHAATFYSPQGNGTVHIRKPLASLDAKKVSAIVDPAIRAAVAAKLAELGKDSPKDAFKDNENLPLDPAGRPIRHVRIEDKLTVYKIGDGHRVRWAETERNHHMAVYASIEDKTWKSEIVSLLEAHRRKRAGEPIIRTDFGPGTEFLFTLSGGELIELDNPDGKRTVYRIRTISDRLLFFRASDARPKKRIKEEDTLSGLTANADTLRKRRCRKVAVTPLGELKYVSD

SEQ ID NO: 17703 - protein, 1056 aa, unidentified
  REGION 1..1056: note = Cas Enzyme sequence
MQNKMHYRLALDLGSTSLGWAMIRLNADNQPCAVIKAGVRIFSDGRNPKDGSSLAVTRREARAMRRRRDRLLKRKARMMRTLIEYGFFPAEEVQRKALETLNPYVLRAKGLDEALTPAEFGRALFHINQRRGFKSNRKTDKKDHDSGALKTAINKLRETLNKENCRTVGEWLYKRDLSGKPVRARYHQDKEIKEDGKTRINKYYDLYIDRAMIENEFDELWKKQSELNAAMFTDKARDDLKDVLLHQRPLKPVKPGRCTLIPDEERAPLALPSTQRFRMYQEVNNLRILRDGLKEEPLALHQRDTLITALEESNKCTFTKIKKLLGVGGAVRFNFEDPKREELKGNTTSAILGKKEHFGPAWFKLDETKQDAIVMQLITEENEGKLVRWLQTEGGVDEQHADAIANVGLPEGYGSLSAKALARILPELRRGVVTYDKAVQAAGFEHHSKLTTNSEIHGVTTKIESVDQDTGEIKAFHIHKELPYYGEYLQRHVGFGSGKPEDQPEKRYGKIANPTVHIGLNQTRLVVNSLIRRYGHPSEVIVEVARDLKQSREQRKVEQERQAKNQKRNERLRKEAAEILKIGEERVSRDDIEKMILWIELNETDSVDRKCPYSGVPISAAMLLSNEVEIEHILPFYRTFDDSLNNKTVSMRQANRIKGNRTPWEARQNFEAQGWKFEDILARAGNMRKEKRYRFAEDGYQRWLKDDDGFLPRALNDTRHLSKVAREYLTLICPQATRVIPGRMTAMLRATFGLNDVLGLHGEKNRNDHRHHAVDACVIAVTDQGLLQRFAQASASAREKQLNRLVESMPLPWDSYREHVQRAVENIWVSHKPDHDYQDEMFDKTIYNADGFSRIAAKVRTVIPFNARQDSSSEQRHRDKDGQPKPYKGLLSNSNYCVEIVREGHIWEGEVIPTYKAYEFVREFKNQNRGCTEKHVFDALRNPARSLSGKPLVMRLSIDDTIRAEIDGITESLQVLKINSSGSITFIRINETNIPGRYNAKLAAQKLAAEGRAFDKGALNDAFFQKAVSANSLRELKARRVTISPIGELHDPGFKE

SEQ ID NO: 17704 - protein, 1104 aa, unidentified
  REGION 1..1104: note = Cas Enzyme sequence
MSRSLTFSFDIGYASIGWAVIASASHDDADPSVCGCGTVLFPKDDCQAFKRREYRRLRRNIRSRRVRIERIGRLLVQAQIITPEMKETSGHPAPFYLASEALKGHRTLAPIELWHVLRWYAHNRGYDNNASWSNSLSEDGGNGEDTERVKHAQDLMDKHGTATMAETICRELKLEEGKEDAPMEVSTPAYKNLNTAFPRLIVEKEVRRILELSAPLIPGLTAEIIELIAQHHPLTTEQRGVLLQYGIKLARRYRGSLLFGQLIPRFDNRIISRCPVTWAQVYEAELKKGNSEQSARERAEKLSKVPTANCPEFYEYRMARILCNIRADGEPLSAEIRRELMNQARQEGKLTKASLEKAISSRLGKETETNVSNYFTLHPDSEEALYLNPAVEVLQRSGIGQILSPSVYRIAANRLRRGKSVTPNYLLNLLKSRGESGEALEKKIEKESKKKEADYADTPLKPKYATGRAPYARTVLKKVVEEILDGEDPTRPARGEAHPDGELKAHDGCLYCLLDTDSSVNQHQKERRLDTMTNNHLVRHRMLILDRLLKDLIQDFADGQKDRISRVCVEVGKELTTFSAMDSKKIQRELTLRQKSHTDAVNRLKRKLPGKALSANLIRKCRIAMDMNWTCPFTGATYGDHELENLELEHIVPHSFRQSNALSSLVLTWPGVNRMKGQRTGYDFVEQEQENPVPDKPNLHICSLNNYRELVEKLDDKKGHEDDRRRKKKRKALLMVRGLSHKHQSQNHEAMKEIGMTEGMMTQSSHLMKLACKSIKTSLPDAHIDMIPGAVTAEVRKAWDVFGVFKELCPEAADPVNGRIIKEDLRSLTHLHHALDACVLGLISEIIPADRKNVLRRAIIKRRLDQKMKQDFLELRKKRYYKLREKDGQTGASLVDLPNGIKENIREKLMEQRVIQHVPADMGGALLKETMQRVLSVDGSGEDAMVSLSKKKDGKKEKNQVKASKLVGVFPEGPSKLKALKAAIEIDGNYGVALDPKPVVIRHIKVFKRIMALKEQNGGKPVRILKKGMLIHLTSSKDPKHAGVWRIVSIKDGKVGVKLDLQRAHCAAPTNKKNECNWREVDLISLLRKYQMKRYPTSYTGTPR

SEQ ID NO: 17705 - protein, 1397 aa, unidentified
  REGION 1..1397: note = Cas Enzyme sequence
MARKLKNINGPWFAGIDLDGTSVGFVATDEYGEVLYHKGQPVMGTRCFKEALHASEARMPRAARRRLQRARGREREMERVFAPAIAPTDPDFFVRRRMSYKLMRDDIAADPAAAAWQGLLDGYPTLAHLDVDLMESDGPRDPRLVFWAIANHVVRRGHFLMEGNDVTSDNSDPSAQVEALVRELDALGEACGEAIELDGGALGGMGGSWTARELQKAVSGAVSVTGDDIDAKIARAQAKALGDLVAGYKANMDAFALEGEQIGKISVSDADALDEFLANCPDRLAPTIEAARGLYSAWRLQGLLSFAPGKTLSHNQVAQYEVYGRQLRTLKDLALKYIAHADSEEGPDEDGLALYRDFFGGPKRSGRRGYDKVLVKKLDGAKRNMGYTAYDLNVIPYEEFKKRVERLFKGTDAAKDPAYIDMVAALGEHRFLRRIHTTDNSAIPYQLHAEVVARIIDAQGNFYPWLKDAGPHILKVLTSRIPYYVGPLDSSAAPLDAHGKARFAWSRRLPGHERAFVAPWNYEEHIDTDAAAEAFIRRMTGKCTYLVDEDVLPANSLIYERFRFLNELAGIRYTEDGQDWLPLDAAMRAAVVEAASDGSVMTLSRIANILSRDFTMAHPHVKGVSDAKRMTSRLSVSAWIAGLLGVKSLTAAQKSMAEDIILWNTVFEERSILKRKVAKEYGDILDEGAIEAFCAKRLKGWGQLSERLLTGVWVDTARGDMCIMDVLEQGAPYGKFRGTSMNLMQALSDTELGFRARIDEVNAAALEKAGELGIDALPGSPALRRGVSQAMKVIEDMASVAGCAPAKVYVEITRTASNKLKGKRSRSRAQEIEAALKALDEDARRDLDAARLLRELGMFDEKEINERLYLYFRQAGKSLYSGRPIDIARIASVDYCVDRILPRSVRRDESLDNKALVLYAESLDKKDSILVSQHVQRKMAPFWMYLRRAGLMTERKLNALMRTHISERMLKSIVGRQLTETSQECKLIAAVLEATYTGVKVVPVKAGVASSVRRRAGIPRSRKANRYYHAHDALIALTTGRFIETRAPMWSNNRAFYERIMRDIEAQERRGGADSELDFFSGGFFRNLVDYDTAEVLWDSDFERERLVRACSWKNLRVTFAPYEEGGAFWKQTVYSPRDSKTKLIPVKGDRDAALFGGYSAQTFAYFMIYETEGKKGNLFRFAPVPTSIASKATNSLTELYARSLCHESGERFVRVVRDRILKETVYEAYGERFRVKGLKTAGPVRQLALDAADMRLLRIVERMVDGEQPSPRRDLESDAKVLCRLWARLLALAPANFPRVSKVLKLGALKTPEEVFADTEADDLAKTVRAVAESEVQVVELLSGIRGTADVRPLGGSAFAGTLSMTFDKIINDPKAGFAIVDISASGLHERVSTLG

SEQ ID NO: 17706 - protein, 1394 aa, unidentified
  REGION 1..1394: note = Cas Enzyme sequence
MARKLKNINGPGIDLDGTSVGFVATDEYGEVLYHKGQPVMGTRCFKEALHASEARMPRTARRRLQRARGREREMERVFAPAIAPTDPDFFVRRRMSYKLMRDDIAADPAAAAWQGLLDGYPTLAHLDVDLMESDGPRDPRLVFWAIANHVVRRGHFLMEGNDATSANSDPSAQVEALVRELDALGEACGEAIELDGGALGGMGGSWTARELQKAVSGAVSVTGDDIDAKIARAQAKALGDLVAGYKANMDAFALEGEQIGKISVSDADALDEFLANCPDRLAPTIEAARGLYSAWRLQGLLSFAPGKTLSHNQVAQYEVYGRQLRTLKDLALKYIAHADSEEGPDEDGLALYRDFFGGPKRSGRRGYDKVLVKKLDGAKRNLGYTAYDLNVIPYEEFKKRVERLFKGTDAAKDPAYIDMVAALGEHRFLRRIHTTDNSAIPYQLHAEVVGRIIDAQGGFYPWLKDAGPHILKVLTSRIPYYVGPLDSSAAPVDAHGKARFSWSRRLPGHERAFVAPWNYEEHIDTDAAAEAFIRRMTGKCTYLVDEDVLPANSLIYERFRFLNELAGIRYTEDGQDWLPLDAAMRAAVVEAASDGSVMTLSRIAIILSRDFTMAHPHVKGVSDAKRMTSRLSVSAWIAGLLGVKSLTAAQKSMTEDIILWNTVFEERSILKRKVAREYGDILDEGAIEAFCAKRLKGWGQLSKRLLTGVWVDTARGDMCIMDVLEQGAPYGRFRGTSMNLMQALSDTELGFRTRIDEVNATALEKAGELGIEALPGSPALRRGVSQAMKVIEDMASVAGCAPAKVYVEVTRTASKQLKGKRSRSRVQEIEAALKALDEDARRDLDAARLLRELGMFDEKEINERLYLYFRQAGKSLYSGKPIDIARIASVDYCVDRILPRSVRRDESLDNKALVLYAESLDKKDSILVPQHVQRKMAPFWMHLRRAGLMTERKLNTLMRTQISERMLKSIVGRQLTETSQECKLIAAVLEATYTGVKVVPVKAGVASSVRRRAGIPRSRKANRYYHAHDALIALTTGRFIETRDPMWSNNRAFYERIMRDIEAQERRGGADSELDFFSGGFFRNLVDYDTAEVLWDSDFERERLVRACSWKNLRVTFAPYEEGGAFWKQTVYSPRDSKTKLIPVKGDRDAALFGGYSAQTFAYFMIYETEGKKGNLFRFAPVPTSIASKATDSLTELYARSLCRESGERFVRVVRDRILKETVYEAYGERFRVKGLKTAGPVRQLALDAADTRLLRIVERMVDGEQPSPRRDLESDAKVLCRLWARLLALAPANFPRVSKVLKLGALKTPEEVFADTEADDLAKTVRAVAESEVQVVELLSGIRGTADVRPLGGSAFAGTLSMTFDKIINDPKAGFAIVDISAAGLHERVSTLG

SEQ ID NO: 17707 - protein, 1397 aa, unidentified
  REGION 1..1397: note = Cas Enzyme sequence
MARKLKNINGPWFAGIDLDGTSVGFVATDEYGEVLYHKGQPVMGTRCFKEALHASEARMPRTARRRLQRARGREREMERVFAPAIAPTDPDFFVRRRMSYKLMRDDIAADPAAAAWQGLLDGYPTLAHLDVDLMESDGPRDPRLVFWAIANHVVRRGHFLMEGNDATSANSDPSAQVEALVRELDALGEACGEAIELDGGALGGMGGSWTARELQKAVSGAVSVTGDDIDAKIARAQAKALGDLVAGYKANMDAFALEGEQIGKISVSDADALDEFLANCPDRLAPTIEAARGLYSAWRLQGLLSFAPGKTLSHNQVAQYEVYGRQLRTLKDLALKYIAHADSEEGPDEDGLALYRDFFGGPKRSGRRGYDKVLVKKLDGAKRNLGYTAYDLNVIPYEEFKKRVERLFKGTDAAKDPAYIDMVAALGEHRFLRRIHTTDNSAIPYQLHAEVVGRIIDAQGGFYPWLKDAGPHILKVLTSRIPYYVGPLDSSAAPVDAHGKARFSWSRRLPGHERAFVAPWNYEEHIDTDAAAEAFIRRMTGKCTYLVDEDVLPANSLIYERFRFLNELAGIRYTEDGQDWLPLDAAMRAAVVEAASDGSVMTLSRIAIILSRDFTMAHPHVKGVSDAKRMTSRLSVSAWIAGLLGVKSLTAAQKSMTEDIILWNTVFEERSILKRKVAREYGDILDEGAIEAFCAKRLKGWGQLSKRLLTGVWVDTARGDMCIMDVLEQGAPYGRFRGTSMNLMQALSDTELGFRTRIDEVNATALEKAGELGIEALPGSPALRRGVSQAMKVIEDMASVAGCAPAKVYVEVTRTASKQLKGKRSRSRVQEIEAALKALDEDARRDLDAARLLRELGMFDEKEINERLYLYFRQAGKSLYSGKPIDIARIASVDYCVDRILPRSVRRDESLDNKALVLYAESLDKKDSILVPQHVQRKMAPFWMHLRRAGLMTERKLNTLMRTQISERMLKSIVGRQLTETSQECKLIAAVLEATYTGVKVVPVKAGVASSVRRRAGIPRSRKANRYYHAHDALIALTTGRFIETRAPMWSNNRAFYERIMRDIEAQERRGGADSELDFFSGGFFRNLVDYDTAEVLWDSDFERERLVRACSWKNLRVTFAPYEEGGAFWKQTVYSPRDSKTKLIPVKGDRDAALFGGYSAQTFAYFMIYETEGKKGNLFRFAPVPTSIASKATDSLTELYARSLCRESGERFVRVVRDRILKETVYEAYGERFRVKGLKTAGPVRQLALDAADTRLLRIVERMVDGEQPSPRRDLESDAKVLCRLWARLLALAPANFPRVSKVLKLGALKTPEEVFADTEADDLAKTVRAVAESEVQVVELLSGIRGTADVRPLGGSAFAGTLSMTFDKIINDPKAGFAIVDISAAGLHERVSTLG

SEQ ID NO: 17708 - protein, 982 aa, unidentified
  REGION 1..982: note = Cas Enzyme sequence
VKTLGIDIGTASVGTALVGDTRILAATVRIFEAGTEGDIKGGRDQSPNLARRNARQQRRQINRRARKASKLYNLLVRHGLLPRAADGTSEARQATLTALDLTLRNPYQLRAAALDAKLQPFEFGRALFHLSQRRGFLSSRKQAAKPSEELGVVKQGISDLARAIEAAGCRTLGEYFNTVDPQVARIRGRYTARKMYLHEFELLWAAQAAHHPNLLTDDLHRKVFKTIFFQRPLKSQADKIGYCSIDGNEKRCPVYLRIAQRYRLIEQVNNLEVDGRALTQDERTTLIHALENQGDMTFGAVRKLLGLKKGKFNLEAVDEKRLIGNRTNAAMLAALGEYWLALDGQGRDALVEYSWGFEKQDKLAGAAAKKFGWPVAVAEKFAAVPFEAGYLLLSRRVIEEALPRLEAGDRLVEIRSDLMPATERPIFKLLPSLDEAAKYLGPVWSLTVRRSLTEMRKVVNALIRQHGLPDTMRVELARDLRKSRKRREEIHWSQNENKERREAAAAKILAEIGDPQPSRDDIEKVLLAEECGWHDPYTNAPISMRQLIGDEAMFQVEHIVPYSKSFDNSFANKTLCPTKVNVDKGNRTPYEAFGSDEAMLDRVAKFSSTFAKEKLRRFKMHGADLDEWLANFSPRALADTSTAARYAVRYLGLLYENPSSVRTTNGVVTAIVRRGLQLSGVLGDATTPKCRDDHRHHAVDALAIALTSDKLIAQISRQAETQPHKRGVSLEAPWPDFTDSARAAIRGIVVSHRQRGRIRGAIHDQTTYSGPINRRNHVRKPLAAMTANQIVNIVDPAVRAVVLTALKGGDPKKVFKSDADLPTMHGHKIRAARISCALNRGGMQIGSAQRVRFVESAANHHIEIFDGPKGWVSFIVTRREALRRLQAHLPIVNRQLEGHRFVMALTNGDTVTKTQDGRRELFVVRKLSYEAAGNRVGFKQIDDAGTGAAKRVFVTLLREMDFQKVRISPTGCAGATLLERET

SEQ ID NO: 17709 - protein, 1335 aa, unidentified
  REGION 1..1335: note = Cas Enzyme sequence
MKKVKYSQVDAYDFSADIGTSSIGWCVTDEQGNLLSYKNRHMWGSRLFETGNTAETRRAFRSTRRRLARRVQRIQWLQSLLSPLVLKDDPDFFVRMKYSYWTKADTEAKVKKSSLLVRDLFDDHTYCAQLYQKRFPTIYHLRKALVTENKAFDPKLIYLALHNIIKHRGNFLYDTQHISIKNGLDLVEPVNNFFAIYPNEEGEIIEPGKKFAEILESKNYRADIVKQLAQETKEFFGDEDKDAGKIIANAMVGYKADFGKLFHLGQSEKFSLDNDDAIEKLLDGLTEEQQSQLMALEKVYSAYTLKQILRGDSVTTISDAYINRYEAHKQDLKDLKYLYRSYLDEATYHKMFYDASRKLATYAAYRINDSGKSNRENLYKQVKEDLGKIQATSEDQQLINNCLRRIDEGVFLLKPCNNENGVIPNQLHVEELQAILENQSPFYPELKEVADKIVSIATYRIPYYVGPLSSAARKGDFGWAVRKEEGPVTPWNFDQKIDKEQSAEQFIARMRNTCQYLYGQETLPKHSMLYEYYCVLNELNAITVDGDKLSKQEKEDALHTLFSSGKSVTQKRFRDWLVKEEGRQIDITVPVQGFQSDSGFASTLSSFHAFENILGKSVNKFAEQIEEIIKWITLFQDKTILKKKITDAYGTLFSCTQIEQMCRLNYSGWGKLSAKLLNGITNADGHTVMQELLDKPYPFMKVLYDPAIGFISKINDFNKKQIGAIDPNSYESIFSEITASPSVKKSVWQCLLLLKEITKIMGKAPSHVYLETTKEEGEKKRKDSRFSKLQKLYSDLKQDSSFQEVIQQLNKNKDTYKKDMPLRVFLYFTQNGKCMYSGKPLDIEKLDTYQVDHILPQAYIKNNSISNLALVYPEQNQRKRDDMLLDPEIVHRQRPFWDMLKNKKLISLEKYRALTRDYVDETEEKGFIQRQIVETSQAVSIMLSIVPKVYPNCNVLGVRAGLSSDIRKDLQLFKIRAVNDYHHAQDAYLACMVGRFLGGPLHQAERDGSLWYAFRKEISEQSRILEGESSADRRKHEDKQGFIVSMFQKSSLKGWEGQLACQMIRAAFKLQDYYVTRKTEPQTGAFYNQMLGKKGLASANIKHDRPQEFYGGYTGEQAAYFMVISFQKGKKRILRLVNMPIRIAELEKTQPGAKQKYLRSQYKDPVILRDNICKYQLVKYQEDNGKTSEYYIVSDKEVINARQLRLSQEDIFTLAYWKTKSEIDKENLYLHLVQKMHLYPAFENIASKLEGHIKDFAKLHDEEKRKCIEHMLVIMQANSNRIENFNDLTSDEAKTWGDIPGSRIHKVLMIPSTLFVDQSVSGLFETYQRIRGEDK

SEQ ID NO: 17710 - protein, 1049 aa, unidentified
  REGION 1..1049: note = Cas Enzyme sequence
MSLIFGFDIGTTSIGFAVIDHDPDRKTGKIHRLGVRVFPEARDPKGVPLNQERRQARMRRRQYRRRRARRRQLYDDLYQAGLLPSRESEEDWNEAMKWDPYELRKRAYDLHKCESDGKNLSRHEIGRAIYHLAQRRHFKGRDIDEISDAVDDGNDRLDAADNEDEKNVAAKRKETVRTLKQEGKTLGAWLSERGPHERRRGVHATRALVQDEFDEIWEPLLPEDCREIIRDTIFSQRPVFWRWNTLRKCPFIPDAPPCPSGAWLSQQKRMLEKLNNISLVGGNQRPLDEEERQAILAKLQTQASMTWPSVRGALGPLYRARGDAGLEKSLKFNLEEGGQKKLLGNAVEAKLARIFGDDWSDHPSKQAIRDTVPIRLWNADYKRIGAQRVAIRSSTERQSLREQAKRSFVEDLGITEDRAVLLAGLKLPAGWEPFSVKALEAFLPHLEAGERFGELLNGPEWKAWRSATFPNREQTTGEAFGRLPSPADPEENKRIATLRNPTVARTRNELRKVVNNLIDMFGKPDLIRVELARDVGISKRERESRTQGIRRQEGRRTQARNFLINRGIASPSRSDVEKFMLWEESHHRCPYTGDSISFDALFKTGEFEVEHIWPRSRCLDDSFRNKTLCRRDVNLAKGNKIPFEYFGHNCSTWKAIENRLYGMKASKSSIGISQGKINRFLANAIPTDFANRQLNDTGWAARNAIDYLKKLWPDRGRDAPVKVHAVSGRVTAHLRRLWGLNNILADDGEKTRANHCHHAIDALVVACCHPGMTQKLSHYWQEKENPQIAKPNLPPPWKAIRDGAERAVDKIVVSHRVRKKISGPLHKDTVYGDTGDEELSKRGETYRFFVVRKNVEDLSKTQIDDIRDDAVRNIIMSWVERHGGNPKKAFPPYPKRGRKGPEIRRVRLLKKQQVELMAPVSTGYADLGKNHHISIYRATDGSVDYEVVSLFEASRRLTRHESVVRRKGRNGAKFVMSLSPGDALELSRNGRTETWIVREVRSKGQIYLDSHDDAVGETRFGPRVRPLIDRYGAKKISIDPVGRIRPAND

SEQ ID NO: 17711 - protein, 1049 aa, unidentified; identical to SEQ ID NO: 17710
  REGION 1..1049: note = Cas Enzyme sequence

SEQ ID NO: 17712 - protein, 1608 aa, unidentified
  REGION 1..1608: note = Cas Enzyme sequence
MNTTGPGSANRQDTIWSFDLGKASIGEAVRVEGAGTFLHKASLLIPAEFAARGPAWKSGTPASRHRMWRTRTAHDHRVAWLDELWKAAGLVPLKRRAVKPETEQWTTFQRTVRGKQKLKTRAAKTDWQLAQKGDPRLEREFAGENEPLHTSCLLRIALLRGGEGLKEWQIYKALWSAIQKRGYSDVPWKEQRKGKDDAPNETEAAENARAGQRWEEFLAALQAAGLDETYHRPCYFDAFHMKLWNPADAEKIHARSTERPQSTQKVSFPGGVVEAEIHALASNASARLGKLAEGFRKWMDDYSTRVLTRVREINAHRAEKGKKPMRVPDFAGAAKDFAELFVYGPGGKPTLPNNLRPIASYDPAKRKTAGLRPGTPGDWQAALGQRVARFDNRLQRNCALIPRLNCCRNTTDEDLKNAKDGDPRLLPAEVTFLMKIKNMRVQELDAKRTQRGLNPNEFVKLFKERSKKREYTFTKKQWREWCAANGLRPVVDADDKKKPGAKKQEDSAGEEKKKTDYAVERASSEGRSRFSRPALRLLKELLLSGKSPSEFHAALLKGDADLLKMLGPDAKRPLELFADSGDAKADAANAIKGLLHSDLAFLLRMRKPDVKEDSWDGIYIPTQNLDHVMHETGADAAARNRAIRELIGMQNNPIVRHRLDTFWERLKTLEKLKGPDGQPIGAPGKVVIELVRDDPESSWLGKDAKKEMTDAMKAQRDKRDAAKERLKEMDHPHGDVLKFMLWEAQGGHCLYGESSSGGDAKAVKTALPFTGMSKYRVDHIVPRAMGGPDAWYNLILTEDTTNAIKGDRTPWQWFHADRSTAEWDAYRERVMLRAKELGGRKVRLLLSADAHKLVEHYKPLAETAWIARLARVIVNLHFGWANVSDAAGNQRVLLASGGLTARIRRRYHLDSLLGNDRALDETVTALLKEQAALREELAKLPLAMPESDRRYPRLKETKARLREVRDALDEKSREVEKQRGDKRHHALDAMVLSFVRQTAADTQWEEELRLTDIGDAPAYPPEKLQFARKLMSEIIALQAVAAKADTVEEREQLQRQITNKHDGLASLRQPPNVLAVREAFCRAIFGTKRDGSDAVLPHSLNFEKPRMQATFHRGVWLPVESDAKVAKATIDNFNEAYYEDRIPLERLPYLDDGTPGGRFSREHALRRVAWIAPHEDYAAKTIQAALKAALPPGITPEQWQAWCRSEDAPSGIKPKKGQPDAKEFSFFRLEEKRTKRVKLFDLGVGSKDAPIFDLGSFRQKCSRIIEAPKKKKEGVQLVLEADTTLQAKLRELEPQIQAFFDANNPDFSVKPRKPSQLAIWEKNKAAYENALERFLKDNGLDRYKKVYVKAEGVKVTDKPWESPWMSSILLTKVRRFDPDKAESQVQSISDAWTRFQLRKFLAADPQPQDWKALCGTFVQVTRASYADFLARKPKTAEEFVAFYRQQEAASRHSGAKMRSIITHIQQVIGNADAYVDVSKDGSGIYAKGGNRGYFVWKKTTTDKDGNKQEECGATTVLGFERYADAKKRLLAQNGVELLDTRLWQTDMILRLPKDTTSGKKTVPEGFYYFGSLSNGAYATLKPLAGGDNFEGISIALLLGAGLRRHDLL

SEQ ID NO: 17713 - protein, 1430 aa, unidentified
  REGION 1..1430: note = Cas Enzyme sequence
MKKRKHILGLDLGTTSIGFSHIIEDEDREKSTIEEIGVRIIPLSVDELSNFERGKTISTNADRTLKHGARINLDRYQLRRKQLIELSLQAGLITSSTILAEDGKNTTHSTWQLRAKAAVERIEKDELVRVFLAINKKRGYKSSRKVKNKDDGQIIDGMDIAKRLYDENLTPGQLVLLLLKEKKKQLPDFYHSDLQREFDLIWNFQKEFYPDILTNDLYKALQGKNKTDSSSIFYNYYHFNTAENRGTKEQMRLQAYRWRVDTLSKKLSKEEVAYVLVEINSNLNNSSNYLGNISDRSKELYFNKQTIGQFLYTKLKEDRHYSLKNKVFYRQDYLDEFERIWETQAIFYKELTGDLKKQIRDTIIFYQRRLKSQKGLISLCEFENKEITIEKEGKTVTKQIGVRVIPKSSPLFQEFKIWQILNNVVCKKKGTRKKKAVTPAPLLFELFGTPSETFFSLDMECKQLLFEELNLKGNLKADKVIRLLGYIPQEWEINYNQLEGNRTQKSLYEAYLKIIEIEGYDIKTFLRIKSDKEDWDLEESPLSAKEIRENIQHIFETLGISTAILYFDATLPIKDFEKQASYQLWHLLYSYESDNSPSGNETLYKLLQDKFGFKREHAVFLSNISFQDDYGSLSAKAIRKIYPYIKENQYSTACELAGYRHSKLSLTKEELNNRPLKDLISPLKKNSLRNPVVEKGLNQMINVVNALIEKNSEKDAEGNIIKYFHFDEIRIELARELKKNAQERAEMTLNIKNATIEQEKIKSILISDFGIKNPTKNDITRYRLYQELAHNGYKDLYTNTYIPKELLFSKNIDIEHIIPKARVFDDSFSNKTLAYRDFNLKKGENTAFDFIDSSLGEEELNQYIARVENAYKTKNISATKYKNLLKKATEINDGFINRDLRETQYIAKKAKELLFQITRSVVSTSGSITDRLREDWGLIDIMKELNMPKYRDLGLTEIIERRDGRKVEVIKDWTKRNDHRHHAMDALTVAFTKPSYIQYLNHLNARKDEKNKLYADILGIERKETTKIHDENGNEKRIFIEPIPGFRQIAKKYLEEILISHKTKNKVVTKSINKIAGTNKKQETLTPRGQLHKETIYGKYHYYSNKEEKIGTKFDKETISKVSNPIYRYALQKRLEANENNPKKAFTGKNALSKNPIYLDDAKTKILPEKVNLTYLEEDYSIRKDISPDNFKDLISIEKIVDEGIKRILKERLKTYNNDPKKAFADLDKNPIWLNKEKGISIKRVTISGVKNAQALHSKKDHLGKPILDKEGQEIPVDFVSTGNNHHVAIYRDQKGNLQEQIVSFFEAVVRAQQGLPIIDKTYKQEEGWQFLFTMKQNEMFVFLNEITGFNPSEIDLLDPKNKKLISPNLFRVQKISIKDYFFRHHLETNVETNNILKDITWKRGGLSLLKGIIKVRINHLGNIVSIGEY

SEQ ID NO: 17714 - protein, 1430 aa, unidentified
  REGION 1..1430: note = Cas Enzyme sequence
MKKRKHILGLDLGTTSIGFSHIIEDEDREKSTIEEIGVRIIPLSVDELSNFERGKTISTNADRTLKHGARINLDRYQLRRKQLIELSLQAGLITSSTILAEDGKNTTHSTWQLRAKAAVERIEKDELVRVFLAINKKRGYKSSRKVKNKDDGQIIDGMDIAKRLYDENLTPGQLVLLLLKEKKKQLPDFYHSDLQREFDLIWNFQKEFYPDILTNDLYKALQGKNKTDSSSIFYNYYHFNTAENRGTKEQMRLQAYRWRVDALSKKLSKEEVAYVLVEINSNLNNSSNYLGNISDRSKELYFNKQTIGQFLYTKLKEDRHYSLKNKVFYRQDYLDEFERIWETQAIFHKELTGDLKKQIRDTIIFYQRRLKSQKGLISLCEFENKEITIEKEGKTVTKQIGVRVIPKSSPLFQEFKIWQILNNVVCKKKGTRKKKAVTPAPLLFELFGTPSETFFSLDMECKQLLFEELNLKGNLKADKVIRLLGYIPQEWEINYNQLEGNRTQKSLYEAYLKIIEIEGYDIKTFLRIKSDKEDWDLEESPLSAKEIRENIQHIFETLGISTAILYFDATLPIKDFEKQASYQLWHLLYSYESDNSPSGNETLYKLLQDKFGFKREYAVFLSNISFQDDYGSLSAKAIRKIYPYIKENQYSTACELAGYRHSKLSLTKEELNNRPLKDLISPLKKNSLRNPVVEKGLNQMINVVNALIEKNSEKDAEGNIIKYFHFDEIRIELARELKKNAQERAEMTLNIKNATIEQEKIKRILISDFGIKNPTKNDITRYRLYQELAHNGYKDLYTNTDIPKELLFSKNIDIEHIVPKARVFDDSFSNKTLAYRDFNLKKGENTAFDFIDSSLGEEELNQYIARVENAYKTKNISATKYKNLLKKATEINDGFINRDLRETQYIAKKAKDLLFQITRSVVSTSGSITDRLREDWGLIDIMKELNMPKYRDLGLTEIIERRDGRKVEVIKDWTKRNDHRHHAMDALTVAFTKPSYIQYLNHLNARKDENNKLYADILGIERKETTKIHDENGNEKRVFIEPIPGFRQIAKKYLEEILISHKTKNKVVTKSINKIVGTNKKQETLTPRGQLHKETIYGKYHYYSNKEEKIGSKFDKETISKVSNPIYRYALQKRLEANENNPKKAFTGKNALSKNPIYLDDAKTKILPEKVNLTYLEEDYSIRKDISPDNFKDLISIEKIVDEGIKRILKERLKTYNNDPKKAFADLDKNPIWLNKEKGISIKRVTISGVKNAQALHSKKDHLGKPILDKEGQEIPVDFVSTGNNHHVAIYRDQKGNLQEQIVSFFEAVVRAQQGLPIIDKTYKQEEGWQFLFTMKQNEMFVFPNEITGFNPSEIDLLDPKNKKLISPNLFRVQKISIKDYFFRHHLETNVETNNILKDITWKRGGLSLLKGIIKVRINHLGNIVSIGEY

SEQ ID NO: 17715 - protein, 1399 aa, unidentified
  REGION 1..1399: note = Cas Enzyme sequence
MNTAVSKDSRGSDYYLGLDIGTASVGWAVANTDYELVKEHRKYLWGVRLFDTADTAAERRLHRAARRRHQRRLQRQRLLKEIFEDKISEVDPHFFERLKESSYHREDRSGNFLSTLFNDESFKDTDYFAKFPTIFHLRSHLIHHPEERPDIRILYLAIHSILKHRGHFLFPGESLESISSFSLLFDELLKNIETSLQCTLHVSCTPETFGTILKKKRRTDKKNDLQEVLTLTRTTEEEIEETPKKLTSELIKALSGTPFLLSMLFENDSYKDSEQDKIEFDKEGFEDLKESIEVLLEPEEYALIETLEGIYNWTLLSDILNGEKFISDAKVASYRNHKDDLKQLKLLVKKYAGSAYYKAFKDPSIQNNYAHYIGTGNKSGKKVQVAHKGKCLQEDVNKYFHNLLKPYQNDEDRDLDNMLEKLEQKSALPKQRVRDNRVIPHQLHLKELQIILENAKAYYPFLTIPDDDGYTPTQKIISMMTFRIPYYVGPLNTSHMEKEGKEGFCWMVRQQGKEDVPIFPWNWTEVVDKNASAEKFITRMTNSCTYLFNEEVLPKFSLLYNRYMVLNELNNLKVNGEPISVELKQKIYNELFLHSGKKTITLKMLQKFLVVNNIVNKGDVTTIEGIDNGFANSLKSHIDFAPYLEANILSVEDVEKIIEWKAYYVDDATILKEKITQELHEKLTSEQIDDITKLVRNYKGWGRLSRAFLEDIYHVDRATGEGYSIIHMMWETNENLMELLSSKYDYLDEIQRINNETLINKKFSYESLVRPLSVSPPVKRQIWQTLLIVHELKKVMGKAPKRVFIEMAREEREKKRTTSRKESLRILYDRCKNDISFNKALLESLDTKTDTELRNDRLYFYYTQMGRCPYCGGKIELDQMNNTQLYDIDHIYPQSLIKDDSLKNRVLAHKACNGEKGNSYPINPQWQNTMIGFWKVLLDRSLISKEKYARLTRTTPLSDEELFAFINRQLVETRQSTKVVASILKNLFQDEGTEIVYVKARNVSSFRTDFEIKKSRLVNDHHHAHDAYLNIVVGNAYHTKFTGDARNFIKELKRGDQYYNASNIFSRSIQRNGRLAWIADERYDANKGRPKSEKQETGTIATIRKMLRNHQVLVTRQAVEVSGALFKLQPLRKKKNLLPLKGSSQTLQDTTKYGGYNAPATAYFALVQHEKKGKEVRQFVPVPILYAELFKQNPGTLLKYCEEELDLINAKIVIPQILLHELVQLKGYTMSLSGITGPQTVANNEIQLVLSDEDYDYVAQIEKYLSLLKKVKDPEVQENAEILAESLHICKQDNLTLYELLLAKERGSIYRYRPANQAKFLEEKRSIFESLDIKGQCEVLVQIINLFTCTPESANLTKLGGGSSSGIVKFQSQITDKEARLIHQSPTGIFTKSRRVYEI

SEQ ID NO: 17716 - protein, 1133 aa, unidentified
  REGION 1..1133: note = Cas Enzyme sequence
NDSYKDSEQDKIEFDKEGFEDLKESIEVLLEPEEYALIETLEGIYNWTLLSDILNGEKFISDAKVASYRNHKDDLKQLKLLVKKYAGSAYYKAFKDPSIQNNYAHYIGTGNKSGKKVQVAHKGKCLQEDVNKYFHNLLKPYQNDEDRDLDNMLEKLEQKSALPKQRVRDNRVIPHQLHLKELQIILENAKAYYPFLTIPDDDGYTPTQKIISMMTFRIPYYVGPLNTSHMEKEGKEGFCWMVRQQGKEDVPIFPWNWTEVVDKNASAEKFITRMTNSCTYLFNEEVLPKFSLLYNRYMVLNELNNLKVNGEPISVELKQKIYNELFLHSGKKTITLKMLQKFLVVNNIVNKGDVTTIEGIDNGFANSLKSHIDFAPYLEANILSVEDVEKIIEWKAYYVDDATILKEKITQELHEKLTSEQIDDITKLVRNYKGWGRLSRAFLEDIYHVDRATGEGYSIIHMMWETNENLMELLSSKYDYLDEIQRINNETLINKKFSYESLVKPLSVSPPVKRQIWQTLLIVHELKKVMGKAPKRVFIEMAREEREKKRTTSRKESLRILYDRCKNDISFNKALLESLDTKTDVELRNDRLYFYYTQMGRCPYCGGKIELDQMNNTQLYDIDHIYPQSLIKDDSLNNRVLAHKACNGEKGNSYPINPKWQNTMIGFWKVLLDRSLISEEKYARLTRTTPLSDEELFAFINRQLVETRQSTKVVASILKNLFQDENTEIVYVKARNVSSFRTDFEIKKSRLVNDHHHAHDAYLNIVVGNAYHTKFTRDVRNFIKELKRGDQYYNASNIFSRSIQRNGRLAWIADERYDANKGRPKSEKQETGTIATVRKMLRNHQVLVTRQAVEVSGALFKLQPLRKKKNLLPLKGSSQTLQDTTKYGGYNAPATAYFALVQHEKKGKEVRQFVPVPILYAEQFKQNPGTLLKYCEEELDLINAKIVIPQILLHELVQLKGYTMSLSGITGTQIIANNEIQLVLGEEQYDYIAQIEKYLSLLKKVKAPEIKENAEILAESLHICKQDNLTLYELLLAKERDSIYRYRPANQAKFLEEKRSVFESLDIKGQCAVLVQIINLFTCTPESANLTKLGGGSSSGIVKFQSQIADKEARLIHQSPTGIFTKSRRVYEI

SEQ ID NO: 17717 - protein, 1137 aa, unidentified
  REGION 1..1137: note = Cas Enzyme sequence
MLFKNDSYKDSEQDKIEFDKEGFEDLKESIEVLLEPEEYALIETLEGIYNWTLLSDILNGEKFISDAKVASYRNHKDDLKQLKLLVKKYAGSAYYKAFKDPSIQNNYAHYIGTGNKSGKKVQVAHKGKCLQEDVNKYFHNLLKPYQNDEDRDLDNMLEKLEQKSALPKQRVRDNRVIPHQLHLKELQIILENAKAYYPFLTIPDDDGYTPTQKIISMMTFRIPYYVGPLNTSHMEKEGKEGFCWMVRQQGKEDVPIFPWNWTEVVDKNASAEKFITRMTNSCTYLFNEEVLPKFSLLYNRYMVLNELNNLKVNGEPISVELKQKIYNELFLHSGKKTITLKMLQKFLVVNNIVNKGDVTTIEGIDNGFANSLKSHIDFAPYLEANILSVEDVEKIIEWKAYYVDDATILKEKITQELHEKLTSEQIDDITKLVRNYKGWGRLSRAFLEDIYHVDRATGEGYSIIHMMWETNENLMELLSSKYDYLDEIQRINNETLINKKFSYESLVKPLSVSPPVKRQIWQTLLIVHELKKVMGKAPKRVFIEMAREEREKKRTTSRKESLRILYDRCKNDISFNKALLESLDTKTDVELRNDRLYFYYTQMGRCPYCGGKIELDQMNNTQLYDIDHIYPQSLIKDDSLNNRVLAHKACNGEKGNSYPINPKWQNTMIGFWKVLLDRSLISEEKYARLTRTTPLSDEELFAFINRQLVETRQSTKVVASILKNLFQDEGTEIVYVKARNVSSFRTDFEIKKSRLVNDHHHAHDAYLNIVVGNAYHTKFTGDARNFIKELKRGDQYYNASNIFSRSIQRNGRLAWIADERYDANKGRPKSEKQETGTIATIRKMLRNHQVLVTRQAVEVSGALFKLQPLRKKKNLLPLKGSSQTLQDTTKYGGYNAPATAYFALVQHEKKGKEVRQFVPVPILYAEQFKQNPGTLLKYCEEELDLINAKIVIPQILLHELVQLKGYTMSLSGITGTQIIANNEIQLVLGEEQYDYIAQIEKYLSLLKKVKAPEIKENAEILAESLHICKQDNLTLYELLLAKERDSIYRYRPANQAKFLEEKRSVFESLDIKGQCAVLVQIINLFTCTPESANLTKLGGGSSSGIVKFQSQIADKEARLIHQSPTGIFTKSRRVYEI

SEQ ID NO: 17718 - protein, 1064 aa, unidentified
  REGION 1..1064: note = Cas Enzyme sequence
MKTENLGIHFDVGHASIGWAVTSFRQEEAEFLRILGTGVVLFPADDCLANHRRAFRRQRRHVRATRQRIARMKALLLSRGVLSEGELDANTTASPWKLAAAALRGKTLSWIELWSVLRWYAHNRGYDGNALSCLRSGRGVDPEDSKKNAAARVAMTQFGTSSMAETVCAFFEIDPAQGKSASTKRFKGLNLSFDRGIVEAEAIRILEAHIGKLPGLDRDLVHILTASPVLEPACLRGRTNLPFQVPARFWGGVLFGQLAPRFDNRLIGTCPVSGRKLPLKATPEFLLYRWAMMLANTRVGETNRPLSADERAAMTERVRLVGGFAKGAYKKAIAETTGEKVSNIDALLLAPEADKSLVCYPGLYALHQKGLDDWLDPSDAKKLAHRMFRGKTFRVRDVAALVSADRKSAFENWFNGAASKGRGKKKTDDERWNAPVAADLPSGRAPFAREVLAKAASEVLAGIDPREKGGVLYRDATEEDALPESAIDRETNNHLVRHRVKILLRLLKDVVHDYAENNPARVSQVTIEMARDLKDLSGKTNKEIESEMTLRTAQHNRVAKKLAEFLECDVSHVSAGLIRKARIAEDLSFTCPYTGAKYDLQDIRSGTVDREHILPRSQRATDSLDSLVLSFTEVNRMKGARSGLEFVRECGGQRVPGRENLVVLREEEYRRLVEDLRPAQSTNFPEDRRRQERRKENLLRLRATDIGMTEGMLTRTSYITTLAMKAVRGYFADCGRMPRLVSVPGRVTAFFRTQWNLLGLLARTDPRVLDENGELRLKSEIRNITHMHHAVDAITLGLAATLLPADGSFWATICKRRVTATEESALRKLRVFRFSANHEPALVGLPAFLSDSIVRALAEKRVVIHQPQERRGLLLEQNAWGVVREEGDKVVIRQRARDEKGKRIPPKTKTVQRSAVFGLEPEGGQGKLKAIKGVLVRSGNFGVALSPTPTVIPVFKVWKTLGGMKDGKRLPAIVRNGCLISVPKGTYQGVWRVKSVKNNQSGIALDLVVPQAIAPVNKSATSRINAKLSTMIRDGLKILEPRYTGISLCPTTSSISPNPAPSSP

SEQ ID NO: 17719 - protein, 965 aa, unidentified
  REGION 1..965: note = Cas Enzyme sequence
RDNRVIPHQLHLKELQVILDNAQHYFPFLAIPDADGYTPHQKIVSMLTFRIPYYVGPLNTSHMEKGGNEGFCWMVRQQGKEDVPIFPWNWDEVVDKNASAEKFITRMTNSCTYLFNEEVLPKYSLLYNRYMVLNELNNLKINGEPISVDLKQRIYNELFLKSGKKTITLKMLQKFLMTNNIINKGDTSTIEGIDNGFANSLKSYIDFAPYLEARILSEDEIEKIIEWKAYYVDDATILKEKIAQELHEKLTSEQIDDITKLVRNYKGWGRLSRAFLEDIYHVDRATGEGYSIIHMMWETNENLMELLSSKYDYLDEIQRINNETLINTKFSYESLVKPLSVSPPVKRQIWQTLLVVHELKKVMGKAPKRVFVEIAREEREKKRTTSRKESLRILYDRCKNDITFNNALLESLETKTDAELRNDRLYFYYTQMGRCPYCGGKIELDQMNNTQLYDIDHIYPQSLIKDDSLNNRVLAHKTCNGEKGNSYPISSQWQNTMIGFWNVLLDRSLISKEKYARLTRTTPLNEEELFAFINRQLVETRQSTKVVASILKNLFQDEKTEIVYVKARNVSSFRADFEIKKSRLVNDHHHAHDAYLNIVVGNAFHTKFTADARNFIKELRRGDQFYNASNIFSRSIQRNGKSAWIADERYDVNRGKPKSEKQETGTIVTVRRTLENHQVLVTRQALEVSGKLFDLQPVRKKGLIPLKSSNPILNDTNKYGGYDSPSTAYFALVQYEKKDQLFRKLIRVPILFKKQLETDSEALKEYCEINLHLLNPKILVPKILKNELIIIKGYRMSLSGFTEQRVIANSAVQLIINEKQYDYIAQIEKYLSLLKKVNKEEVPGNAEILAESLHICKQDNLQLYEQLLAKERDSIYKQRPANQAKFLEEKISTFESLELWKQCEVLMQIIKLFDCKSRKIDFKALRGGGSVGEIKFDSVIKDTDARLVHQSPTGIFTKTRRIYEL

SEQ ID NO: 17720 - protein, 1399 aa, unidentified
  REGION 1..1399: note = Cas Enzyme sequence
MNTAVSKDSNQSEYYLGLDIGTASVGWAVTNAEYELVKKHRKHLWGVRLFDTANTAAERRLHRAARRRHQRRLQRQRLLKEIFQDKIDEVDPHFFKRLKESSYHTEDRSGSFLSILFNDESFKDTDYFTKFPTIFHLRSHLIHHPEEKPDIRILYLAIHSIMKHRGHFLFPGESLESVSSFNLLFDALLKNVEDSLQCALHVSCSPESLGAILKKKRRTDKKNELLKVLALTRTTEEEIEETPKKLITELIKALSGTPFLLSLLFENESYKESELDKIEFDKEGFEDKKDSIEVLLEPEEYALIETLEGIYNWTLLSDILNGEKFISDAKVSSYAEHKNDLKQLKLLVKKYAGSAYYKAFKDPSIQNNYAHYIGTGNKSGKKVQVVHKGKCLQEDVNKYLYNLLKPYQNDEDSILGSMLEKLEQKSALPKQRVRDNRVIPHQLHLKELQVILDNAQHYFPFLAIPDADGYTPHQKIVSMLTFRIPYYVGPLNTSHMEKGGNEGFCWMVRQQGKEDVPIFPWNWSDVVDKNASAEKFITRMTNSCTYLFNEEVLPKYSLLYNRYMVLNELNNLKINGEPISVELKQKIYNELFLKSGKKTITLKMLQKFLMTNNIINKGDTSTIEGIDNGFANSLKSYIDFAPYLETKILSGEEIEKIIEWKAYYVDDATILKEKIAQELHEKLTSEQIDDIAKLVRNYKGWGRLSRAFLEDIYHVDRATGEGYSIIHMMWETNENLMELLSSKYDYLDEIQRINNETLINKKFSYESLVKPLSVSPPVKRQIWQTLLVVHELKKVMGKAPKRVFVEMAREEREKKRTTSRKESLRILYDRCKNDITFNNALLESLETKTDAELRNDRLYFYYTQMGRCPYCGGKIELDQMNNSQLYDIDHIYPQSLIKDDSLNNRVLAHKTCNGGKGNSYPINPQWQNKMIGFWKVLLDRSLISKEKYARLTRTTPLSEEELFAFINRQLVETRQSTKVVASILKNLFQDEKTEIVYVKARNVSSFRADFEIKKSRLVNDHHHAHDAYLNIVVGNAFHTKFTADARNFIKELRRGDQFYNASNIFSRSIQRNGRSAWIADERYDDNRGKPKSEKQETGTIVTVRKTLRNHQVLVTRQAVEVSGALFKLQPLKKKKNLLPLKGSSQILQDTTKYGGYNAPATAYFALIEHEKKGKPVRQLVPVPILYAEQFKQDAKGLAKYCEENLDLENAKMIVPQILLHDKVQLKGFTMSLSGVTGPQIIANNEIQLVLSDEHYDYVAQTEKYLSLLKKVKDTEVEKNAEILAESLHITRQDNLQLYEQLLAKERDSIYKYRPANQAKFLEEKKSTFESLDIKAQCEVLVQIINLFTCTPESANLEKLEGGSSSGIVKFHSQITDREAKLIHQSPTGIFTKTRRIYEL

SEQ ID NO: 17721 - protein, 1150 aa, unidentified
  REGION 1..1150: note = Cas Enzyme sequence
MSLTIAFDIGYASIGWCVLSSATGVPEFLGTGAVTFPSDDCLASTRRGLRRTRRHIRSTRQRIERMKRWLVHRGVLSREDLDRPGHPAPFLLAAAALQGHRTLSAWELWTVLRWYGHNRGYDGNTRWSRGEEEPEDTEKQTNARSLMEKHGTESMAETVCACLGLKPAGHGHRISSELPYKTLNAAYPRRVVENEVLALFERHVGRIAGFDAETATGIFNPAERDPKCRRSEELEVAYRAAGIELPRRYHGGLFFGQLVPRFDNRIIARCPITWAATFDSAVSEGKSEGEARKLADKFAKVPSAKCAEFLGFRFASLLANLKVDDGKPLPKELRRHLWELAQARGRLTYRELKKEITAAGHKPYNLDATFTIHPDSEDALTLDPVAEFPQKTQMLKPVWDAIDEITRQQVLGLWRKGGSVSLAAMIRMGGQTDAVLKASQTAHAASQKRSRNKELLVSFEDFIAQPLAPKRITGRAPYARPVLKQVIAEVLDGHHPRKANKAVDPENGEEKLQNGILYDLGISGSRVRQLQAERPIDQLTNNHLVRHRMLILDRLVDDIVAEFCNDGAEVGQIVVEVARELKEFSGMTAKQISTELNSRLKDFKAAVAYLEKHAPNLEPSGGIIRKCRIAMDLGWHCPFTGESYDAYDLPKLEREHIIPYATRNTNALHALVLTRPDVNRMKGKRTARQFIAEFEGKPVEGRPNLSLFTLRNYDAFVDRLDTKGHDDDRRRKKARKALLATDDFEDKELGFTDGQLTQSSQLMKLAMGALRQKKDASGKSIFERTQIDPIPGPVTAEIRKSWRLTGTLALACPEIIDASGDLLTKNEIRGLTHLHHGLDAATLALAAHYFPLRKNGQNQAGLIWRALMKRNRTKEEKEFLHRLGIFDTFQRTRGDHQAIETDVRLRDLDKAVKDALARSLAEGRVMQHLPADRSGTRAELLTWGVVAITGENALIIQRPNRGLLDVDTNSSQRRWKDKPPTKEALKLLSEHGHLLGAKERRLVERGIHKFTTEKLTRLLGPTSPADGGKLAAIRGALVIGDNFAIALMTPAPILIPFHHVHQALTSLTASNDGKLPRLLRIGTVIKVLKGTWRGTWRVVSIKNSEAYGISVDLAHPHGLKLTKGNARVPQMLIDGLEILPRRYTGYPLTD

SEQ ID NO: 17722 - protein, 1058 aa, unidentified
  REGION 1..1058: note = Cas Enzyme sequence
MQHKMRYRLGLDLGTTSIGWALMRLNERDEPCAVIKMGSRIFSDGRDPKDGSSLAVTRRLARQMRRRRDRLLKRKQRLLDALVRLGFWPEDRAVRKSLEAFDPYELRRQGLDRALTPAEFGRTLFHLNQRRGFQSNRKTDKKDSESGLLKSAIRKLRDELATQGMRTVGEWLATRHAARQSVRARLRGKSAKDKAYDLYIDRSMVAEEFDRLWAAQAGWNSAQFTDQRRDELRDILLHQRNLRPVRPGRCTLLPGEERAPLALPSVQRFRIYQELNHLRLVAEDLTETALTREQRDLLANLLERGDLTFPKIRKALVLPGSTVFNLEDAKRDRLKGSAPSKILGATAALGDAWHALAWEQQDEVVTQLLEEASESRLVTWLVERLGIDEARAEAVAAVSLPEGYGNLSRAAVARVLPELQREVVPYAEAVKRAGFDSHSALSHSEQTGEVMVELPYYGQALQRHVGFADPMARDDDPPEKRFGRIANPTVHIGLNQLRKVVNALISRYGHPSEVIVEVARELKQSQARRREENERQAQRQQENERFAADIRALAGMAGREPTRDDLQRMRLWVELNPQDPANRRCPYTGELISMAMLFSGEVEVDHILPFSMTLDDSLNNKVVALRRANRDKGNRPPADAFGHSPEGYDYQAILQRAALMPRDKGRRFAPDGYQRWLREDRDFLARALTDTAYLSRIAREYLSLVCPANRVRVIPGRLTALLRGKFGLNSVLSASGIKNRDDHRHHAVDAAVIGVTDQGLLQRFSRASAAAHERHLNRLVEEMPLPWPTYREHVARAAAAVTVSHKPDHGHEGALHNDTAYGLRPGDEVVHRVMLDSLKGGEDIARLTWADDHLARQLQAQTAGLSGKAYLERLAQATATSGMRRLRRVEKLKVIPMTSARAVDRHGQTEDGQPRPYKGYKGDSNHCIEIWRNDKGRWESTVISTFEAYAIEREHGLQGLRHPGRAQNGQPLVMRLMIDDMVRLEVDGLLRTMRVAKLSGNGQVFMAEHHEANVDARNRDLEDSFKYVSKMAGSFFAARARKVTVSPVGELRDPGFRP

SEQ ID NO: 17723 - protein, 929 aa, unidentified
  REGION 1..929: note = Cas Enzyme sequence
MKEHDARTLGELFGRPRHEQKQANEDAPHRGGKPMPQARVKARVEKSKMVYDYYPDRAMILDEFEQIWEAQTPYHPDILTGEAHDSIRHVIEYQRPLKPQKAGRCTFLPEQERAPKALPSAQYARILQEVNNLKVGATGEVSRPLDREQCQTVIDFLIRPSSKTAKRTFKLIRKKLKLPESQRFSHESPKRDHLKGDLTAAGLMQKEAWGPDWFDLGRATQDDIVMKLLDTEQEQDIVDWLVGEYGMDEPRAQHISRLNLPDAHGKLSRAALDRIIPRLEAGERYDEAARQEFRDHRAMGDGEIHEKLPYYGEILNRHTAFEKDDPQNDEEQYGRVANPTVHVALNELRKVINDLIRRWGPPEQVVLELARDLPLSDRGMRELEREQVKNQEANDKRNTWLEEQKLPTNYEHRLKLRLYEEAEEAFGGIAQCVFTGKTISKTALFSADIEIEHILPVSRTLDDSFANKVLCIRDANRVKKNQTPYEAFGHSPPGYDWENIGLRAAELPGSKGWRFAPDAMEQWESRGDFLDRQLTDTRSIATLGKKFVEGLYGGQGSAGQTRQVWVIPGQLTSDIRHFAGFNTLTGLTGSNSKDRTDHRHHAVDALVIALTDQAMVKRAAGLAKREDAAAHHDIMRKMADPLKRYRRSAEDRLSKLTVSHKPDHGFQDAMHNDTAYGLTGETDEKGNALLVTRKPLDSLSKPADLDKIRDEHLRRFLMLKLISPALGSADLDKIPDERLRKEFARATMGLTGKDFTQALTQAGRHMSPPVYSVRVLDPMKPASFVRVEHGDGHSKAYMGSSNYCYDIFMGEKGKWSGEVITTFQAYQMARDNPDWWHNLGGRDGHPLIMRIRKGDMLELETDPGKPIRVVVYKFSTGKIFMHEHFEANASARIAEKELLGYQMAPSSLQRAKAVRLTVSPSGKVTRHRL

SEQ ID NO: 17724 - protein, 1048 aa, unidentified
  REGION 1..1048: note = Cas Enzyme sequence
MRRLGLDIGTNSIGWCLIEDDARIIEIGVRIFADGRDPKSGASLAVDRRAARAMRRRRDRYLGRRAAFLKALVEHGLMPADDDESKLIAERDPYVLRARALSERLAPYEIGRALFHLNQRRGFKSNRKAERRQKDNEDGKIATGAKALDQAMAEAGADTLGQFLAGRDEKRVRMSGESQDYDFYPQRRHVDYEFGRIWDEQAKHHPALLTDTARAALHRILFFQRPLKEQEVGICTFVHSERRLARAHPLFQERRLYEEVNQLEITTPGEPSRKLDMDQRDRLVLKLRGVKAASFDSLGKLLKLEPGQSFNKASETRTQLAGDEVHAVMSDKKRFGDKWPHLDRDRQWIIIERLIEEEDPDALHVFLTEECGLDDEHAAATAKASLPELYGRLGPTATARILDELKQEVITYDVAVRRAGWHHSDDRTGEILPQLPYYGELLTRDIPPGSQLPSDPPEKRWGRITNPTVHIGLRQVEKLVNAIIKLHGRPDHIVVELARELKLNEKDKEEHNRRIRKDTAAAVARSEKLRSEGFADTGANRMLLRTWEELNPANPLDRRCPYCGEPIGIRQLFGGEADIDHVIPYSRSLDDSASNKVVAHRHCNRAKGNRTPHEKWGHDEERWDRISAQVARLHKSKQWRFGPDAMARMEKDGGFLARQLTDTQYLSRLAGRYLSSLYADASEGSAYVIPGRMTAMLRRLWGLNSLLPDHNFVENEHSNAPKNRLDHRHHAIDAAVTAVTTRSLLQQIARAAGRAEDKNLDRLFEKLPQPWEGFREELGRRLARITVSHKSDHGRRSRPAPGGDVTAGRLHNDTAYGLTGEVGADGRTPIVVHRIPLTNLKPGDIGDPLRIPDRPLRDALHEATRDRSGKEFEQALRRFHDTHPLFKGIRRVRIREPLNVIPIRDKEGRAYKAYKGDANARFDVWRLPDGKWTADIVSMFDAHQADQANRRPHPAAKKVLSLRQNDMLAIERDGGAPRIVRVVKFSTTGTIALAPDNEGGALKARDATSNDLDPFKYILSSAGGLKKLKARQARIDSLGRVFDPGPRE

SEQ ID NO: 17725 - protein, 1385 aa, unidentified
  REGION 1..1385: note = Cas Enzyme sequence
MSRKKIVPNYAISLDIGNASVGWAAFTPDYRLMRAKGRELIGVRLFEPAQTAEARRMARTTRRRYSRRRWRLHMLDAIFDAPLAEVDPSFLARRKYSWVHPADENNADYWYGGVLFDSKNQDKRFYKQYPTIYHLRKTLMEDDKQHDIREVYFAVHHLLKYRGNFLVEGDLDSSSVFDSKNLLNLIGEIILCVFDEQLDGSWTAGIDKKRLADTLCTTKGSRRMRVENALAVICESCELPKEQINVIKAIFAGLEGNKLDLAKIFPSEERTSDEKKALGIYFNKSDYEEVRAQVVDSGLLDDEQCELLDKMQKQYSAIALKQLLGNAKSVSESMCASYTRHQRNWDLIKKELRTEDNADEINKHYGELVGWTMVDGRRRSIRGTSTYEKTRQNANKYFSKLIEASNLSESKKMDLKHAIDEDRLFPVQRDSDNGVIPYQLHRNELRRILEKQGKYYPFLLDTFEKNGEQVNKIEGLLTFRVPYFVGPLVEREGMQPSDNGENHWMKRKKTGEITPWNFDKMVDKDESGRRFIERLVDTDSYLLGEATLPKNSMLYQEYEVLNELNNVRLSVRSGNRWENRRRQRLGREEKTLLIRNLFMKGGVVTKKAAENLLRKEYGRTYELSGLASESKFMSSMSSYGKLCRIFGAERVNKDSELMEQIIELQTVFEDKETLLHQLRMLDGLSDSDCELLARTHYTGWGKLSRKLLTTKVGECKIGDDFAPQKHSIIEIMRFEDRNFMEIITDKNYGFPEWIDEQNLGADKKQSLESMVDELHVSPKVKRGIIQSVRLIDDISKAVGKKPSRIFLELAGDIQASVRTTSRKNRLLELYKNAGLRKEFSDIYDRLEASDDKGLQDDRWFLYYTQLGKDMYTGEELDIDRLSSDYDIDHIIPQAVTQNDSLDNRVLVSRAANARKTDSFAYLPELVEARRGFWQELLDNRLISQTKFERLVRQNDFGRHEKERFVERSLVETRQIMKNVATLMRRRYGNSSAVIGLNSELTKEMRQYLGFEHKNRDINDYHHAQDALCLGVAGQFAVNRGFFDNGAVSDGAANAYNIYLQDYLRGYREKLKAGDRKHGKAFGFIVGSMASADENKRINPKTGEIAWSEADKDYLRRVMNYRKMLVTQKVGDSFGALYNETRYGAAVKEGHDGIAFDKNKADTSLYGGFSSAKVVYSILVELKGKVRLVNITMQEYSMLGDCPSDEALKKVLVAKKPEYAKAKILLRHIPSMQLIRYKGACMTIKSATELNNARQLWLDCDVYNALDDYLKCGTSKSSIDIMQIWDALFDAVNKHYPLHRVEESTLAKARTKFEKLDLDKQLDVLGMIVVALHADPGRANLSLVGLPSEWKRVRSVSFSDDDEFVFQSPSGLFETKITIAELKKAE

SEQ ID NO: 17726 - protein, 1180 aa, unidentified
  REGION 1..1180: note = Cas Enzyme sequence
MSKKVSRRYEEQAQEIRQRLGARPYSIGLDLGVGSIGIAVAAYDLKNKQPSDLVFVSSRIFTPSIGASERRQKRGQRNSLRHRANRLKFLWKLLAEKDLMLPYSEQDVPDPARLRFEDAVVRANPYALRLKGLNEQLTLSELGYALYHIANHRGSSSVRTFLDEEKSPDDKKLEEQQAMTEQLAKEKGFSTFIEVLAEFNANGLVGYRNSDSLKGKGVPVPTRDIISNEIDILLRTQKQFYPHVLSDDYCERIVSAMLYENEKIVPEAGNCPYFPDEKKLPRCHFLNEERRLWEAINNARIKMPMQEGVAKRYQSESFSDEQRHILFHIARSGTDITPKLVQKEFPALKTSVIVLQGKEKATQKIAGFRFRKLEEKPFWKRLNEEQKDAFFSAWTNTPDDKRLSNYLMGHFHLSEAEVVDALKTVSLIGDYGPIGKTATQLLMKHLEDGLTYTEAIEKGLEDGELQELSAWQEHALLPYYGQILTGSTQALMGKYWHSAFKEKRDNEGFFKPNTNSEEEKYGRIANPVVHQTLNELRKLMNELITILGDKPKEITVELARELKVGAEKREDIIKQQAKQEKEAARAFSEYCEPNNLDKRYIERFRLLEDQAFVCPYCLGHISVADIAENRVDVDHIFPRDDTADNSYGNKVVAHRHCNDIKGKRTPYAAFSNTSAWGPIMHYLDETPGMWKKRRKFETTEEEYAKYLQSKGFVSRFGSDNSYIAKAALEYLRCLFDSKNCSAVGSLKGMETSILRKAWNLQGIDDYLGSRHWSKNDEASPTSRKNRADNRHHGLDAIVALYCSRSLVQMINTMSEQGKRAVDIEAMIPIPGYTLEPNLPVADQRELFRKKILEFMELHAFVSMKTDNDVNGALLKDTVYSILGADPNGNDLVLCVRKKVKNISITDGSFKKIAEKIRSQFSEASHSWYSEKLKEQIQLIQEKNELVLEKYQNHLTDAENILKNENQYLIDNGKKPIEISNKSISKKALEMVGGYYYLISNNSRLKTLVIQEPMNNRKGFAIDKESNLCLDFYHDKQGQLCGEIIRKVNAMNPSYEPNYKQQGYILFVRLYQGDVCELKASIPNEGKDSNYSKAAGVKLPNAKTGRTFIIIKTFTERSVGIQIFFSNLAKSKTGQDTSFTLTTIKNYDVRKVQLSSAGLVRYVSPLLVDKLEKDEVELCGE

SEQ ID NO: 17727 - protein, 1003 aa, unidentified
  REGION 1..1003: note = Cas Enzyme sequence
MEITINREIGKLGLPRHLVLGMDPGIASCGFALIDTANHEILDLGVRLFDSPTHPKTGQSLAVIRRGFRSTRRNIDRTQARLKHCLQVLKAYGLIPQDATKEYFHTTKGDKQPLKLRVDGLDRLLNDREWALVLYSLCKRRGYIPHGEGSQDKSSEGGKVLSALAANKEAIAETSCRTVGEWLAQQPQSRNRGGNYDKCVTHAQLIEETHILFDAQRSFGSKYASPEFEAAYIEVCDWERSRKDFDRRTYDLVGHCSYFPTEKRAARCTLTSELVSAYGALGNITIIHENGTSRALSATERDECIAILFSCEPIRGNKDCAVKFGALRKALDLSSGDYFKGVPAADEKTREVYKPKGWRVLRNTLNAANPILLQRLRDDRNLADAVMEAVAYSSALPVLQEQLQGLPLSEAEIEALCRLPYSSKALNGYGNRSKKALDVLLDCLEEPEVLNLTQAENDCGLLGLRIAGAQLERSDRLMPYETWIERTGRTNNNPVVIRAMSQMRKVVNAICRKWGVPNEIHVELDRELRLPQRAKDEIAKANKKNEKNRERIAGQIAELRGCTADEVTGKQIEKYRLWEEQECFDLYTGAKIEVDRLISDDTYTQIDHILPFSRTGENSRNNKVLVLAKSNQDKREQTPYEWMSHDGAPSWDAFERRVQENQKLSRRKKNFLLEKDLDTKEGEFLARSFTDTAYMSREVCAYLADCLLFPDDGAKAHVVPTTGRATAWLRRRWGLNFGSNGEKDRSDDRHHATDACVIAACSRSLVIKTARINQETHWSITRGMNETQRRDAIMKALESVMPWETFANEVRAAHDFVVPTRFVPRKGKGELFEQTVYRYAGVNAQGKDLARKASSDKNIVMGNAVVSADEKSVIKVSEMLCLRLWHDPEAKKGQGAWYADPVYKADIPALKDGTYVPRIAKAHTGRKAWKPVPESAMKKPPLEIYLGDLVQIGDFVGRFSGYNIDNANWSFVDRLTRIKISCPTVGKLSNDMSPFVVRESPIK

SEQ ID NO: 17728 - protein, 1404 aa, unidentified
  REGION 1..1404: note = Cas Enzyme sequence
MKKLKQMSGPYSIGFELSSTAHGFVATDPNGNVLYHGKQPVMGTRVFKEGQHAAEARMPRTSRRGIQRRRGREHEMERVFAPVISPIDPDFFIRRRMSYKFGKIRFESDPIGFSYSRLFHSFPTLAHLDVALMESDSAMDPRLIFESVANHVVRRGHFLLENQNVSSTNSDIDTQVANYAEVLVSYFEDTLDERIEPSLEALDINGNVTARELQKRFASAMCVSGDDIQKKTEKAQIKAIADLVAGYKADLTALVPDAEKLPKVSISDGDALEEFLSDSCPDSLVPILMAAQALYTSWKLQGMLSYAPGKSLSHNQVAQYDVYGKQLRMLKNLALKYVAKQDADGNVDEDGFKDYVRFFGGPKCEDRYRYDKVQVKKQDSPKKNMGYTAYNLNVLGYEEFAKRVELLFKDTDAVNDPQYKTMMEAFANHAFLRRIHTVDNAAIPYQLHVEVVNRIIDNQGRFYPWLIDAREHILKVLTSRIPYYVGPLDSTDHGKAGENGTRFAWVKRLAGHEDAFVSPWNYEDHIDIDTTAELFIRRMTGECSYLDGEDVLAKNSLLYEKYCFFNELASLSFTEDGDSWMPFDAGMRKAIYDAASDGKTMTVKRIESVLQRDFFIAHPHVRGTSNPKAMSSKRSNYAYFCRLFDVKALSASDMSMAEDLVLWNTVFEDRDILRRKILKTYGDLLTEKAVDDFCHKRLSGWGKLSERLLTGIWADTASGDLCVMDVLEQGRPYGRYRGSSMNLMQILNDDALGFKMEIKRLNESHMQMAEGFDLNALPGSPALRRGVSQAIKVLDDIVSVAGKAPDCIYLKVTRTASNSRKGKRTAKRSDKIKQALKALDADAAADLGAAKLLRELGMFDEKEINERIYLYFHQAGKCLYTGKPIDITRIASNDYYVDHVVPLAYRKDESLDNKVLVYAEASRYKSETLLVSPAVQRKMLPFWRMLRNAGLMSERKLNALIRTEISEGMLKSIIGRQFTENSWEAKLFTAAVAAKYPGTVVIPVKAGVIGAVRSRIGIPKSLKANQFYHAHDALLAAEVGRYMELAKPAFVHNRVKYEQYMRKIKLVNEENKKTPKSQLDFFAGGFFFDRVDKDTGEVYWNKDEEVERIYRACGWKNLRVTYAAFEDGGAFWKQTIYSPREKSKLIATKSDRPAEIYGGYSSQTFANFFVYEVMKKKVKQLRFGAVPAAIASKSDPDTYNAMLEMYARGLAKTAKEKFVRIVRARVLKNTMIELYGERFRIAGEKQVYPVRQMPLAIDEMYLLKGVETIVAAGNAGASARIDFEKAAESLIGLWDLLLEKLPVNYPKLTVQLKLGSLKHPKDILAATSEYEFPAIVYKIAQAEIQVMEQASGLRNMSDTKILGGNTFGGSLVFTFNKVLNDPKSKACFIDTTPAGLHEVKTKIW

SEQ ID NO: 17729 - protein, 1404 aa, unidentified
  REGION 1..1404: note = Cas Enzyme sequence
MKKLKQMSGPYSIGFELSSTAHGFVATDPNGNVLYHGKQPVMGTRVFKEGQHAAEARMPRTSRRGIQRRRGREHEMERVFAPVISSIDPDFFIRRRMSYKLGKIRFESDPIGFSYSRLFHSFPTLAHLDVALMESDSAMDPRLIFESVANHVVRRGHFLLENQNVSSTNSDIDTQVANYAEVLVSYFEDTLDERIEPSLEALDINGNVTARELQKRFASAMCVSGDDIQKKTEKAQIKAIADLVAGYKADLTALVPDAEKLPKVSISDGDALEEFLSDSCPDSLVSVLMAAQALYTSWKLQGMLSYAPGKSLSHNQVAQYDVYGKQLRMLKNLALKYVAKQDADGNIDEDGFKDYVRFFGGPKCEDRYRYDKVQVKKQDSPKKNMGYTAYNLNVLGYEEFAKRVELLFKDTDAVNDPQYKTMMEAFANHAFLRRIHTVDNAAIPYQLHAEVVNRIIDNQGRFYPWLIDAREHILKVLTSRIPYYVGPLDSTDHGKAGENGTRFAWVKRLAGHEDAFVSPWNYEDHIDIDTTAELFIRRMTGECSYLDGEDVLAKNSLLYEKYCFFNELASLSFTEDGDSWMPFDAGMRKAIYDAASDGKTMTVKRIESVLQRDFFIAHPHVRGTSNPKAMSSKRSNYAYFCRLFDVKALSASDMSMAEDLVLWNTVFEDRDILRRKILKTYGDLLTEKEVDDFCHKRLSGWGKLSERLLTGIWADTASGDMCVMDVLEQGRPYGRYRGSSMNLMQILNDDVLGFKMEIKRLNDSHMQMAEGFDLNALPGSPALRRGVSQAMKVLDDIASVAGKAPDRIYLKVTRTASNSRKGKRTAKRSDKIKQALKALDADAAADLGAAKLLRELGMFDEKEINERIYLYFHQAGKCLYTGKPIDITRIASNDYYVDHVVPLAYRKDESLDNKVLVYAEASRYKSETLLVSPAVQRKMLPFWRMLRNAGLMSERKLNALIRTEISEGMLKSIIGRQFTENSWEAKLFTAAVAAKYPGTVVIPVKAGVIGAVRSRIGIPKSLKANQFYHAHDALLAAEVGRYMELAKPAFVHNRVKYEQYMRKIKLVNEENKKTPKSQLDFFAGGFFFDRVDKDTGEVYWNKDEEVERIYRACGWKNLRVTYAAFEDGGAFWKQTIYSPREKSKLIATKSDRPAEIYGGYSSQTFANFFVYEVMKKKVKQLRFGAVPAAIASKSDPDTYNAMLEMYARGLAKTAKEKFVRIVRARVLKNTMIELYGERFRIAGEKQVYPVRQMPLAIDEMYLLKGVETIVAAGNAGASARIDFEKAAESLVGFWDLLLEKLPVNYPKLTVQLKLGSLKHPKDILAATSEYEFPAIVYKIAQAEIQVMEQASGLRNMSDTKILGGNTFGGSLVFTFNKVLNDPKSKACFIDTTPAGLHEVKTKIW

SEQ ID NO: 17730 - protein, 1404 aa, unidentified
  REGION 1..1404: note = Cas Enzyme sequence
MKKLMQMSGPYSIGFELSSTAHGFVATDPNGNVLYHGKQPVMGTRVFKEGQHAAEARMPRSSRRGIQRRRGREHEMERVFAPVISSIDPDFFIRRRMSYKLGKIRFESDPIGFSYSRLFHSFPTLAHLDVALMEADSAMDPRLIFEAVANHVVRRGHFLLENQNVSSTNSDIDTQVANYAEVLVSYFEDTLDERIELSLEALDINGNVTARELQKQFASAMCVSGDDIQKKTEKAQIKAIADLVAGYKADLTVLVPDAEKLPKVSISDGDALDEFLADSCPDSLVPVLMAAQALYTSWKLQGMLSYAPGKSLSHNQVAQHDVYGKQLRMLKDLALKYVAKQDANGNVDEDGFKDYVRFFGGPKREDGYRYDKVQVKKQDSPKNNMGYTAYNLNVLGYEEFAKRVELLFKDTDAVDDSQYKTMMEAFANHAFLRRIHTVDNAAIPYQLHAEVVNRIIDNQGRFYPWLIDAREHILKVLTSRIPYYVGPLDSTDHGKAGENGTRFAWVKRLAGHEDAFVSPWNYEDHIDIDTTAELFIRRMTGECSYLDGEDVLAKNSLLYEKYCFFNELASLSFTEDGDSWMPFDAGMRRAIYDAASDGKTMTVKRIESVLQRDFFIAHSHVRGTSNPKAMSSKRSNYAYFCRLFDVKALSASDMSMAEDLVLWNTVFEDRDILRRKILKTYGDLLTEKAVDDFCHKHLSGWGKLSERLLTGIWADTASGDMCVMDVLEQGRPYGRYRGSSMNLMQILNDDVLGFKMEIKRLNDSHMQTAEGFDLNALPGSPALRRGVSQAMKVLDDIVSVAGKAPDRIYLKVTRTASNSRKGKRTAKRSDKIKQALKALDADAAADLGAAKLLRELGMFDEKEINERIYLYFHQAGKCLYTGKPIDITRIASNDYYVDHVVPLAYRKDESLDNKVLVYAEASRYKSETLLVSPAVQRKMLPFWRMLRNAGLMSERKLNALNRTEVSEGMLKSIIGRQFTENSWEAKLFTAAIAAKYPGTVVIPVKAGVIGAVRSRIGIPKSLKANQFYHAHDALLAAEVGRYMELAKPALVHNRVKYEQYMRKIKLVDEENKKAPKSQLDFFAGGFFFDRVDKDTGEVYWNKDEEVERIYRACGWKNLRVTYAAFEDGGAFWKQTIYSPREKSKLIATKSDRPAEIYGGYSSQTFSNFFVYEVMKKKVKQLRFGAVPAAIASKSDPDTYNAMLEMYARGLAKTAKEKFVRIVRARVLKNTMIELYGERFRIAGEKQVYPVRQMPLAIDEVYLLKGVETIAAAGNAGASAKIDFEKAAESLVGFWDLLLEKLPVNYPKLTVQLKLGSLKHPKDILAATSESEFPAIVYKIAEAEIQVMEQASGLRNMSDTKILGGNTFGGSLVFTFNKVLNDPKSKACFIDTTPAGLYEVKTKIW

SEQ ID NO: 17731 - protein, 1591 aa, unidentified
  REGION 1..1591: note = Cas Enzyme sequence
MAKILGLDLGTNSVGWAVINAKMANGKVEEYLSIDDTGVRIFPEGVEPTTIGQGDKEQSKNASRREHRQMRRQFYRKKLRKVKLLETLIDLKMCPLSEEGLNQWRKWYKDKKTEGKQFPTEDAFVEWLKLNPYELRAKALTDTLSLMELGRILYHFIQRRGFLSSRKGTEDGAIFKGKDNMSGIDATRSLINGQTLGKTLYDISFKEGEKYNRKKDEEGNELRVRARYTQRDMYISEFQQIWEKQAETLGLDTKEIKIKKVRFLDGNPGNNRNRKKISGYYKTYGKENVLIEGKRITTFKYIPLKTFLAGEIEVENEQLKFKSNESLLFWQRPLRSQKGLLDNCRFENKLPVIMGNGTFRMKNGKVLKRSKKPCPLSHPEFELFRAYQLINNIKYGKGRLLTKEQRELVLELINSKDSNFNFDLIPKALNLTYEKFNYEGDQKIAGNTTIKKLKPLFPEDVWNANYEKIWHCFYFFEDNDKLFAKLREDFSLNTNDSEKIAKIRLKEGYSNVSLKAIRNINPFLEKGYSYSDAVILGGIKNAFGKRWEYFEVDDFIERLEKDVIGIFYENNKEGEAIEKVKSYLSDPFNSYGFTKNDPCFTQLYHHSQEISEKELQDFVPEVENLRNPIVQQGLQEMRRLVNSLLNKYRVNYPDFKFDRIHVEMGRDLKNTKTKRRELTLKIRDNEQKNDEARKRLAEFGIRPTRDNLLRFLLYDEIQKQISGPVLCPYTGKVIGISDLLGGGNAVQIEHIIPYSVSLNDSFANKTLCEAKFNSLKAEKTPYEFYLQNPDPKLWGIKKYENTEDGWSEIAERAFKLLPYPKARRFTSKRKFEKATFIERQLNDTRYISRKAVELLSAVCEDVRMLPGQVTAELRHLWGINNILNPVNGFENFKAEVRGEERLAYYVVADENNRVVDICRKTNDRPNAVNNQLVISGSADKGSFTSKYLSLKVDVPELSNGNYWALFNVSEPHSFQPVFADKPESNEEQIVLKGRVEKEIFINDSVNKRIKTPGYGNGSYWARFSIVNKEFKFAEGRGKIKATGSKIALFGEVKEGLFTCHIYQCDTNLVDGKYWVLLELDFEKAEFTRTVNPKPEVDERQLLSYATVDETGAMAADPDPAYQLKTNQSAGRYYCIFDIQSVDETFFPMENEPPKFQKDQRLTEAVVWVDKATGEIKYDPKKNRDDHRHHAIDAITVALTEQGYLQRLSTYHAQNENAKRGIDSTENFPEPWDGFARDVKKAAEAMLISHKQNNKVLTKISKTVFKNGKRYQSVGNSVRGELHEMTLYGKKSYCKEKEFTTRVPISKLKFARTKGQAVYLDDVIDLGIRDAIFSTIKTCLKEKELVVLNSIEERIANIPTLFKVKEIEKEKKEINKLKKSITNSVELILQQQQFFLRNDGMRSKRLHKYDETEKRDPVPIKKVRVKRVINNAALVKSLNTYSSKKEKVVTGHQFVNPGNNHHVLIYEDFDGNLRENVVSFIEVVERQKQGEPLVQLPKDDGKRVITTLEINDMFLLGLNDEVEICKENAAVLNKHLYRVQKVSSSYYTFRHHLASTLDNKNEEISIQSFGAWRKFNPIKVNIDPLGNIKRIN

SEQ ID NO: 17732 - protein, 991 aa, unidentified
  REGION 1..991: note = Cas Enzyme sequence
MEVRGSKIMSTTLAIDFGSRNVGIALVQHCPDEPNRVLYAATLLVEAKPLKASVKPRATARRTRRTRKTHRRRLRRLAQALHGIPGVEGILRFCRRRGYSHDPEEPEDAETRALRFSREDFFQALRREIDRTIEPAERQRVLRACSRHLNESRRRAAELRPARFENRGTSKCQWEGCRRNVPRADHAFKERLQQALFAWLKPVFDVSADPQRLRRSIDHWIAELDGLARWHAKIDKADKEAAKEERESIDKRKRLVYKNLCARVRREAPKGVAEKFQKHWRKKYRRDLTNIVTGKRGGRVPYCREHSQRFVDFFLAGEQIPNRTDVREADLFGRTQQILFARLWRLTESRLLPLGGGRIDRVVVERVAIDVLAGKAKKRRELSETTAAEMYWHGPQYGFSSRLEMLREEFDGRCAYCGQPGAASEVEHLLPRSQFPFDSYFNLLPACQTCNEKKGARTAMAAGMKVHEESYQAYADYVAGLRIPHVFHTIKKGLLKLLSREEKPTEVERKLGMLADNLLIATTTQKGPRPLARYLAGKLEKVSGHRPAVGYVAGRHTAMYRSIILPEYDKAAEKAEGDLINHAIDAILLGCQLPSAAGAENRRWYARAEDINAWREKVREFGPALEDGLPRVARIDLIPHFEQDLGSGYCAIDLSAFGWNRTRQSGYNLEPVGKTKAGLPIHRERASKVLANLQDPDKRASQISRTAHPALRKLLESDPAKSPERFVRWLQQTTKAGLSAAKMSNHPSDRARKRMLMEFVDAPVERFLNSGDDHQEIPGLIGVRCLALGLGERADVARCDQQGKVFQYYTTDPHVKALYVGYRVKNESLDRSKPVRFWVNQMYALTVEDRKNTAAAMPDVLRCGRPLGSKGSLKQFLAEWRQAFDDFCRQLEIVKRFCITQGCVIEKTDGTRFQLRNFDKASRWMKGSPFKDIRRVFRSPIRLLKDDEGAKRGTAQDVEQRAAGTSMVSTRPACPSTSHPRPAPIEAEGQL

SEQ ID NO: 17733 - protein, 1076 aa, unidentified
  REGION 1..1076: note = Cas Enzyme sequence
MSVTLTIDPGSRNIGLALVRSRAGDRPSALYAACIVAEPKPLKELVVRRAQLRRMRRTRKTRRRRLRRLADALRGIAGAEAIVRFCRRRGYSHDPKRARDGRGADDSTGADKLLFNVSREDFFKALEAEVQRVIAEPDRQRVLAACRRHLNAARLPGRELRPPRFDNRAVGRCRWQDCPRRPRRRANAVKENLRQTLYEWLKPVFDEALAGLEQAEAAKAKSKMCAELDHWCSLLAKLAAEYRKLADEQPDQRDEKAIKKVSALLERRKNELYQKIVDWAQENAPAKAGRKFAEDFEAYCDKKRSKGKQKWEGVSAAGATQAGAVGQKKKKKKKKRGFGNQLDDIVVKGRAGRLQYCREHTEQYIQYFLEGKPIPNREDVLDRDIRSRRQKIVFDRLWALIRGRLLPLAGGRIDRIVVERVAFDVLAGTFADCQELFRTDEEKAAEMYWFGPRHGFKNELEMLRTEFAGRCAYCGQQFQDLEVEHILPRSRFPFDSYLVKVPACRQCNMKKGGRSILEAQMRIHPDAYDAYEQYLEKREVRHYFCDIKKGVLKLLTNGAQNWGFERLLGMIAHNIFEQGKSQNAPRALGRWLAGKLERETGVRPKVVFLSGRHTAAWRQQVLPDYEKAAEKAEGKKRNHAVDAILLGCDFPPVAFLDSQRKWWLSEDRLRRWEEQVKAAAPELADLAGDGDAAPARLPRVEAPPPIRFFEEDLGGGYFKIDLSAFGWNRRRQSGAKVDPVRMITTANGKLVAKREPAQAVLKDLLAEKQRDKRIGLIANRRLRQLLQSDPANAARNYVLWLQRQTARGLRAAKMGNHPADTKRREMLEQFINTPVDDFLRPSKRRTAKKAQQQTQSSDGRGNGQSAAEQTSAAEIPAIIGVCCLIAQKYTKYDVPRCDRNGKPLHYYASQPAIRALYVGYKRRKDGRLDRSKPEIFRVNQVWKVYYGPPGQDQDSPKARKVIEKLGQDSPLHGRMLGQRGSWQEFRKRWHEAFARLWADLGVEKRFQIAQGAVIEKTDGTCFLVRNFDNTEGWMRGSPWKDIRRVYRSPLHYLSAKAKAAFDHSSRSAATVAETIN

SEQ ID NO: 17734 - protein, 1217 aa, unidentified
  REGION 1..1217: note = Cas Enzyme sequence
VRTILGLDIGTNSVGSAWIDTEAGTVELGVGIFPAGVDEKPDGSRGAPINQKRRQVRAQRRSIRRRALRKQQLRRLLNESGLLPSAPDELQLLFSKERFDPWTLRRDGLSRELTPFEFGRVLLHMAQRRGALGVDAEADEDAGKVKEAIDRLRQELDGRTVGQFMADMRDERRDTIQGTQAETVNQPIRNRLGEFRWHADRQLVREEFDRLWQQQSQYDGPLAALLTDDLRQAMDDDAATETWRHRGALFGQRQTYWDTGTLGRCDLEPSDHQCPKCDMDAQEFLVREYVNNLRIDRDDGKGMQLLTDAERENVVDMLRREEKPTISKVKKELKADAAARRRQGLPNTCKLNVEVDAERKLNADDFYRTFVHGVFGEDFWNEATSQFRDDVNRTILRFDPQVPEHEGKLRSVAERFWKLDEATIDAFVEGWKDRPKKDTRVKLSRRAIRNLLPYLRKGLSISEARKEFAENPESGATRDQRARYAMAGTRLTKADRHYMAKHPHELPPAPNLSNPVVRKAIHEVRRHVNAWIKRKGEPPECIVVELAREASQPTKVRNEQLARNRRRDVIRKKIVEKFSLENLRKNQQSRAIERVLLCRQQRGVSAYSGKPITERMAADGTDLEIDHIVPRSRSQDNSMANRVLVFRSENRDKGNKTVKEWKANDPVGFGTIEQALRHLTDGTPDPYFTPRECSRKWENLHRDAPSTDEFHSSQLTDTAYAARQVVGYLKNALYADAPEGRRYVFTTKGKYTAILRRDWGLMESLLEQDNQLPGRSLVPVDDRETAHGESGVARRGLKDRRDHIHHAIDAVVVAFCREEGQVLSNLAHAAKRQEEAHAEGGYWPSREAVPPPQPWKTIDEFRQCVIDAAKDLVISHRAVKRRLVEAFHEETLLGPVVNDLAKNERHRTEDPNTLFTKRISAERLTSNHLRVPDGWAEERAKLDTQGLTKAAKKAIRRRLNAMADPRPTKSGIVRDRELRDQIRRCLTQNAVDPDSFDANELKSLVDNGAICMDSGVPIKRVILLVTATDPVRIDRRHWDESIGKSVPSEDRSIREREQRIYVGGSNFHIEIREDAKTGKWSGIVVTTFESAKRVRQQKLDAVDRSQIDGKDFVMSLSEGETLFCRRADRPDEPASYFIVAKLDRKAGGRQDVIHFAPHWDARRPLQLKKSSTDEDRAAAQDRWSATSSTLRGLGQEPDEPPYKVQVGPLGDVQRRND

SEQ ID NO: 17735 - protein, 1217 aa, unidentified; identical to SEQ ID NO: 17734
  REGION 1..1217: note = Cas Enzyme sequence

SEQ ID NO: 17736 - protein, 1071 aa, unidentified
  REGION 1..1071: note = Cas Enzyme sequence
IAKHGHFPFVFLLHLRGGRIMKHYDYVLGLDLGVASLGWALIEIDDNAQPISLLDAGVRCWDLNNNTAEDVTRGKEVSPNKERRDARLQRRQIYRRAKRYKKTFRILQELGLFDQGPRDSLARKAYIDKIDQQAKLWLVAHVPEAANDPWLHHNYVYRLRAAALDHPLPPELLGRVFYSLAQRRGFLSNRKGTISSDEKGVVKQAITQLEKDIQQVGARTLGEFLTKLNPHEQRIRGHYTSRSMYIAEFELIYNAQRRHYPKLLTSRARKLLYEAIFYQRPLKSQRSRVGRCELEIYLKQDADGKVTVLHPFRRAPKASLEAQRLRYMQRINDLEIISPDGEIRPLTAEERQKLYDLAEHRPELKFNDIRKALGLPAGKQSEWRFNLEAGGENKLPGNTTAARIRNILGDAWDSLGEKQKKLVDDLLAFTQDDALYKHLQKVWGFDAQTADLLVNMPLEEGFAAFSRRAIRRLLPLLEQGMRLNAAIKVAYGDHNRSTEVHDLLPPVREVFREINNPFVIRTMTQLRKIVNGVIRKHGKPARIHIELARELKEPRKKRKLEYTRQRQRQQEREEAAIQIRKALDREPKSWEIEKYLLAEECNWECPYTGRTVPGASIQERIRALFSEPSDFDVEHILPFSRSLDNSFSNKTLCYHSENRSVKQNLTPYEAYSHDPVRWKEILSRVSKFKGPYAEDKLKKFQLEEIPEDFAQRHLSDTRYASRLAADYLGLLYGGRVDAEGQQRVFTVSGKLTALVRNAWKLNSVLGSDQKNRNDLRNHAIDAIVIALASPSLLYHYRELARVLARTSCNFVTLDPPWESFHQDVNRRIETMIATFSPNRRMSGALHEETFYSLSGENTVTVRKALKNMSIHEVEKIVDPAIRAKVKNKLKALGKNDPKIFTDEKNLPAIRVRKKGSKIKRFPIKSARIFVHQRVVPIGAGHRLRYVIPGNNHHAEVYAILDANGNELKYRVKAVSLLEAWERKRKGKPIICTNHGPGTRFKCVLRKGDYIKFVKDNRLLRVVSVSDNYIAGKDVNDGRKITDIKKNKELIVVCRKRMLWSAANERTGTPKA

SEQ ID NO: 17737 - protein, 1379 aa, unidentified
  REGION 1..1379: note = Cas Enzyme sequence
MKRILGLDLGTTSIGWALVNEAENNEEQSTIIRLGVRVNPLSVDERSNFEKGKSITTNADRTLKRSMRRNLQRYKLRRAQLRKVLIENGFISEDTLLSENGENTTYESYRLRAKAAKEEITLEQLARVLLMINKKRGYKSSRKLKGQDEGQIIDGMTIAKKLYDENLTPGEYLLSLHKEGKKYSPDFYRSDLLDELDKIWSEQSKYYPEILTEDFRKQIEGKGKLNTSKIFLAKYQIYTADNKAPDKKGQALEWRVKATKEKLPIEEMAFVIADVNGSISNSSGYLGEISDRSKELYFKKQTVGQNLYEKLISDRNFSLRNKTFYRQDYLDEFEKIWETQAKYHKELTPKLKKEIRDIIIFYQRRLKSQKGLINICEFEGKEIEYIVDGKAKKKLVGPRVCPKSSPLFQEFKIWQILNNVKVISKKDNADRFLYPEEMDTLAQELAIRESLKSDDALKILFNNYKDFKLNYEKLEGNRTISSLFDAYKKIVELSGHDISGFNKQRAPEVINAIKEVFTALGFNTGILWFDSLAKGKDLENQPLYILWHLLYSFEGDNSRTGNEALINKIMALTSFPKEFAAIISSISFQPDYGSLSTKAICKIIPHLKDGIAFAGRKERPEEPSACEYAGYRHSKHSLTKEEIENKKLLDRLEIIKKNSLRNPVVEKILNQMVNVVNAVIEKYGRPDEIRLELARELKNSAEERKSLTDTINKNTIENEQIRKILRTEFGLQYISRNDIIRYKLYKELEYRGYKTLYTNTYIPKEKLFSEEFDIEHIIPRSRLFDDSFSNKTLETREANIEKGNDTAYDYVLRKYGQEGLDSFLACIKDLEEKRIITGSKYKKLKTSINEIPDDFIDRDLRDTQYIARKAKEILETISKHVVTTTGSITARLREDWQLVDVMKDLNWDKYKALGLTEEIEGKNGQRVRVVKDWTKRNDHRHHAVDALVIAFTKRCYIQYLNNLNARSDKGSEIFAIEAKELERDNKGKLRFKAPIEIKAFRTIAKEHLENVLVSIKAKNKVVTRNINITKKKNGLNKKIQLTPRGQLHNETIYGSALRYVSKEEKVGAAFNEELINKVANKKYREALLNRLHTNGGDPKKAFTGKNSLAKQPIYLDKQRGIVVPDKVKIVNKELIYTIRKEVAPDLNVEKVLDKKVRLCLEARLKEYNNDPKKAFSNIDEYPIWLNKEKGIKIRRVTITGVANAQALHDKNDKDGKPVLDEYGNPIPVDFVNTGNNHHVAIYRDSKGILQERVVSFLEATTRAVLGLTIIDKEYNSELGWEFLFSMKQNEYFVFPDKDFKPNEIDLMKSENYSDVSPHLFRVQKLSTKDYWFRHHLDTTVDVHNALKGIAWLRIGPSGLEGAVKVRINHIGEIVFVGEE

SEQ ID NO: 17738 - protein, 1178 aa, unidentified
  REGION 1..1178: note = Cas Enzyme sequence
MKKVLGLDIGVNSVGYALIGSDTEDNSLKILKTGVRIVNEDPDFHGNFYQGNSASKNEARRTKRMIRRGNQRFKARRDALYRTLRKNSMFPSDKLLNRVSEGTLYRLRAMAVSERLTLEEIGRVFIHLNQRRGYKSNRKSEKKTEEGSYLANIAELGELTKDLTIGQFWDAYISFKSNNIDRIPIVLLDWFRFRTETEPDFRIRETIFPRDSYISEFDKIWECQASFYPTVLTGMPGKTFRENKGTLYQRIRNEIIFYQRKLKSQKHLVSDCSFEKGHKVVPKSSPFYQEFRIWQQINNLEVTDLSNNKMPIESEGRKRVFDALHDTDQLNKRNTLPYTAILKILGYSGRSYHLNFNMLEGNKTYITIFNALKKAGIEQPDRYLSFDNTQKIVSTGLYDLWHITYSLDDESDVIKTLVKRYGFTYNQAEIIAGEVGYTSDYGSLSTRAIRKLLPYLEEGKNYYEACVAVGYQNPEHVQREELKIHMDNIFPNSLRNPVVEQVLNQVVNVVNGIIDTYGHIDEVRVELARDLKNNAKQRKELTKKNRNLRKLNDTISLRLKQEHGFSRVSGSDLLRYRLWDETEKRCLYCGQNITVSQLYNGEAEIEHIIPWSRSFNDAMTNKIIAHSKCNRDKDQMTAYDFMASKGEAELGRYVADVNRLFTEGSGRLDSDKKVRITRAKKDNLLCKGSEIKGDFLARQLKDTQYIVLETVSRLKDVFPKVTTTTGSVTDYLKETWQLKSLIDEMNIDKYRSVGETEWREEKDRENGLRKVERIKNWSKRDDHRHHALDALVVALTTQGIIQRINNANKMFETTREMKEKTFGFLPPAPDLRRKAMESLGEILVSFKKPGSKVLSRKVNVINTSKGKKEQVTWAPRGSLHEDTIFGICRWYEKIKVNKKLNEKTASQIVGEEVRMAVLERLATFNGDSSKAFEKPLFLGEKEIKEVTILSTRFTKRVTLSEKITPAQVEKIIDPTIQKLVRERIESKGGIKQAFRDYLNDPIWQNTEKGIMLKHVTVFDDGNLESVRNGYVYTKGNHHALIYSDANGRYFDHIVSFWEAVSNCLVNLDTNGSIYPVIDRRDKGNHKFVFSMQINDLFVFDVNPEEVNFFDPVNKPLLAKNLYRVQAMSKGDYLFRHQYEATVQKKYDFTYKRITSMDKLKGAVKIRINHLGDIIKIGE

SEQ ID NO: 17739 - protein, 1278 aa, unidentified
  REGION 1..1278: note = Cas Enzyme sequence
MKKILGLDLGTNSIGWAIIEVDENNKPIRIIAMGSRIIPLNSNDRDQFQKGQAITKNQDRTTARTQRKGYDRKQLKKSDDFKYSLKKALENLNIFPSEELLKLPSLELWELRSKSVSENITGEQLGRILYMLNQKRGYKSARSEANQDKKDTDYVAEVKGRYAQLKDKNQTIGQYFYGELLIANQNGTYFRTKEKVYPREAYIKEFDSIMDAQKDKHSFLTNDVIENLRNEIIYYQRKLKSQKGLVNICEFEGFETTYIDKETKKEKKIFTGPKVAPKTSPLSQLCKIWEVVNNISLKTKNPDGSKYKWGDKTPTIAEKQEIVTYLNCNSNLSFTELLKILKLKKEDVYANKQILKGIQGNITYSEIFKILGKDDNFQFNTAIIPSNHTAILVDKKTGEILAEKDGLHLDASLEKEPFYQLWHTIYSIKDLDECKNALIKRFNFSEEIADKLSRIDFNKQGFSNKSNKAMRKILPYLMQGYDYSQASNFAGYNHSNSLTKDEQSQRVTIDKLELLQKNSLRQPIVEKILNQMINVVNAIINKYGKPDEIKVELARELKQSKDERESSDKYNRDNETINKEIVTRLSELDLPTTKRYIQKYKFIFPTRNKDWKKADTSNQCIYCGIPFSLTEALSGDNFDVDHIVPKALLFDDSQTNKVLVHRSCNSNKTNKTAYDYIAGKGEPELSMYLLRVDDWFKRGIISYSKMQRLKISYEEYLERKKLKKETETDRKIWESFIDRQLRETQYIAKKSKEILQQICNNVTSTEGTVTAELRRVWGWDDVLMNLQLEKYKAIEGQTIIKEWTSDHGKRKHTKEEIVNWTKRDDHRHHAIDALVIACTQQGFIQRINTLSSSDVKDAMKREIEVAKIQFNENSDTLSKYLATKKPFSTFEIEKEAEKILVSFKAGKKVATNGVRKVKINGKKKVIQKDLIIPRGALHEQFVYGKISTIAKDFKTDTLIKFSIKYLFENSDTIVDAKIKDLIKFRLSNHNNDIKEALNSIKKDPIYIDDNKKESLVTAYCYKDEFVIKYKIGDFKKDDVKYIVDEKVKTLVKARLDKYNGKEKEAFKDVLWFNEEKQIPIRTIRCFTGLSAVEPIKKDENGKNIGFAILGNNHHIAIYKDKNNVKIQHTCTFWHAVERKKYKIPYIIKNTTDLWSNIIEKKLPETFTAKLPLDNLELEFSMQQNEMFILDLPTEKFEEAINKNNLPLLSKHLYLVWSVSDNNYWFRHHLETKNSDLKKIDNAKESKRFYNIRSIGALVALNPIKIRLNHLGEITKIGE

SEQ ID NO: 17740 - protein, 1532 aa, unidentified
  REGION 1..1532: note = Cas Enzyme sequence
MKKILGLDLGTNSIGWSLIKQDYENNAGEIIGLGSRIIPMSQEIINDFNKGASISQTASRTGYRGVRRLLERNLLRRERLHRTLNILGYLPEHFANQIDFEKKLGQFIDNSEPKIAYKEIKTSDNKIQHEFIFKKAFEEMLEDFKTHQPNLLLNDKKVPYDWTIYYLRKKALTAKIEKEELAWLLLHFNQKRGYYQLRGEEEEDTPNKLVEFHALKVVEVTADEQQKGKTDIWYNVILENGWIYRRSSKAPLFDWKGKIQEFIVTTELNDDKSIKLNKDGNEKRSFKAVDSELDWVAIKKSTEEKIDKSKKTVGCYIYETLLQNPNQKIIGKLVRTIERKFYKEELKQILEKQVLEHPELQNRKLYNACIEGLYENNTAHRENIKEKNFVHLFVNDILFYQRPLKSKKSLISDCPFEQRTYLKDGKKEIQSIKCISKSNPLFQEFRLWQFIQNLKIYQKEKTIDGKAYSDVNVTTEFLKSEDDYSNLFDWLNERKEIDQKAFLKYPAFNLKKNAENYRWNYVEDKSYPCNETHNAIVNRLSKVQKVPSDFLTRDKEQDLWHILYSVEDKIEIEQALKSFAIKNNLSEDFSEVFKKIKPFDKDYGAYSEKAIKKLLPLMRMGKYWSEEAIHPQTKNRIEKIINGEVDDKIKDRVRDKSIHLNTINDFKALPLWLTSYIVYDRHSEDSNAMQWKRPEDIENFLKEFKQHSLRNPIVEQVITETLRVVKDIWKTYGNGSANFFDEIHIELGREMKNPANIREDMTKKMSANENTNLRIKALLSEFLNDASYENIRPYSPSQQEILKIYEEGVLNSEVEINEDILKISKTAQPSTSELNKYKLWLEQKYRSPYTGEIIPLNKLFTSAYEIEHVIPQSRYFDDSLSNKVICEAEVNKDKDKSTAYEYIRDNHGKKIELSFGKVVTIFEEKEYEDFVKRNYAKNRSKLNKLMMEEIPESFIQRQLNDSRYISKVVKNLLSSIVREDYEQESTSKHIVSSNGNITNVLKQDWGLNDVWNDIVSPRFERLNELTKSTNFGEWTNKNGKRVFQTQVPLELQKGFNKKRIDHRHHALDALVIACASKNHINYLNNQYAKSDTNRYDLQKKLRRHEQVEITDKKTGEKKKINVAKEFFKPWDNFTIQAKDSLENTVISFKQNLRVINKTVNYYQKWVADGNGDLKKQTVKQEGNNWAIRKPMHKETVSGSVSLRKIKNGVSLLNAIDNYEMIVDKSLRKKIKQLIEEKNDKKKIQTFFKNIENKWNDKDVTKVDVYYFDNDNVATRSKLDESYTSKFISDSVTDTGIQKILLKHLEKYSETNGSKIIEHPELAFSPDGIDDLNKNIISLNNGKFHHSIQKVRTYEAKGNKFKVGHTGNKKDKYVEAAKGTNLFFAIYKDEKGKRNYETIPLNIVIENQKQGALQNIKPEFCSVPTKNEKGDSLLFHLSPNDLVYVPTNEEFENPNLVDLKKISKEQINRIYKTVSFTNTQAFFVKNEVANTIVNKVEYSALNKMERGINGEMIKDVCWKIKTDRLGNILNVLK

SEQ ID NO: 17741 - protein, 1217 aa, unidentified
  REGION 1..1217: note = Cas Enzyme sequence
MKKILGLDLGVASVGWALINVENDIPTEILGMGSRIIPLTPDDANEFSTGNAISKNQKRTERRTQRKGYDRYQLRRKNLTNFLRKFNMSPTEELIKLDTLELWGLRAKAVNEPITLVELGRILYHLNQKRGYKSAKSDDVDDKKQRDYVANVKNRHTIIKGLGLTIGQYFYDQLQKDKHYRTKEQVFPRAAYIEEFEAIWDFQAKHYPAILTEENKEIVRDEIIYFQRNLRSCKHLVSLCEFEMRAYKNKEGKTVYDGPKVAPRSSPLFQVCKIWESINNLVLKNRKGIPFEFTLEHKQALFSHLDNNEKLTINDLYKILGISKAEGWWGGKAIGKGLQGNITKMQISKTLNGIVDYQKYLQFNLKSIDTNLVDDETGEIVQQISPDFEKEPLYRLWHTIYSIHDKEELAKVLCKNFSIDEPEVVDALFKIDLVKAGFGNKSAKAIRRILPYLQNGFMYSEACLAAGFRHSESLTVAENMARELLARLPQIKKNELKQPIVEKILNQMINLVNAVIDQYGTIDEIRVELARELKQSKDERNATDKNMRLREKENDTYAKRILLDYGLTASRTRIQKFRMWEESRQKCFYCGQTVNVNEFLKGFDVEVEHIIPKSLFFDDGFSNKVCACRKCNSEKGNQTAFDYMKSKAENEFESYLTRIEEYYKNGDISKTKKERLLTPKEKIPTDFIDRQLRETQYIARKAKTILAQVARNVWATSGSVTDFIRHTWGWDQILHDLQIDKYRLCGQTEMVEFVHKNQKHSEERITGWSKRLDHRHHAIDALVVACTRQGFIQRLNNLNTERDAMWQELKNQSEEHKGKFSSLERWLEEQPHFSKENVQNKVAEILVSFKPGKKAASTGKRIKYSNGKKIVLQEGIIVPRGALHEEGLYGEIKRYYKDVKTKEVLLNAQIVKKYNIGVGSQGFLFTGKETVEIKSKTDERTGITTTSVEDKIQKALDCIVDKRVQDVVLERLNQGFENGKTYKDDAKKALSNFKDLNNVPIYLDKNKSIPIKSVRCFTGLSAVEAIRYNEKNETTGFVKPGNNHHIAFYVDKEGNKQVHVVTFWHAVERKKYGIPVFITNPPLVWDTVQEKEFPDSFLRNLPNVNWTFVNSLQQNEMFILGMLYEDLENDLKKKEYDRLTKYMYCIQNISVGSKGKVVQPVIRISHHIETQFEINKSNKPDKRFFNIQSIDAWEKLNPVKVVVNYLGQITRINNNPI

SEQ ID NO: 17742 - protein, 1175 aa, unidentified
  REGION 1..1175: note = Cas Enzyme sequence
MKKILGLDLGSASIGWAVVRENSEELLTEDVSGSTAPNDAIVALGSRIIPLTTDESTGFSKGSTLTKNADRTQKRTQRKGYDRYQLRRGLLLQELSRLGMYSGQTLRLSTLGLWELRAKAVTEQVSLPELGRVLCHINQKRGYRTVKSDFEDKKQGKYVEAVVGRYRELHAQGLTVGQYLYKELSSDPAFRCKDRVYPRAAYVEEYDAIMDCQKRFYPEVLTGEVIAHLRDYIIFHQRPLKSCKHLVARCELERREALIGGRIRNCGPRVAPRSSPLFQVCKLWEMINNLRIENKEGDPLVLTLEQKQALFAFMNTHAKFTAAKLTSVLGLKSREWKIANAIGTGLQGNTTYCALSAALEKCPDRGKLLAFELHAVDGDKVHADTGEIVQVIDTSFEKQPLYRLWHALYSISDIDTLREVLGQNFGIADPETLDRLCRIDFVKSGYGNKSSRALRKILPYLQQGMQYYQAKCMAGYDDAPWNKEQNQVRELAERLLPVPKGELRQPVVEKVLNQLVNLVNALMAEYGPFDEIRVELARELQQSREERESASRSMAENNKRNEQVAQKIQQEYGLTPTRSRIQKYRLWTESDHQCMYCGQLVNVAEFLRGVDVEVEHIIPRSMLFDDSYSNKVCACRKCNKDKDNRTAFDFMKTKPEGEFAAYLERVNSLAEAYKPNRGLDVGISETKKRKLLMRKQDIPTDFIARQMRETQYISKKAKEMLQTVCRNVYSTSGSITDYIRHVWGWDDVLHEINFEGYRAAGLVQTCEREVDGRKQQVERIVDWSKRLDHRHHALDALVIACTKQGYIQRINNLASLGEITFRSDAGKAPDGASRERRTRLERYIRMQPHFSRAEVIRAVKGIAVSFKADKRTVTPGKRYVYRKGKRICVQRGILVPRGPLSEESVYGRIHDEGKEKYVLRYEVDTIDLKKLDSVVDQGIREILRQRLEQFGGNPKKAYATPVYDHQGRAIRSVRCFTNLKVAVPLRYDEQGQPIAFVKTGNNHHVAIYEDEKGRWHEHMVTFWHAVDRKRYGLPILITDPGDVWDRVTDRMPEDFQRQLPPSATWRFVFSMQRNEMFVLGMEEEAYRKALSEQDTATLCQYLYRVQNITAGAYVFRKHTETQSDDRYPDEHGEKIFSLPKSKARGAVHWIKSFGALQALNPHKVHVSITGKISEV

SEQ ID NO: 17743 - protein, 1291 aa, unidentified
  REGION 1..1291: note = Cas Enzyme sequence
MKSMRTLGLDLGTNSIGWAVLETQGRKVALLDKGVYLFPKGVGEEKKEYSLAAERTTYRASRRLKMRRRWRKQATLATLMKHDLCPGLTEEALGEWKQKRYQYPGNETFRQWLNTKAVTKDGKPAGPYYCRWRAATEQLDLEKPEDRYCLGRAFYHLAQRRGYKSNRISGEEKDGAVHGEIAKLDEKRHGRTLGQYFYEECLGKEPVRGSGHYTSRPQYEEEFRTICEKQALKPELVNELGKNIFMQRPLRSQKGTVGKCIYEPSKARASDSHPLTERFRLLQIVNNIRVADPGSTDMRPLNDTERKQAISWLETQSRIITFDKLAKKLVPRNMKPVCGQNKYSDEADTKCWRFNYRGDSGLPASPFTARMIKLFGADWRAALHSCYRKAGNKSIEQVVDDVWHVIFSFDDAEKLKAFGIEQLGLDQEQAKEFANPLPIGYGSLSLAAMRRILPFLEKGLIYSHSVFLAKLPDLLAAKGIEWAGEESSLTYSIRELLDTHTQAAWSEKAANSLISKFREDHVDPSSFLMTEATRLRFRDQVEDAIKEEAGGARWNEVTPVLRAELLDRAMTDIVHWTGQRDGFMPVKRLDERVKCLLAERYKLDEKVLDALYHPSEVEAYRSATRNNEGILQLGSPRIDSIRNPVFMRAMFQLRRLINSMLKEGLIDGETRIRIEMARDLNTFNMRAAIERDQREHQKERDRIHTEIAGLPCAPSVISDRDVLKYMLWEEQDRKCLYTGVTIEISAFLGDNPAYDIEHTIPRSRRLDNSQSNLTLCDRHFNRTIKRNRLPAELPQAEEIQQRVGLLWDDKIEELQKLVEKRRASSRSAADKATKDTIRQSLHYEQIRLRHYKAKRDSFFRADAPEGFTNSQLVDTRLICKYAMQYLKTAFPKVYSIKAGAVSAVKEIWGLDDKNRGDHAHHAIDAIVTACMNPGWYSELAEFYHQYERYLFNEAGRPATPQPWPGFDRDLNENVAKNILVVHYSPDNLFKQTRKVVRLRGKIVKDSGTPLYAQGDSVRGALHQDTIYAKIQDPAEQKNGETGSLKAVVRRLLDKTFKDFDKIVDPQIRQKVMDQKEALKAGEQVWFDQEQQIPIKKVRCYATNNKAENLITLNAHRDKSRQAHKQHRYAANDGNYITALYRGEINGKAKADWKVINNFEAVQAAKRKSWESIIPQTDENGLSIRHLLKKNTLVLFKQSSDEDLKKFNQEELSRRLFRITVMEGNRIKAIHHRCGLAVGDIPSWPSKIDFVAQTPSASVYLSVNGIHIAVEGDEFRLNPMGHIHWLEAGDDA

SEQ ID NO: 17744 - protein, 1117 aa, unidentified
  REGION 1..1117: note = Cas Enzyme sequence
IYRRTLRKDLLRKALAEAGIDPGKELFEGLSKLSLWELRAKAASEQISLDELGRVLYHLNQKRGFKSNRKTDGVEEDPKKESEYKAEIRKNAQMLEEAKQTIGQYMFQELSNDQYFKLKGRIFPRQAYANEFNAIWECQSKFYSNTLTEELRTRIQDEIIFHQRPLKSQKALVSRCEFEKRYQWVNGKKMDVSPRVTPKSSPLAQWSKIYEAVNNIRFKDEYGKPIEVSAEAFAKVSESLKWKAKALPAEIIKLLGVPKDSTHNIGEKGIQGDTTFSTIANAIKGLDGEAELLALLQDFSVSIDLIEDKEQTLVDEETGEVFNFYSKRINNSFEKSNYYRLWHLLYSVDNEETLMKNLVEDFNCSFEMARRLVKIDFTKAGFSNKSAAAIKKILPYLMEGNGYSRAMECAGYRHSDYLDKAENEARVLLDKIPLLQKNSLRQPVVEKVLNQLINIVNAIIEHPNYGRPDEIRVELARELKQCKDERNRTASNISKNEKRNKEIEDRLRKEYGFVKITKSLINKVKIYEEVGGISPYTGKRIALADFLNGAGVDVEHIIPKSRLFDDSLSNKTMAESWVNKAKGNMTAFDFMKAQPIAGLQSFDDYIAMVNLWMKAGVNGGKISRTKYQRLLCTEKDIPKDFIERQLRQSQYISKKASQVLGLACRNVHATSGGVTDFLREKWGWNDVLKKVNWERYEKLGLTSIETREDGKRIYNIEGWSKRDDHRHHAIDALVVACTKQSYIQSLNRLNQFVNKTNTADGLKDAEHFKLKDIAGKAPFQVDDIVERASKIIVSFKPGKRVSSKSKNKATGHVSIIPRGALSKETVYGKIKIQSKREVQLNKNFNSEWLIADKYLRVVIRERIKEYNGDLAKAFKAPIFLADGVTAIKKVEIYEWKEETVVKYPLSNISQKDLVYVVDPAVKQKLQAFFDKYPNEKEAIKNIGTEPIWFNEEKKIPIRTVRLMAKLGKLVPQKQVSPTEAKGFVDSGNNHHLAVYERPDGTLFDVMISFQEAFERKANGIPLYLNEYEGAKLKWKFEQNDLFEIQNAEGKVMYYRMQKVSKKSSGAIDMMLRSISETNLNDTKENLKMNVYYNIQSLSALQRVNPKVIRLNTLGEIL

SEQ ID NO: 17745 - protein, 1087 aa, unidentified
  REGION 1..1087: note = Cas Enzyme sequence
MAAIAIDDDGKPTEILSAISLIHDSGVDPDSAKSAATRLATSGIARRTRRLYRRKRKRLAKLDKFISSQGWPLKEFEEYEDPFYPWRVRAELATTPITDQQELGEKLSIALRHIARHRGWRNPYSKITALYTVAEPSDAFLAIQGECAKKLGRSIPQTTTVGQLVASMNLGKTRLRGKANPHGKEAGLFTANKLQQSDYANEIHTIAKVQGFSNELVKQIIDHVFAAESPKGSAAERVGKDPLQPTKKRALKASDAFQRYRIAALIGNLRIRNSKGNRRLTAEDTRLVFDYLRSLPPKQEPTWQLVAEQLKIDRGNLVGTAIMTDDGERAGAKPPVHETNRLMESTKIKPLAVWWKSADADARAAMVKALSNAEVDDFDSQAGAQVQEFFFGISDKDHEELDKLHLPIGRAAYSEGTLVRLTKRMIDEGMDLYEARQAEFKIPNDWAPPAPEIGEQVGNPAVDRVLKATARWLNAAERQWGTPKSVNIEHVRDAFMSESSARKLDQDNQRRAKRNEEIVAKMQEILGIEGRPSRADVWRFQSVERQNCQCAYCGTQISYKNSEMDHIVPRAGEGSTNTRDNLVAVCRECNSSKSNIAFAVWAENTSRPGVSVQKAVERTRHWVTDAGLRESEFKKFRKQVCDRLRRKATDEPIDARSLESVAWMANELRSRITQKFKDGDTKVRVYNGTLTAKARRASGISGKLEFVDGKGKSRLDRRHHVVDAAVVAFMSNYVAETLALRSNMKFDYELRSGKKSKQKLEHKKPKYKTFTGPTPAHQTEWVKWNIRMQALAELLNNALAQDRIVVMHNLRLRLGNGAAHEDTIGKLTRIKVGDAISTTDIDRASSEALWCALTRDPDFDPKTGLPENPNRTIRIHGTHLTASDEITVFPVTAASIPIRDGFAKLGSNYHHVRLFRVPNGKKYKYCLMQVYTVDLLKFRKEDLFTVELKPQTISVRTCEAPLRKALANGTAEYLGWLVSDDELFVNISSFDTPGIVKLREEYGPVNRWRLAGFNSNTQMVLRPLYLSKEGLKPDVDPEIKKIIDNRGWFITVNKLFSTGHVTVVRRDALGRPRLHSAAHLPICWEVK

SEQ ID NO: 17746 - protein, 1013 aa, unidentified
  REGION 1..1013: note = Cas Enzyme sequence
TGGVMDRVRAELATTPITDKQELGEKLSIALRHIARHRGWRNPYSKVTALYTVAEPSDAFLAIQGECAKKLGRSIPQTTTVGQLVASMNLGKTRLRGKAKLANKANPHGKEAGLFTANKLQQSDYANEIHTIAKVQGFSNELVKQIIDHVFAAESPKGSAAERVGKDPLQPTKKRALKASDAFQRYRIAALIGNLRIRNSKGNRRLTAEDTRLVFDYLRSLPPKQEPTWQLVAEQLKIDRGNLVGTAIMTDDGERAGAKPPVHETNRLMESTKIKLLATWWKSADADARAAMVKALSNAEVDDFDSQAGAQVQEFFFGISDKDHEELDKLHLPIGRAAYSEDTLVRLTKRMIDEGMDLYEARQAEFKIPNDWAPPAPEIGEQVGNPAVDRVLKATARWLNAAERQWGTPKSVNIEHVRDAFMSESSARKLDQDNQRRAKRNEEIVAKMQEILGIEGRPSRADVWRFQSVERQNCQCAYCGTQISYKNSEMDHIVPRAGEGSTNTRDNLVAVCRECNSSKSNIAFAVWAENTSRPGVSVQKAVERTRHWVTDSGLRESEFKKFRKQVCDRLRRKATDEPIDARSLESVAWMANELRSRITQKFKDGDTKVRVYNGTLTAKARRASGISGKLEFVDGKGKSRLDRRHHVVDAAVVAFMSNYVAETLALRSNMKFDYELRSGKKSKQKLEHKKPKYKTFTGPTPAHQTEWVKWNIRMQALAELLNNALAQDRIVVMHNLRLRLGNGAAHEDTIGKLTRIKVGDAISTTDIDRASSEALWCALTRDPDFDPKTGLPENPNRTIRIHGTHLTASDEITVFPVTAASIPIRDGFAKLGSNYHHVRLFRVPNGKKYKYCLMQVYTVDLLKFRKEDLFTVELKPQTISVRTCEAPLRKALANGTAEYLGWLVSDDELFVNISSFDTPGIVKLREEYGPVNRWRLAGFNSNTQMVLRPLYLSKEGLKPDVDPEIKKIIDNRGWFITVNKLFSTGHVTVVRRDALGRPRLHSAAHLPICWEVK

SEQ ID NO: 17747 - protein, 1093 aa, unidentified
  REGION 1..1093: note = Cas Enzyme sequence
MAAIAIDDDGKPTEILSAISLIHDSGVDPDSAKSAATRLATSGVARRTRRLYRRKRKRLAKLDKFISSQGWPLKEFEEYEDPFYPWRVRAELATTAITNQQELGEKLSIALRHIARHRGWRNPYSKVTALYTVAEPSDAFLAIQGECAKKLGRSIPQTTTVGQLVASMNLGKTRLRGKAKLANKANPHGKEAGLFTANKLQQSDYANEIHTIAKVQGFSNELVKQIIDHVFAAESPKGSAAERVGKDPLQPTKKRALKASDAFQRYRIAALIGNLRIRNSKGNRRLTAEDTRLVFDYLRSLPPKQEPTWQLVAEQLKIDRGNLVGTAIMTDDGERAGAKPPVHETNRLMESTKIKPLAVWWKSADADARAAMVKALSNAEVDDFDSQAGAQVQEFFFGISDKDHEELDKLHLPIGRAAYSEDTLVRLTKRMIDEGMDLYEARQAEFKIPNDWAPPAPEIGEQVGNPAVDRVLKATARWLNAAERQWGTPKSVNIEHVRDAFMSESSARKLDQDNQRRAKRNEEIVAKMQEILGIEGRPSRADVWRFQSVERQNCQCAYCGTQISYKNSEMDHIVPRAGEGSTNTRDNLVAVCRECNSSKSNIAFAVWAENTSRPGVSVQKAVERTRHWVTDAGLRESEFKKFRKQVCDRLRRKATDEPIDARSLESVAWMANELRSRITQKFKDGDTKVRVYNGTLTAKARRASGISGKLEFVDGKGKSRLDRRHHVVDAAVVAFMSNYVAETLALRSNMKFDYELRSGKKSKQKLEHKKPKYKTFTGPTPAHQTEWVKWNIRMQALAELLNNALAQDRIVVMHNLRLRLGNGAAHEDTIGKLTRIKVGDAISTTDIDRASSEALWCALTRDPDFDPKTGLPENPNRTIRIHGTHLTASDEITVFPVTAASIPIRDGFAKLGSNYHHVRLFRVPNGKKYKYCLMQVYTVDLLKFRKEDLFTVELKPQTISVRTCEAPLRKALANGTAEYLGWLVSDDELFVNISSFDTPGIVKLREEYGPVNRWRLAGFNSNTQMVLRPLYLSKEGLKPDVDPEIKKIIDNRGWFITVNKLFSTSHVTVVRRDALGRPRLHSAAHLPICWEVK

SEQ ID NO: 17748 - protein, 1101 aa, unidentified
  REGION 1..1101: note = Cas Enzyme sequence
EKRGQRNALRHRRNRLIFLWKLLAEKGLMLPYSTKSVDDPARLRFEEAMIQADPYKLRLKGLTEALTLSELGYALYHIANHRGASSIRTFLDEVQDADEKKLEEQRSITNKIMTEHNVSTFIEVLTIFNRDTFVGYRNVDKLKDKSIPVPTRDIISAELDRLLSTQARFHPDTLNEDYIQRIKDAVLYENEKIVPEPGDCPYFPDEKKLPRCHFLNEERRLWEAINNARLGEPDESGSFRRYNRISFSDKERQELFTYLRSGRSVTAATVKTLFPHYDNHEIILQGRERKTSRIEGFRFKHLEEKPFWTRFTEEQQDEFFAIWTNFADEKRVEEYLVMHLGLSEEEAADAIRTVKLIGDYGPLGKTATLLLMKYIEDGLTFIEAEMKALETGEFQERTSREVQEFLPYYGRILSKTTQALMGKYWHSSFKDRIDRPGFVKPNTDREEEVHGRIANPVVHQTLNEMRKLVNEVIEILGSKPSEIVVELARDLKVGAEKREEISKEQQRNEKRAQDIYDTYCKENGLSKRYIQAFRLYEDQQFICPYCLETISVAEIAGNQTDIDHIFPIEDTSDNSYANKVLAHGSCNKEKGKRTPYAAFGHTEKWGRIMHYLDATPAMKAKRWRFEKTDAEYAEYLQSKGFMSRFATDNSYIATAAFEYLACLFDYSERNSVRTTKGWETSILRKAWNLHGIDDYFGSMHWDKKDSPDSVKGKNRGDHRHHGLDAMVSLYTSRSLIKQINTLSSKGMKAEEIESLIPIPNYYRDDSLPREDQRNLFRKYVQSFFERNAFVSVKTNHAINGPLVKDTVYSILGANPKGDELVFVVNKKVKDIQVKKGTVEEVESAIKGKFSDKTWYDDELRMKIEAIQRTNEEIIDRYKSNLVQAERTLIEENRKLEEEGKKQRTINENLISKKALELSGGAYQLLSNNSRVKTFVAKEPTTTSKGYGFDTGANLCLDLYHDEEGKLQGEIIRKVYAMDPNYIPTYKQKGYKLFERIYGGDTLEITASSPIAEEKEDAIQKIARIRVPNAVDGRTYIRVETFTERASGIQIFLSNISKADGGQDASFRITSMQQYDVRKVQLSPAGLVEYVSPVLKDLEMGG

SEQ ID NO: 17749 - protein, 1050 aa, unidentified
  REGION 1..1050: note = Cas Enzyme sequence
VKIDYRLALDLGTNSIGWCIYRLAIDEGSTDERERWRPIRIQRMGARIFSDGRNPKDLASLAMARRVARQQRRRRDRALRRKGKLLDALIELGLLPQDSVQRKALVALDPYVLRAQALTVPLNPHHVGRALFHLARKRGFRSGRKDLTSEDKETGKVKTGIANLKARLAEAGCATVGAYLAQRHAHREPVLARPDASGEYAIYLARELVAEEFDAIWASQHPHNPNVFTAAAAARIRDIILYQRPLRPVEPGKCFFEPDEFRALLAHPQSQRFRILQELANLRIEYAKFDVRSLARDQRNMLLDLLTHGGSSLKDGGRVLTWAELRKLIRAPKGAPINLDTSGRKGLKADSVSIRLSDPTAVGPAWRDCGTAHQDRFLHVLRRIDRLDDLDVALRGQGFDVPVERLAAIFQVAARMEDEFGAVSLKALSKIVPQLESEVIHYDEAVRRGGYRSHSDRYEGLLEPNLPYYGQCLPGYVQPRALPTASPEERQYGRIPNPTVHVGLNQLRRIVNAIIKRYGHPKEIIVEVARELGMSGERRRELIREQEQNRHRGERHADELARLGLKNNRENRQRLQLFEEIAANDPLGAECIYSGERISQARLFSDEIEIDHILPFSRSLDDGIGNKLLCVRRANRDKKQQTPHEAFGASPGRYGWPDILARVERLVPRKARRFSEDAMEAFLRDRDFLDRHLTDTAYFSRVARDYLTAICPPNRIWVSTGKLTAMVRAKLGLNRILSSTGNKERNDHRHHAVDAAVIGICDRRVIRAVATAAARAESNGEWRLVQGIDPPWPGFFEDVRATVDRVIVSHKPEHGLDGGLHNETSYGLVEGPDQKGRSLVAHRIVVTDLKSRADAEKMLDDGPLKQQLVELLSANSGTALKQALAEFIRKSGVKRVRVAERLSVQEIQNPNRAAPKLVKPDGNYCYLVQRKESSGWRGSAVTRLTATRVARPTGGTFPSPASTVMLVRVGDSIAAEKEPGRIGIFRVVKLSGAQLALAPHHEAGALKARDSDPADPFKYWYVSATSLHGAKARVVGVDELGYVNDPGFRE

SEQ ID NO: 17750 - protein, 1356 aa, unidentified
  REGION 1..1356: note = Cas Enzyme sequence
MSKKEKEYYIGLDIGTNSVGWAVTDGKYDLLNIKKKNLWGVRLFEAAESAADRRISRSTRRRYRRRRNRINWLNEIFADELSKVDPSFLTRLSSSWISKKDSSRTRDKYNLFMDADYTDKNYHQEYPTIYHLRHDLMSDNKQFDIRLVYLALHNIIKYRGNFTYEHRKFNISDMNSNLAKSLENFNQELITFEDAFPENTDYSEISDLLLKSNNTSTKIDEVLSVLELDKDTKKYLKEVLKLILGNSANLNTIFHTSLDKDDAKLSLSAKDIELKLNNLDNLLSDEQIHFISSANKLYSSITLNDILNGKTYLSSAKIKQYDAHCLDLKELKEMWYKTTNPDLIKQSRKAYKEYVHGSYNTEDFYKAVTPFLKIAVPEDLAKEALKKIEDNTYLPKQRTSDNGVIPFQLNLIELEKIIDNQSKYYPFLKENREKIISILSFRIPYYVGPIQTPTDENFSWMVKKVQAKARPWNFDEVIDREKSSNNFIKRMTATDTYLIGEPVLPINSLIYQKYEVLNELNNIRISENIASDPNGSKLPLTVKQQIFNELFKKHKTVKRDQLKKWLIKNSYFVNPTIIGLANPTEFNSSLSTFIDMSRIFDQQFVDDATNLQQLEELVEWLTVFEDKQILSEKLKHSNYTYNDKQIKQISNMRYRGWGRLSKKLLCNLKVETTTYQSHELSSYSIIDLLWETKRNFNSILHDDKYDFETLIDNYNFDKNDKTDITDLVDDIHTSPALKRGIIQSVNVVNELVKFMGHAPKHIFLEFTREDRSSELTDSRKKQLNKLYKALANKTQSFQSGLRSYLIPDKNIKEELKNHNKDLSSERLMLYFLQNGKSLYSNQNLEIDRLSEYQVDHILPRTYIKDDSLENKALVLAKENQRKSDDLLLQPEIINKNIERWRYMKDNGLMGPKKFKNLTRKTITDDDRLNFINRQLVQTSQIIKNVASILDNMYKDQGTTCVQTRANLSSSFRTAFSEQDGNYHFKHPEFVKNRDINDFHHAQDAYLACLLGLYRLQRFPSDEALLINKEYRKFFAQAQKGLKDHGKTPDSQKNGFILAPMVNGETLINNKTKEIIWNLDFKKQIIKIFNYKQYNITKKTEIKTGEFYNQTLYSPHDTKVKKLIPQKNNLDPNIYGGYSGEKSSYLVAIRVDDKKAKMVSIPIRLAEMIDEGKLSLKDFLEENIKHKKTIEILKTRIPIGQLTHSSENGYLTLQSDREIANAQQLVLPYKDVALLTLLHAPETEYDQILSFYDEDILLNIFNTIIDKMNHFYPYYKSERKYLVSITDDFNSATTIEKVNVIQQLLIMLHANSSNANLKFGKTKKTRFGRKGSGLPMNNTDLIYQSVTGLYQTKFHID

SEQ ID NO: 17751 - protein, 914 aa, unidentified
  REGION 1..914: note = Cas Enzyme sequence
MEKVSARTLGEYLWARHRQRKSVRARNIATGPKADYDFYPTRALIEAEFNAIWEAQAAHHPMNREARDAIHRTIFFQRPLKQPPVGKCSLDPATQPFELDPEGYRVSWAHPLAQRFRILQEVRNLDVGETGGPRRRLTKEEGDTIALALLQNNKVSFDKMRALLKLPAEARFNLESERRTELKGDETAERLAHRSRFSKAWRSFSLDRQCTIVERLLAEADEEALVDWLQTECKIERAVAEEITDAPLPESHCRLGLRAIRKLLPHMDAGLNYPDAAKAAGFDHSKQPTGEMLGRLPYYGRWLPDAVLGSGDPRDLKEAQFGRFPNPTVHIGLGQLRRIVNDLIDDWGEPTEIVIEFTRSLKLSPDEKKDLLREQRQKQAKNAERIAKLRETLGQAEFDPSPRDLLKVRLWEELNPRDPLDRKCPFTGETIGLKRLMSHEVEIEHLIPYQLGLDDSPANKTVCLAEANRAKGRLTPFQAFSSSPTIAGIHYDWEAIIQRATALPRNKRWRFDPDAHEKYKEMGGFLGRQLNETGWLARVAKQYLSAVCDPNAIWVVPGRLTATLRRQWGLNSLLPDHNYGGVQERDETFRAATDELEFSGVKNRTDHRHHSIDALVVAMTDRSLLQRMAISYDDRRDKIDVQEPWQGFRDQVKSRLNQMTVSYKPDHGRQGKLHEDTAYGLVKEPEKEGANLVRRKDLVALTENEIDMIRDHRLRDMVRGHVTKAREAGVDLASALRSFRDNVRDPHIANGLRRVRLLKVEDSEYLVPIANRSDGTVYKTYSAGENFCVEMYEMPDGRWRGEAIRRFDANQSSYQPRWRKLHPDASFVMRVHKGDLLSLDHDGKRQVMVVHRLDAAAGRFKLAAHNETGKLDRRHAAANDIDPFRWLMASYGTLKKAGAERVRVDPLGRIWRVR

SEQ ID NO: 17752 - protein, 1172 aa, unidentified
  REGION 1..1172: note = Cas Enzyme sequence
MKTILGLDLGVASIGWAIINEDEKQQKLILSGVRVLPMDNETVSNFVKGAAYSKNQERRQGRSARRNNHRYKLRKYFLNKFLGENGLLPIDEALFKLSPIALYGLRDKAIREQVSLQELARIWYHLNQKRGYIDSRKGAGEDEKDPKYVENIKNRSKHLYDNYETVGSYFYHKLLENPIYRIKSGNDKENIFLVDDYKREFDLIWNEQAKYYPALLTDTNFDVLRNKIIYYKRKLKSQKHLISECRFEKYHKCMPVSSPIADEIRLWQDINKAMIVDKYNQREELSAEEKVDLFNYLNNNEKITEKEFLKRYSKDRHSKNDKVNFEKQIRGSIFKVRLLNLLKKYNHDESIFEDFDALSENFIEHPLYKIWHLLYATEDVNDIRKTLSEKYFYTDEDLISEILKLPIRNDFAALSSRAARKLIPFLRKGMMYDKACKAAGYNHSNSLTKEQNAERTLVSIPDLQHIKQNALKNPTVEKILNQLINLLKALHQDGYRFDEIRIELARELKKNAKQRKKITEQNRENEKLNAEILEKIKEHIKNPTQRDIEKYKLWIEFDGVSPYEPNNRILLSELFDKAKYEIEHIIPKSRYFDDSLNNRTIARVQINKEKDNATAYDYMISKSPEVFQQYIERVKNTKLSSAKRRYLLMGGKDIPDDFINRQLNETRYITAETLKLLKSICREVVSTSGSVTDYLRHHWGYDNVLMNLNFERVSPQEIEIKEINGQLRKVIKNWTKRNDHRHHAVDAIVIACTKRSYIQQLNTLNATYDQAEDLKSLAIKHRVPFSFEEVKENVANILVSYKAGKKVGTKKKIGKDRWHKTPGNFGQVMIVPRGQLHEESVYGEVKRYAGPVDISKLKNVDECAVGWQKNAIIKHIGKYDNDLAKALKNIKKDPVIFEGNKVLNEVVVFVRGNVKKYDLQYSTLNKFDKKAAAFIVNENVKKIVLARLNEFDNDPAKAFKNLNERSDKNPDGNPLYFNREKNIVIKSVRCFTGGSDYPALHVSEKGKTLNEKQSRAFNNAVPVDFVKGGSNHHIAIYRKENGEVVEVCVTFFEAFNRMVNEQEVIQKDHPLGYKFVASLQRNEMFVFGVEPSELEQLIDQNELDKISKHLFKVVDIAPGQYRLLHHLDTKLGDNNFKSYLRNMNRFIQKSASSFSGIKVRVTNTNKIFICND

SEQ ID NO: 17753 - protein, 1058 aa, unidentified
  REGION 1..1058: note = Cas Enzyme sequence
EFGWPLPNLEEYPDPYEPWHARARLLDGYIADDAKRKEMLSIAMRHIARHRGWRNPYMKPASLASLPYPSEFLTKLNEDTSRVIRQKFAAEATQGQLVDAFILGSLSLAATPELQVLEESEKDNSKNKPRDIVLGRVRGDKGVIEGKLHQSDNAEEIRRICATQEVPQDQVERLIEAVFKAKNPREVGAAYKLVGHDELPGQKKYIRAERAHPAFQKFNIVATLTNLRINEAGSKRRLSSKELQMLTNYLSNVGPKDEVTWFDVAEKLKINRSDLQGTARASYDGQAALKYPPKDVTSASIKQSKVKALKDWWKQASEDQHGQLIDYLSNSGGSDTPQTDDELDDLTKLTQSFSEKDLEELEKISLPAGRAAYSLNSLTKLTQLMLEEGIDLHEARKRLFNVDDDWKPTPEPINSPVGNPAVDRVLKQVARWINAATERWGIPASVNVEHVREGLVSEKVVRELIRDNEARHKKNMEVAEATAKRLGLSGRALRSHTIKYFALRRQNCQCLYCGTKISFGTAEMDHIVPRTNGGSNNKRSNLAAVCKTCNDSKSNIPFAVWVSSGKAGPGVSLEGAKERVNSLLLEKADLPEDYDDDSLIEFYSKNESKKFRKEIIARLESKKPEEEFDGRSLESVAWMAVELRGRIVGYYETILKDTGQKVPQVGTYRGAITAEARKASGFENRVELLGGKGKTRLDRRHHAMDALVIALMNQSVSKLLSWRMQLRDSQRISVMPETWKEFHGFTRDDYRHWEAWAKAMRIAVELFNDALEKDDVHFSENKRLGISLAKAHDDTIKSLCSYALGGAFSAELIDRAETPALWTALTKQPDFDVKNGLPEDPTRCITVNGKQFGPTDEVNFFASGAPAIKVRGGFAGIGDTIHHARIYRIDGKKTTYAMVRVFQTDLRRMEHEDLFTEPLKPSTISMRTASKTIRKALADGTATQIGWLVEGDEIHIETDRYPSGQIGSLLKEYPEAFSWRVCGFPENAKIRLRPNLISEEGFDADISEDVVKLVSGKGWWVSPNTLLGNGPVTVIRRNALGEERWLSRAHLPVSVDLS

SEQ ID NO: 17754 - protein, 1087 aa, unidentified
  REGION 1..1087: note = Cas Enzyme sequence
MYPYAIGFDIGITSVGWAVVALDGEDKPFGIINMGSRIFDAAEQPKTGASLAAPRREARSMRRRLRRHRHRLERIRHLLVAENVISQAELDALFEGKLEDIYTLRVKALDTAVSHANFARILLHIAQRRGFKSNRKSGASKEDGELLAAVSANRALMAEKGYRTVGEMLLKDPQYSGSKRNKGGKYLATVGRDMVEEEVRAIFKAQREQGQAFAATELEEQYLEILLSQRSFDEGPGEGSPYRGSQIEKMIGKCTLEAGEPRAAKASYSFEYFTLLQNINHLRLICGGESRPLSDAQREFLIALAHKTKDLNFSRIRKELDIPADTTFNAVSYKSADGYEDAERKAKFCYLKAYHQMKAAFNKLSKGHFDSLARQQKNELGRVLSTYKTSANIRPRLAAAGLSEMEIDIAETMSFSKFGHISVKACDKLIPFLEKGLKYNDACAAAGYDFKGHDSETRTRLLHPTEDDFADVTSPVVRRAISQTAKVLNAIIRERGNSPTFINIELAREMARDFTERSKMKKDMDENRARNERIMERIRTEYGKEHPTGQELVKFKLWEEQHGECAYSQKHLSLEHLFDPNYAEVDHIIPYSISFDDGYKNKVLVLAEENRNKGNRLPLQYLQGERRDDFIVWVENSIHDYRKKQRLLKETITAEDEKGFKERNLQDTKTMSRFLLNYISDHLEFSDFSTGRKKHVTAVNGAITSYLRKRWGIAKIRENGDLHHAVDALVVACTTDGMIQQLSRYSTLRECEYVQTEAGSIAVSMHTGEVLKRFPYPWPEFRRELEARLGDDPRRAVISQRFPVYANGDIPVRKLFVSRMPRRKVTGAAHKETIKSPKALNDGIVVVKRALTDLKLDPKTGEISNYYMPQSDRLLYEALKEALKKHGGNAAKAFAAPFHKPKSDGTPGPVVNKIKLCEPTTLNVAVLNGAGVADNNSMVRIDVFHVENDGYYFVPIYIADTLKKELPNKACVAYKPYEQWKEMSDDNFIFSLYPNDLLRVTHKTKLKLTEAQKESTLPDTYETKQEMLYYFSANIHTAAIGCRNHDNTYEIGGMGIKTLEKLEKFTVDVLGEYHKVEKEPRMAFCRK

SEQ ID NO: 17755 - protein, 1087 aa, unidentified
  REGION 1..1087: note = Cas Enzyme sequence
MYPYAIGFDIGIASVGWAVVALDGEDRPFGIINMGSRVFDAAEQPKTGDSLAAPRREARSARRRLRRHQHRLERIRRLLAAEKVVSQAELDTLFEGKLEDIYALRVEALDAPVSNTGFARILLHIVQRRGFKSNRKSGTSKEDGELLAAVTANRALMSEKGYRTVGEMLLKDPQYSGNKRNKGGKYLATVGRDMVEEEVRAIFKAQREQGQPFAAAELEEQYLEILLSQRSFDEGPGQGSPYGGSQIEKMIGKCTLETGEPRAAKASYSFEYFTLLQNVNHLRLMSGGESSPLSSAQRETLIALAHKTKDLNFSRIRKELGIPAGTTFNTVSYKNAEDYEEAEKKTKFCYLRAYHQMRAAFNKLAKNHFDGLSRQQKNELGRVLSTYKTSANIRHRLAAAGLSEIEIDIAETMSFSKFGHLSVKACDKLIPFLEKGMKYDKACAAAGYDFKGHDGETRTRLLHPAEDDFADVTSPVVRRAISQTVKVLNAIIRERGGSPTFINIELAREMARDFAERSKMKKDMDENRARNERIMERIRTEYGKERPTGQDLVKFKLWEEQHGECAYSQKHISIERLFEPGYVEVDHIIPYSISFDDGYKNKVLVFTEENRNKSNRLPLQYLQGKRREDFTVWVESSIRDFRKKQRLLKETITAEDEKKFKERNLQDTKTMSRFLLNYISDHLEFADFASGRKKHVTAVNGAVTSYMRKRWGITKIRENGDLHHAVDALVVACTTDGMIQQVSRYAALRECEYVQTEAGSMAVSQHTGEVLRQFPYPWPEFRRELEARLGDDPRRAVISQRFPVYANGDIPVRKLFVSRMPRRKVTGAAHKETIKSPKALDSGNVVVKRALTDLKLDPKTGEIANYYMPQSDRLLYEALKEELKKHGGNGAKAFTAPFHKPKSDGTPGPVVNKVKLCEPTTLNVPVLKGAGVADNDSMVRIDVFHVENDGYYFVPIYIADTLKKELPNKACVAYKPYEQWKEMADKDFIFSLYPNDLLRVTHKTKLKLTKAQKESTLPDTYETKQEMLYYISANIHTAAIGCRNHDNTYEIGGMGIKTLEKLEKFTVDVLGEYHKVEKEPRMAFCRK

SEQ ID NO: 17756 - protein, 1098 aa, unidentified
  REGION 1..1098: note = Cas Enzyme sequence
LSLRYILGLDIGIASVGWAVLENNIDGEPIKIERLGVRIFDKAEQPKTGASLAEPRREARGQRRTIRRRRHRKDRIKQLIQQNDIMTRVEMAEMFEHLQFETSVYELRVQALERALTKQEFVRVLIHLAQRRGYKSNSKSEEAKDKENGKVKSAISENKKCMEENGYRTIGEMLLNDDRFWECNPDGTKIFVPHNHPDDYRTTVERSMVEDEIRLIFSRQHALGVPYATSEFEEAYLEIWGSQRNFDEGPGGKSPYGGNMIEKMLGHCTFEKDEPRAAKGSYSAEYFRLLQDVNHLRLVKNNGESCALTREQKQIYIDLVMKSAAASYAQLRKKLELSNDISFNMLRYGSDEIGKVERKKLGHMKFYHEMRKALNTVQKDAISTVSWEQRDEIARILLCYKSDDKRKAQLEKLDIPREFIPALLTLSTSKTAHLSAKALRKLIPYLEEGMTYAEACKEVYGEQKSSITKKNKLSLFDIEPINNPVVRRAVSQTIRVINAVVREYGAPEVVRVELAREMGKPYDVRTQMTKKQEANAKRNEELRQQIKKIKGAEPTGQDIVKFKLFQDQNGVCLYSGQNLDITRLFEAGYVDVDHIIPYSISFDDSYTNKVLVRSPENRQKGNRIPADYFKSDPARWQRFETLVNTQVHNWKKKRKLLTQALSEEQKNGFKQRNLVDTQYIARVIYNLINDHLQFAETGKYDKKRRTQAVNGAITAHVRKRLGIQKIREDGDLHHAADAAVVACVSPGMIQKITQYTKHRECIRKTKEGYLDTETGELMTREAYDAKYSPRFPAPWERFRQELEARLSDNPAEEIARLHLATYDSEEEIKPVFVSRKQTHKISGAAHEATIRSAKKPGGSISKKPLTSLSLNKKTGEIEGYYAPESDRLLYEALKKRLEEFDGNAEKAFAEPFYKPKRDGTRGPLVKKVKIYEKKTITVPVGGGNADNGSMIRVDVFYVEDDGYYYVPIYTADVIKDALPNRAVVAHKSHGEWKVMDDKDFLFSMYPNELLYIESRKGIKLKTKKGSSRQEQIVRKADFYYFKGLNIASDNLFIITHDHSYEQSSLGGKTLSCLKKYTVDALGNYSEVSLPEKRKPLRG

SEQ ID NO: 17757 - protein, 1094 aa, unidentified
  REGION 1..1094: note = Cas Enzyme sequence
HQTVGQYLMSQLALHPLQGIKHQTFYRKDYEDEFEQIWKTQIKYHPELTRKLKKEIKNRKIFYQRPIASKKGEVSLCELESKEIEIEKDGKKKKVKTGSKVCPVSSPLFQEFRMWHRLNDTVVINLNTLEKRSLTLGEKELLASELSIRKELSKKDVIKLLLGKGDKNFDLNFEKLLGNETQARLVNAYLKILELTGHDKLDIKKMKAHEVIDAICTVFANFGYSSEALKGQIENGLDVCQQPYYRLWHLLYSFPGDNTRSGNAKLIQRVKDLFQFDSDEFAKEIAEVRFPDGHGSLSAKAIQKILPKLKEGYQYSDACELVGYKHSKRSITKKENKQRVLQQHLKLIPHNSLRNPLVERILNQMVMLVNNLVDEYGKTYGTFDEIRIELPRELSSNAEKRQRDSKGIDDNQKEKETCREELITILKKHGIKVTYVSENDLLKYRLYKELEKNDFKTLYSNSKVDLIDLIMGRGFDKEHIIPRALRFDNSFSNLTIERTDINLDKSKSTAIDFIRDTYGEEATRQYIAKVNELFRQKAISKTKKENLLRTYDEIPSESLNRDLGLTAYINKKAMEILEPVTRKVVPTTGKITSQLRREWQIETVLKELIWDKYKKLGLINSYVDKNGEIVERINQNVWTKRSDHRNHAMDAITVAFTNPVFIFYLNSLNSRGEAREQLIKMRHKYMHRDEQGNWIFNPPMQIDILRAEVKQQLEQMLIFHQSSSKVSTPNVNITKSKKKKAGNMQQTLTPRGKLHDDTYYGCIQYPECEIVAVGKSFDECKIATVTKASYKIALLERLNQYGGNPKDAFTGKNALDKNPIWLDEMHTKSVPQKVKCLQIKTVYTKRVAVNENLNLENVVNEGIKRILKARLEAYNGKTKDAFTNLEENPIWFNKEKGICIKSVIVKATDVKDPIPLHKEKDRSGKHVIDDEGKSKSVDFVKPNKNHHADIYVDANGDLHEKFVTFFEAVQKANKNQPIVDLNYHADEGWRHLFSIQRFDYLVVPDKVSGFDPSAIDVCNPANYPIVSPHLFRVQKMSSKNYVLRQHLDTSNKTPEELKGVTSIEIRSLSNFLGCMKVSVNRLGRITSAQPIMIL

SEQ ID NO: 17758 - protein, 1206 aa, unidentified
  REGION 1..1206: note = Cas Enzyme sequence
MEKILGIDTGTNSLGWAIIEKGEDGTKLIEKGTNIFSEGVKIEKGIESSKAAERTEGRSSRKHYWRRKIRKIRLLTILSNNQLCPPLDKESLRQWRLKKIYPDNELFMEWQRTEDKANVNPYKFRYICLTQKLDMTDITQRYILGRALYHLNQRRGFLSNRKESTKESEGAVKEGINTLTEEIKAAGCEYLGEYFYQLYQKGEKIRNHYTARKDHYQKEFLAICAKQNLDAKLVKDLETAIFSQRPLKSQKGQVGVCTFEKGKSRCPSSHPLYEDFRMYAFINNIKVQINTLYEHADRALTKEEIKSIIPLFKRKSKRTFPFEDIAKKLAGKDNYSYYKSDEDKPYRFNYQMDTQVAGSVVNAQLEEIFGDDWLTGACEVYTLAQGKSRYQIMNDVWHALFFFDDDEKLKEFAANRLQLDPEQAEKFSKISMPNDYAALSLKAIRKILPYMRDYGLIYSEAVFLANLIEVLPQHIWGIKEMRETVIENVIEEMHSYDKNNTDGLTLEQYVKAYLKEKYFVDDDNLKKLYHPSMMDLYPRQRPDSEGIYQLGSPRISSVKNPMAMHSLFRLRKVINLLLKERKITPDTKIHIEFSRDLNDANRRWAIQAWQRENEKDRERCRKEVEKHIPNPTDTDILRYQLWEEQKHKCLYTGDEIGISEFLTKDPLYDIEHTIPRSAGGDSTKMNLTLCSNRFNREVKRTKLPSQLSNHEEILDRIKEWKTNYEELDKMIRKLKGSRGTTKEEKDKIIRRKHFLSLQRDYWRGKYQRFTMREVPEGFSRRQGTDISVISRYARMYLKSVFKHVYIVKGVATSEFRKMWGIQEEYTKKERINHVHHCIDAVTIACIDKAAYDKLAQYHHQADEYRFNRGDRPHFEIPWPSFVTDIKKIQDELLIAHYSKDLMPKQARRYVRDSKGCKILTQGDTARSSLHNDTYYGAIEVDGEVKYVVRKRLDGLEDKDVKNIVDGEVRSKVENAILLHGSLKKALDNNGTIWMNEEKHIPIKKVRIFAGSVTRPINIRQHRDQSRHEYKRQFHVQNDRNYMMAIYVGQDKKGKEKREFELINNITAANFYRRSNDRTPTGNHLVPLYSKNGYELRYKLKIGTMVLLYDSNPDEVWELDRQNLQKRLYKVTGLSSMLLQEKYPYGTLELVHHQDARSSTDIKKKNGEFKSDEEFRSGIKLLHTQFKALVQGVDFELNDLGEIKRLI

SEQ ID NO: 17759 - protein, 989 aa, unidentified
  REGION 1..989: note = Cas Enzyme sequence
MMNSRTLGIDLGTNSIGWSLVEFNDNQQPIGLKDCGVRIFQEAVDVKTRIPKNQERRAARSARKLQSRRKMRRKTLLNLLINYSLLPKENKEREALLLDDKLYNPYVLRARGLDEKLTLFQFGRAIYHLNQRRGFMSNRKTGKKKDEGPVKQDILEINEEIEKTGCRSLGEFLASKKSQRKRYTSREMYKDEFEQLWEAQRKYYPETYLPELKVKIFKTIFFQRPLKLQKNLIGKCTFEPSRKRAAKAWLPAQKFRILQDLNNLKIKDPTGREMRSLEGDERKILFTILQKQKTLTWKKARRLLGLHDGEIFNLEQGQKKELIGNRTACDMRNILKSRWDKMNNSQQDSLVTDILTIDNENGFLRRMKEHWGFGEKEAEKLATTELEKGFILLSLKAIRNILPYMEEWQTYDKACLSAGYDHSAPGKGGAATKRLGEPKDIRNPVVQKALWETRKVVNALINKFGKPDTIRIEMARDMKMSKKQREEIQKRQKKQENENEKVRNILREELGFQQPSRADVQKYQMWEECNMRCPYTGKTISRQMLFSPEVDVEHILPYSRSLDDSYMNKTLCNARENREVKRNQTPYEAYHANEKKYQEILSRIKNVGMPWPKRRKFEQQEINTDEFIERQLNDTRYICVEVKNYLKQLGIKVEVSKGAATYDLRKKWNLNTILALPGESGKNREDHRHHAIDATVVALTSISLFQKLSKISAATPYGIGLSGNKLKVSEPWDNFASDVRGKILGFIISHAPSRKISGALHEDTAYGMSSRKHHQKGKIYLVRRVPLEKITNNQINQIRDDELKKIVLDRVDEYSGDLKKAFVETLYHKDGKTPVHSVRIETVAKESSVHGIIEDRKKPYKYYQYGSNHHVEILENVKTGKRKGIFVTTMEAARRARIDKIPIVQKNHGEEWKFVMSLSTNDMVEVVGNDEIKIYRVQKMDGSNKRINLRLHNAATLEYNGQELIKSPMALRCKKISVDPICNVSFCND

SEQ ID NO: 17760 - protein, 1168 aa, unidentified
  REGION 1..1168: note = Cas Enzyme sequence
MEEMKHLNRKAEVPKPTDLNYRIGLDIGIASVGWAVLENNTHDEPFRIIDLGVRIFDTAEQPKTGASLALPRREARSARRRLRRRGHRLERIKKLFEAEGLINIEEFEARYKRTGLPDVYKLRYEGLDRRLTNDELAQVLLHIAKHRGFKSTSKAADGADSDTGEVKKGISANKTLMQEKRYRTVGEMIYLDEKFRTDCPWNENGYILTPRNKSGDYKHTVLRDMLADEVMKIFKAQRALGNDAATEKLERAYLDIMLSQRSFDMGPGAPSRYAMEGFEDRVGLCTFEGKNGEKRAPKAAYTSEFFVALEKINHTKIVSADGSTRFFTSDERHAIIALMHRQQTVKYTAVRKTIGLAEEDKFYNLNYSQKSGSKKSPEDTDFVKMENYHKIRKALREEVASEHLSPDKIKLYDDIARILTLYKNDDSRIRRLAEHDIASECYDALLEMSPSKFHNLSLKAMGKIIPFLLQGNTYDKACELAGYDFRTENNGEKSILLKGKNITNIVNDITNPVVRRSVSQTIKVINAIILEYGSPQAVNIELAREMSKDFDERRKMKSDMETREKENDKVLSRVREYKPNPTGQDIVKFRLWEEQGGVCLYSGDKIDINDLFSSNGGYDVDHILPYSITFDDSYRNKVLVKASENRQKGNRTPYEYIMAEKGEQAWNEYETLVRNTVKDYKKQLKLLKKHISDEEKAEFKERNLTDTKYITRIIYNMIRQNLVLKPYFNLERERKKQVMAVNGAITHYLSKRWGLAGKDRRTDTHHAQDAVVIACTTDGMINRISRYSKGRELAYSRGFGFVDEETGEILNRDNFSREDWDEKFGVRLPMPWEHFVDELDIRMSRYSTMGEGVSSGTSPREFILSHRDVFNWINYPEWMFVEGRPGRRGVLDGIFVSRMPNHKVSGQAHEETIRSAKYYEDGGSVFETGGYVVTKKSIQDIKLKDGEIKEFFNPDSDRLLYEALVDRLNQYGNDPKKAFAEPFHKPKSDGTPGPVVKKIKVFEKQTSGVLVREGNGIAANGSMVRIDVFCEENKGKKKYYFVPIYTADVVKKRLPNRAATQAKMPSEWRLMNDENFIFSLYSRDLIYIESDKGVQTKDIDNVTGKVEKMYAYYTGADTSTASIAGKLHDSSAMFRGLGIQSLRKLQKCQIDVLGNISFVSKEKRMTFN

SEQ ID NO: 17761 - protein, 1387 aa, unidentified
  REGION 1..1387: note = Cas Enzyme sequence
MNLRDADSYNVGLDLGTGSVGWAVTDEDGELLHFKGRPTWGSRVFPSGKPAAQTRLARGQRRRYERRRWRLNLLQDMFREEMAGIDDEFFIRLNQSRLHPEDRMDGHADYRWPFFNATDFTERDYYAKFPTIYHLRAWLMQTNDQADLRLIYLAFHNIVKTRGNFLHQDNRKLSASNADMTSSIETLCLTLTDWCDAHDIETSCCDHIEDMCKTLEDPTTNRGEKQSAFQDQLCFDKENRKTLGAQISKAIIGYKAEFASIFFEEADESKFSLSNDDAVEAYLSHIPDDGMALFDAIRGVYSAFILSGILSFGGDRPIKSGILKGSTGKTISYCKVREYEQYNSDLTLLKALTRKFAPDKFNEFFRGEFYPGTHNYDPSKAKGYTKYNLLRAGASYDDFKKNVIKLFEGTQAAADPQYKKMMASFGEERFLRRLKTSDNGSIPYQLHLEEMNAIITNQGHFYPFLLAQRDKIESLVSFRIPYYVGPLTQKNAARDQDGKLRFAWSVHRQGKENEPVYPWNWDQVIDKNRSAQKFIERMTSDCTYLVDEPVLPKCSLLYEEYCVLNELNGTHYSADGDKQRRFDCADRQGIIDDLFKQKHLVTYKSVEDWMRENRKWTSIHVSGGQGETKFESNLSSYRFFCKDVFHVDELPESLVPKVEQIILWNTLFEDRSILKEELKRNFGDILSAEQVKTICHRRFRGWGRLSRKFLIGLKTDTDHGPKSIMDIMREGCPTSGESYRQSMVLMEIIHDSNLDFMQLIEQENQKKLAAKGKFEVNDLPGSPANRRTVNQATRIVEEIARIAGKAPTHIFIETTRDEDPKNKGKRTKRRWEKLNDTLKAFKDENSELIKEFEERNAKEFDDDRLMLYFMQGGKSLYSGKPIDIERLSEYQIDHIIPQSYIKDDSLENKALVLSKENQSKTNSLLISPSIRQRMAGYWRELHRVGLIGDKKFNNLLCSNISDRKIKGFISRQLVETSQSTKLTKIMLENRFPETRVLGIRAGLSHELREVKHYPKCREINDFHHAHDALLAAEIGRFLLKRHSEMYDNPVGYAHVVRNFIHAEALEASRTGHMPSSAGFIISSFLHSGFDKGTGEVFKDSWDAEYECERIGKFFNYKQVFISRMPEETNGAFWDATVYSPRDKSKKISSSSLPVKQGLDPAKYGAFSNEQFAYFFIYKEKDKKGKCQLVFSSVPVRISAQIELGGIKALENYAKKEAAEHGAEFVGVIRNKIYKYQQIEIGSDRFFITGKKEVRNARQFAFTQDETELFTQIKRGFFTDEMDLESLFGTLQDKFIKLSPKLAQILKISSIGDSFSKLDKSAQAKVLCSLVSIAAAKTNMIDMTLVGGSKTAGCIRIAKKKYLNNEEGITFVDQSVTGMFERRTHIGL

SEQ ID NO: 17762 - protein, 1081 aa, unidentified
  REGION 1..1081: note = Cas Enzyme sequence
MVRNIMTWRLGIDLGTNSLGWGALKLEQTDGAWSAAGLIDSGVRIFSDGRNPKDKQSNAVKRREPRGARKNRDRYLRRRARLMRELIEFGLMPKDEAARKALEGGKSVPLVDTDPWILRARALNEEISLHQLGRAIFHLHQRRGFKSNRKTDRADSESGKVYEAIQRTKEGLKTENARTVGELFGRRRLKAALHNQTAKKGERQAQPLARVRKSGEGAKWQYDYYPTRELILDEFYAIWDMQKTHHPKELTDAACTRLRDPIEWQHPLKSPPVGKCTLIPTEERAAKALPSSQRSRIFQEVNALRISYPGEAQKPLTKEQRDKVTDRLLHPTNKTGKLSFKRIRKLLELSDRAIFNTESAKRPDLQGDATAAQMKEDDRWGKSWFDLDLQKQDEIIDRLINEEKEDVLVAYLRDVHKLDADQAFRVADCPLVSGYGSLSRLALEKIQPHLEADVTVYSDAVTLAGFPSHSNFETGEVFDKALPYYGYILERHVAFGSGEPKDLDEKRYGKIANPTVHVALNQIRSVVNDLLKRFGPPEQIVIELARDLPLSAKGKGELESRQKKNQEANDKRREQLEKEFKQQDNYDNRMRLRLYEDLEALGKRCVFTGEQIGAHNLFTDKVEVEHILPFARTFDDSYSNKTLSMRQANRDKKNQTPYEAFGHSPDGYNWEEISKRAAELPDNKTWRFGPDAMERYEKEEGGFLARQLTDTQYISRLAKGYLSAIYPGGKASNVWVIPGRLTADLRWQWGLDSVLHGHNEEISEAQKKNRHDHRHHAIDAIVVACTDISMLQRAAKQAKQNEEKYDERLMAGVAEPWEGFREDVANSVRDIIVSHKPDHGIQDAMHNDTAYGIPKGDEGAPDKKGVRTVVTRKPLDSDSFKASKDLEKIRDEIIKKALLEATQGLSGKDFKAALLMEAKAMMPPIYKVRIEEKLSVIPFKDESGKEYKAYKGDGNYCYDIWLNEKGKWAGEVISTYEAYQLKKARKNVAWWRRPIGREGQTLVMRLRKNDYVQIDHEGDTKIVQVYKFSTGMILMSEHFEANASARIREKALKAIQMAPGSLQKANARRVTVSPSGVLKVY

SEQ ID NO: 17763 - protein, 1063 aa, unidentified
  REGION 1..1063: note = Cas Enzyme sequence
MATRLGLDIGTNSIGWCLIEDDTRIIDLGARIFSDGRVPKSGESLAVGRRMARGMRRRRDRYLGRRSAFLDALVTYGLMPADKAEARKVAELDPYYHRVRALDEKLEPYEIGRALFHLNQRRGFKSNRKAERREGETDGKIASGAKALDAAMEESGARTLGEFLYRHDTKRVRMGGENKDYDFYPQRHHIEEEFQAIWEKQAEYHADLLNGPARAAIHRILFYQRPLKEQIVGVCTFLTDEKRLPKAHPLFQERRLYEEVNHLEITTPGETSRKLTLDERDRLVRELREKKTIAFSSLAKKLKLDTGQSFNKASESRTHLAGNEIYATMSNKKLFGNRWAHFDIDRRWLIIDRLLSEENPETLRSFLADECELDKDQIVEAEKAAHRLPEGHGRLGPTATLLILEELKSEVITYDEAIRRVAEKDRRFKHHSDFRTGEILPKLPYYGELLTREIPPGTQDPADPPEKRWGKITNPTVHIGLRQVEKLVNAIIRVHGRPDEIVVELGRELKLNEQQKDDFNRRIRDNTRAAEARSAKLIEEGFPDTGANRMLLRMWEELNPANPLDRRCPYCGERIGMRALFSSEADVDHILPYSRTLDDSVSNKIVSHKNCNRQKGNKTPYEKWGETERWDTITEQVARLHKGKQWRFQPDAMERYEGEKDFLARQLTDTQYLSRMTGKYLSSLYADASEGSVYVLPGRMTAMLRRLWGLNSLLPDHNFVENEHSNAPRNRLDHRHHAIDAAVIAVTTRALLNEIAHAAGRAESDDLDRMFKDLPQPWEGFREELGEKILKVTVSHKADHGRKGQPSKHHDITAAQLHNETAYGLTGDYAADGKTPIVVHRIPLSSLKPGDLTNPERIPDETLRDALYRATEGLTGKEFEKALAEFSEKGWQPDKNGKPVFKGLRRLRVREPLSVILITDKSGRAYKGYKGDSNARFDVWRLPGGKWVSDIVSMFDAHQTGEDDRRPHPAAKKILSLRQNDMMAIEHEGNPALIVRVVKFSGNGQIALAADNEAGALKARDAAPKDEDPFKYILSSAGGLKKRKARQVRVDPLGRVFDPGPRE

SEQ ID NO: 17764 - protein, 981 aa, unidentified
  REGION 1..981: note = Cas Enzyme sequence
MAAGGPGGRSLGFALLVKEKSQMATRLGLDIGTNSIGWCLIEDDTRIIDLGARIFSDGRVPKSGESLAVGRRMARGMRRRRDRYLGRRSAFLDALVTYGLMPADKAEARKVAELDPYYHRVRALDEKLEPYEIGRALFHLNQRRGFKSNRKAERREGETDGKIASGAKALDAAMEESGARTLGEFLYRHDTKRVRMGGENKDYDFYPQRHHIEEEFQAIWEKQAEYHADLLNGPARAAIHRILFYQRPLKEQIVGVCTFLTDEKRLPKAHPLFQERRLYEEVNHLEITTPGETSRKLTLDERDRLVRELREKKTIAFSSLAKKLKLDTGQSFNKASESRTHLAGNEIYATMSNKKLFGNRWAHFDIDRRWLIIDRLLSEENPETLRSFLADECELDKDQIVEAEKAAHRLPEGHGRLGPTATLLILEELKSEVITYDEAIRRVAEKDRRFKHHSDFRTGEILPKLPYYGELLTREIPPGTQDPADPPEKRWGKITNPTVHIGLRQVEKLVNAIIRVHGRPDEIVVELGRELKLNEQQKDDFNRRIRDNTRAAEARSAKLIEEGFPDTGANRMLLRMWEELNPANPLDRRCPYCGERIGMRALFSSEADVDHILPYSRTLDDSVSNKIVSHKNCNRQKGNKTPYEKWGETERWDTITEQVARLHKGKQWRFQPDAMERYEGEKDFLARQLTDTQYLSRMTGKYLSSLYADASEGSVYVLPGRMTAMLRRLWGLNSLLPDHNFVENEHSNAPRNRLDHRHHAIDAAVIAVTTRALLNEIAHAAGRAESDDLDRMFKDLPQPWEGFREELGEKILKVTVSHKADHGRKGQPSKHHDITAAQLHNETAYGLTGDYAADGKTPIVVHRIPLSSLKPGDLTNPERDAARRSLSRDGRADGQGVRKGLGGVFGKGLAAGQEWKTGVQGLAPSPRPRAAERHPHHRQIRASLQGLQRRFERAFRCLAIAGWEVGIGYRFNVRRTSNRRR

SEQ ID NO: 17765 - protein, 1369 aa, unidentified
  REGION 1..1369: note = Cas Enzyme sequence
MKKILEKDYYVGLDVGTDSVGYAVTDEQYHLLRHRGEPMWGTTVFEAAKQSADRRGFRTARRRLDRRQQRVRLIRELFATEILKVDENFFTRIMESSLYREDKTSYDFKNVFFNDDNYNDADYYKQYPTIHHLIVELMNSNKPHDVRLVYIACAWLVAHRGHFLSEVSKDNIDAVLLFKPLYESFEAFFTDNSFELPWKCCAEDFENVLKKQVGVTAKEKMFYEIISGGKKPKNDITDTMPFSIAHIIKLLCGGKSKLSELFGNEDYAEIGSVSLSMADEDMLGILSEIGDDSEIIVKLKSLYDWAVLNDVSMNSKSISEAKVKVYEQHHDDLKNLKLFVRKYCPEKYNRIFRKVEKSEHNYVAYSAHTNALSPTEAEEMHKSGKEDFCNYLKKILKDVKCEKADEEFYSDMMHRLSIYTFMPKQVTGDNRVIPYQLYWYELNKILENASGYLPFISETDSEGYVTKDKILSVFEFRIPYYVGPLTDESRSKFAWMKRKANASGKIYPWNFDSIVDKDASEQEFISRMTKSCTYIPGETVLPKNSLLYTSFEVLNEINNLKINGESITVEQKQNIYENLFLKNSKVTPAKLKNFLYSNGIFQKDDVISGIDISASINSNLKPHLDFAQLIAGKTISASQAESIIARRTYSEEQFRYARWVANEFEFLAPSDLKYISRLKYKNFGRLSAKLLNGIIGVCKETGETGSIMYFLWNTNENLMMLLSERYTFMEEIQRLQDSYYSENPKGVEQQFEEMYVSNAVRRPIMRTLDIMDDIVKVNGKAPKKIFVEMARGADENSKKKRTSSRKEQILELYRKVKTEDVRTLSEQLESMGEVADTRLQSDALFLYFMQFGKCMYSGKTIDITKLKTTTYNIDHIYPRCFVKDDSILNNKVLVLSTYNSDKGNTYPINASWQALMKDYWTMLHNCGALNDEKFKRLVRMTPFTNDEKMGFINRQLVETRQSTKALAVILNSVYPDTKIVYVNARLASEFRRKFDLPKSRLINDLHHAKDAYLNIAVGNVYYEKFTRNWFSVTDEYSLNPEYLFTNVQKTREGIVWNGEETLAGVKKNMRKNNIHYTRFAFCRKGGFFDQNPVKASEGLVEMKTGLSTEKYGGYNKTTASFFALVKYFVGEKKSTMIMPVELMAAGKFKNDEAFAQEYAIATIGKIQKKNVDRVEFVLGNRLLKVNTVFEFDGLQMALGSKAGGGKQLGVIPLNPCVLPEEYEKYVFMLEKLSDKIKKNPNIVINSEYDGVCAEQNQKLYAILCGKSAIRPFVLMPNSQTATLENGKCVFIELELKKQVEVLLNIISLYKTGRTGTADLTLIKGSKNSGVLFMSSTVDNWSKNYSDIRIVDKSASGLFESKSVNLIELL

SEQ ID NO: 17766 - protein, 1287 aa, unidentified
  REGION 1..1287: note = Cas Enzyme sequence
LPEDAEHRTNNIFFDDTDYTDKDYFEEYPTIHHLICELMESKEPHDVRLVYLACVYLLAHRGHFLLPVSEDDISKVTELEPLYESFYKALEEKLDEEPPFDRSADDFAEILKSHKTVSAKNKDFDKLLFGGKVKTYDNENISYSALIKLLSGGTEKLSKFFENEEYTDLEKDSVCVRNADFGDTLEMLEGQIDELDFALLKSVKSLYDWSLLVDILEGKSLISEAKKDKYDEHGYDLDALKYLFREYLTKDDYNEMFKEVSGKQNYASYVYNAPSDKTRDCKYKKCSQEDFCKFTKKFLSKIKPNEKDKPCLDKLLEKCEQNSLCPKQVTTDNRVIPYQLYYVELKKILENACGYLPFLNERDEYGTVADKILSIMKFRVPYYVGPLVDSKKSPNAWLVRKLDGKITPWNFTDMVNEDDSEKAFIRRMTCKCTYVAGQDVLPKYSLLYSKFSVLNEINNIKLNGEPISVQAKQEIYTELFERNKSRVSKKKIRDCLISHGYAADSDEVTGIDDIAKSALRSYHDFKKMLSNGILTEQQVEEIIEHITVTTDNIRLKKWLKTQFPMLADEDVKYITKLKYKDYGRLSRCFLEDVLPVDTKTGEAESDKNIITMLWETNENIMQLLSSKYRYSENIEHMNRQYYALPENHKSMSERLKDMYVPTAVRRAVTRTFDIVKELKKIQGRDPDKIFIEMARGTGETPKGKRTNSRKDQILEHWHGLDNKDINDLKKSGIWEHLDTIDDAKLRSDKYFLYFMQLGRCMYTEKPIPFEEVENEHKWNIDHIWPQAKIKDDSLDNKVLVSSNENGKKSDSYPISDDIRHSMAGLWHSLYKKGLISEKKYQRLTRSTPFTDDELSGFIARQLVETRQSTKAVATLLKEQFPNTEIVYVKAGLVSDFRQEMGMLKCREVNDLHHAKDAYLNIVLGNVYNTRFTKDPLNFVKNNEKYSIKIFQKNSDGKKTGVMTRKVERGGEVAWDPETSFAIVRKMMSKNSIRYVRYAYMRKSGQNGGFFDQNPLRKGKGMVSIKHNLSIEKYGGYDNATISFFSLVSIKDFGVILLAVELLSANKFLKNISEAKEYAADKLSKELNVKIVPNDVAFPLNNRYNVVKINSVLELDGYRVMIAAKQNSSIKFVSNESLILSSQHMAYVKKITKFIEKRKQDKVCMINAFSGISSEDNIELYDVLVSKCNIKPFNIMYENLGIKLSDNRDNFIKKSVENQVLILSEMVRLFKTGRKTGVNLEEVGGRKNSGVKTLNTCLYKVKDYSNIFLVDQSPTGLIERKSPNLLDL

SEQ ID NO: 17767 - protein, 1350 aa, unidentified
  REGION 1..1350: note = Cas Enzyme sequence
MKQDYYIGLDMGTESVGWAVTDVDYNLIKKRGQDYWGVYLFDEAQTAQGRRAFRTNRRRLARVRHRLNLLQELFDSEISAKDFGFFYRLENSKYFDEDKPEIARGKFLLFNDKDFGDKEYYKNYPTIFHLRNALRTQEIKDVRLLYLAVHHILKNRGHFLFGEQDFNVNDASDVSGEFEKINRFLSENDGAGFDREKIPEIFETLCNENLAKRERKEKILELAGNSKNKLLGEAVNAVVGLNFSLSKMFGEDRDFQGENKMSFTDSSFEEKLAKARMALDDDEADFLETLKKVQSVASLHNILHGKEFISEAKTEAYETHRRDLSELKKYVRENCPEKYALVFRRQVKKGKKNTSGADENEKDDKKVNNYAAYIGMDKGKGFEKCKKEDFYAFLKKEIGINDESLLAKIDEGIFLPKQISAENCDIPYQVHLAELKAILANAENYFPFLKQKDENCEMTVSEKIISLMKFRVPYYVGPFTDKETRFSWMIKKEGLSTQKITPWNFDDVVDRDASEKKFIERMTNFCTYLTGEKVLPASSFLYSEYAFLNELNNLKVNGTKDLRVKNILFDFAKTNKKLTLKKCCEQLVKNGLLPEGSKAQDVFSGTDGDFKNSLSSYIDFKRIIGDKADLYRDMCEEIISWITVISDKERLVKIIKDKYGTVLSDEEIKGLKALNYTKWGRLSAKLLDGIFETDSEGEVGSVSIIEKMRTDTENFMELLSNKHNYKRAIELVNSESIVDERVTYRAVDELYCSPAVKRSIWSALKIVREIVKVQGHSPKKIFVETTREKPDGARKGQRTESRKQKLLDKYRENLRNETELIKKIEETEDSKFNSDKLFFYFTQMGKDAYTGEKIEFDDVFKTEKYDIDHIYPRSKIKDDSLDNRVLTRKKINQGVKQDIYPLPAEIRNKMEGLWRQLKDKKLISEEKFYRLTRSTPLTEEECGDFINAQLVATSQSAKAAIQLLKRMLPESEIVYSKAVNVNEFKNRLKFVKIRELNDLHHAKDAYFNIVVGNVFNTKFNHNAAVFLRNNGTGNYDLKRLYDFDITNAWKAGDENRIRSVAEKNTCRVVRFSKTEKGQFYKVTICPAGKNDKLAPIKGNGPLNDTSKYGGYDKETTAYFMLVKSRDKKKKDKTLLSLECVTVLADKNFRTAEDKLKYCEKELGLKEPEILIEKIKLNTLFKINGSYAWIRGRTGDRLELCNANQLWLDNGSAKELKKISNHFRDVKKYKDLPVREEEISKEQNLALYDLFTEKLGGKIYAGLSIKGQIENLEKGRDKFEALELKDQLFVLMEILKFMQCNSMTSNIKLIGGAENAGKNRISKLIQDSDVKMISCSPTGYFCKVVDFKRFL

SEQ ID NO: 17768 - protein, 1192 aa, unidentified
  REGION 1..1192: note = Cas Enzyme sequence
MSLIFSFDVGKASLGYCVRKGYEIEELKSIIIPSEHADYVELFGGRKRQFRTREAHEKRQNWLRALWNDLGLEGLDSKDSRLVSEFRKSEDEEVCSGVLLRIKLLEGNKLQEWQIFKALWSAIQKRGYDDKLPWASSNSSRKEKKDELIDEVDSGEKSKPENDDDAENKKGIESYEKDLVENCGTDEKFHLPCYLEAAKLCLWKNGRIISHKITYEAEKVRKSAFVAPRHLIEKEIEQLLIKAAEQIPSIKEKEFDFVFFPNEESKRENKGIPVKGKGIDFVLYGQGQKQYASYYKDSEFNRKRGTEWDTQGLLSQKIPRFDNRIIGKCSLIPRLNTCNADDILAQEFKLIQSIRNLIRPNREALPHEKFIMVFQKLRNKLVIKDAPPSINFSLTEINKALKEVDLSQISEKNLHSKQTKSSFFKINNSGRSRLSRPALSCVSELILSGKPINRFVEEICEKGTLEHTAFGLLKNKEDKSKTEVQEKKYKHLITENNPLKGITQSELVNLSSRLGDSWSNYSIQDDREVQDLSKLSLDERKKLVEKELGKISNYVVKNRLQIVINTLNRLLKDHGEPDSVVVEMPRGEDSLDGSQNNLDYIKAQKDREKINKIYIEELAKLEKSPKYLERYKLWKEQRGVCVYTGQTILDSEIDSSKLDVDHIIPRAQNGNNSIINKVLVLKTVNNEKLDRTPYEWLSSNPQKWAEFKEQFETGLLKHLPKFKKKLLLVDPSSEDGKKLIDNLNALQDTRFIAKLGKKLIGIFLGWNEGSEGSKRKLAVVKGSETAEFRREYDLNKLLGDDKEKNRNNNKHHALDAYCMSFANDEWVWTKSENGKQIRRKEHLETSEHVKKVKAEIKSWMEKVVPVDIIKGNPKKGDPKKKKPDETIYGLRLINKKLCIVRYRPLAPSKNDKDKKNDNAEKEEKLKPERIVDPFIREDLKNRFQSRNFDGKTQSEFFQKYLHPNPKRKQQNCEVKRVLYIECEINQEDLKRPLISNGRFCYQNFVDVSKNPSYSIDDLMNEKREKRKNNIQLKKIKQSRNYLIYKDLNSTKDNYGIRHVKGYESIKVAKEELEDKKFEVVNEHLFSGCLIKIHKDFEASVEIKKEKTKNKKTKNEDSTEEIQNDTKEAKTERKIMPSGIYILSSIGEATPRVSLESNNGDSMELLGRLNKLMELGFDLHEPNESKKEGRKLI

SEQ ID NO: 17769 - protein, 1414 aa, unidentified
  REGION 1..1414: note = Cas Enzyme sequence
MKGLVDVNLRNYPGEYNIGLDMGTGSVGWAVTDEQGALLHFKKKPTWGSRLFDSAQPASEARVHRGQRRRYIRRRWRLDLLQKIFEPAMSEVDPDFFMRLNQSRIIEGDPIFTNGFTKADYYDRFPTIYHLRAYLMDTDKKADLRLIYLAIHNIVKHRGNFLRQGEKLSAKTAKTSDALKALNESLKAWCESREYEFSKIDEKKAAEILAEKMTNRSKKAEGIKDLIKVDTADASVNKKLAKGIGNAIVGLKCEFVDIFGEFECEATKFELSDDEKLEALKAVCPDDCAELFEAICGVYSAYVLQGLLAYAEGETISHNMIAKYDCYKCDLETLKSLVRDYAPDSYDDFFRGSTYHDVNADDPSRDYDVSKAKGYTAYDLHKLSYDDFAKAVKKFFAGTGAEADERYTQMMDAFKEQRFLRRLKTSDNGAIYYQLHLEELQAILNNQSSYYPFLKNDEAKIESLVTFRIPYYVGPLTSKNAAQDCHANNRFQWSERKPGMEDVTVTPWNWESVIDKNKSAENFIMRMTGDCTYLAGEKVLPKQSLLYEEFCVLNELNGVRWTTDGDDWRRLDAAQREGIIHDLFHRKGRVTYKMIADWLVREGDATNPLVAGGQGESGLESKMASYIFFAKDIFEVDELDSSDYPVIEKIILWNTLFEDRSILREKLQEEFGPAGNGMLNVEQIKKICKKRMTGWGRLSQKFLCGIKVNTQAARQVSIMDVLREGNPNTTRRQGETMVMMEILHDDTLGFQEKIDEHNRKYYAENEKGMGVNELPGSPAIRRSLNQAIRIVDEITKIAGHAPANVFIEVTRDDDEKKKGKRMTKRWDRIEAALKCLKDEGGNLEVMGDFKKLKADNIDLDERLTLYLMQNGKCLYSGKSINLEKLMAGSGEYEVDHIIPRAYIKDDSLDNKALVWREENQRKTDQLLIDEGIRRKMGNTWGRLHEAKMMSDKKYRNLMRANINDNAMKGFIARQLVETSQMVKMAQALLEACYASEGTKIIPVKASMSHNLRDAAGLVKCREANDFHHAHDAYLACRLGLFIQMRHPGMYKNPKDYSRVMKKYVREQSELFKKTHKMPGSAGFVVNSFMTAGFDPELGEIFDDAWDEDTDVKRHRGKYLPDGWNAAAEVESIRRALNYRQCYISRMPQEDTGAFWDATVYSPRDPSKGNKLALATKRELDPKQFGGFSGVKFAYFFIFEAKKEGKKIYRFSQVPIWLATSIEAGKTSLDDYASLLSKSEGIEFTQIVRSKLYKKQCVEIGGDRVLITGAEEVRNATELALSTDNLLLIKSAADYVKHGTALPDLFDIESMQLLFEIIQRGDEIANGLMAKLKLDSKIDRIKRTTSDQRAKLIVALIKIINGADRQIDLTAVGGAKTAGQYKMTFNAKLNDSKTPFYIIDQSVTGMFERKTRVGL

SEQ ID NO: 17770 - protein, 908 aa, unidentified
  REGION 1..908: note = Cas Enzyme sequence
EGAIRASTAELQRRIDQSGARTLGEYLWGRRQRGSTVRARPGGGPYLGGGLYPERSMIERELEAIRDAQAPHHPEVTADAWNDLVGSLLYQRPLRPVERGRCTLLPDENRVLKAEPLFQFFRILQEVNNVEVAPPGQAARPLTDEERERVVAKLRRSRTRRFDQLVADAGLPEGTRCNLRAVAREELDGDRAAVPLRAKKCFGRKWDRHSLEEQQQIVERLLADTNADDLVDWLMDEFGLDEAAAEAVSEAKLPPGTGNLSRAAIGRMLPFMQNGMRYHDAVTAAGLGRHSDRHGDASHERLPYYGSVLARYATGVKPDAASEVERFGRVANPTVHIALGQVRRLFNAIVDAYGKPNEVVVELSRDLKQTEEQRREDERRQRTNRERNDRLRELAEEAGVPEPSAQDMRKLRLWDEQGPPNQRVCPFTGTPLSIGRVLSDETEVEHLLPYSRTLDNSMNNSVVAMRHANREKANRTPFEAWGADSDRYGEILARAESLPTGKRWRFNADAMKRFSERADFLDRQLNENRYLSRLVREYLECVVEHSSIWVTPGRMTALLRRAWGLESILAALDSDRKNREDHRHHMIDAAVVGMTSRSLLQRVAQAAGRGTDVDRIAADIPPPWPGFRRDMEALARNCIVRHRPDHFTVLGDKRERRRAGRDVTSGSLHNDTAYGVIDGPDEKGMMTLVERKHLTAIMPKDLERVRDLALKARLQSLWKQVQAENAESSESEQWQRFAPEARRQIGIRRVRLLTTMGEGSLAFVGDATGGFYKAYKTDGNAYMDIWLLPDGKTRGETVSRFDAHSQRGHSQIKAKHPAARKLMRLHIDDMVAMGEGENRQIRRVQQLSDQRVVLVDHAQAGKSKEMPSFSKSATLVLVEGMRKVSVDVLGRVHDGGPLKVEARQRSRE

SEQ ID NO: 17771 - protein, 1048 aa, unidentified
  REGION 1..1048: note = Cas Enzyme sequence
VLRLGLDLGTNSIGWVLYRLNDADSLEPIEIVDGGVSIHSDGRNPKNRASNAADRRMKRGPRRNRDRTLRRRRRVAAQLRICGLLPDPAEDRAPWRQLDPLKLRAEALDRPLSRFELGRVLLSFAERRGFKSNRQADGGEEGAIRASTAELQRRIDQSGARTLGEYLWGRRQRGSTVRARPGGGPYLGGGLYPERSMIERELEAIRDAQAPHHPEVTADAWNDLVGSLLYQRPLRPVERGRCTLLPDENRVLKAEPLFQFFRILQEVNNVEVAPPGQAARPLTDEERERVVAKLRRSRTRRFDQLVADAGLPEGTRCNLRAVAREELDGDRAAVPLRAKKCFGRKWDRHSLEEQQQIVERLLADTNADDLVDWLMDEFGLDEAAAEAVSEAKLPPGTGNLSRAAIGRMLPFMQNGMRYHDAVTAAGLGRHSDRHGDASHERLPYYGSVLARYATGVKPDAASEVERFGRVANPTVHIALGQVRRLFNAIVDAYGKPNEVVVELSRDLKQTEEQRREDERRQRTNRERNDRLRELAEEAGVPEPSAQDMRKLRLWDEQGPPNQRVCPFTGTPLSIGRVLSDETEVEHLLPYSRTLDNSMNNSVVAMRHANREKANRTPFEAWGADSDRYGEILARAESLPTGKRWRFNADAMKRFSERADFLDRQLNENRYLSRLVREYLECVVEHSSIWVTPGRMTALLRRAWGLESILAALDSDRKNREDHRHHMIDAAVVGMTSRSLLQRVAQAAGRGTDVDRIAADIPPPWPGFRRDMEALARNCIVRHRPDHFTVLGDKRERRRAGRDVTSGSLHNDTAYGVIDGPDEKGMMTLVERKHLTAIMPKDLERVRDLALKARLQSLWKQVQAENAESSESEQWQRFAPEARRQIGIRRVRLLTTMGEGSLAFVGDATGGFYKAYKTDGNAYMDIWLLPDGKTRGETVSRFDAHSQRGHSQIKAKHPAARKLMRLHIDDMVAMGEGENRQIRRVQQLSDQRVVLVDHAQAGKSKEMPSFSKSATLVLVEGMRKVSVDVLGRVHDGGPLKVEARQRSRE

SEQ ID NO: 17772 - protein, 908 aa, unidentified; identical to SEQ ID NO: 17770
  REGION 1..908: note = Cas Enzyme sequence

SEQ ID NO: 17773 - protein, 1048 aa, unidentified; identical to SEQ ID NO: 17771
  REGION 1..1048: note = Cas Enzyme sequence

SEQ ID NO: 17774 - protein, 1129 aa, unidentified
  REGION 1..1129: note = Cas Enzyme sequence
MNGLVLGLDIGIASVGVGILNKVTGEIVHTNSRLFPAATADNNVERRGFRGGRRLTRRKKHRSVRLHDLFEEYGLLTDFSKVSINLNPYRLRVQGLDNQLTNEELFIALKNIVKRRGISYLDDASEDGSTVSSDYGKAVEENRKLLSEQTPGQIQLDRFEKYGQLRGDFTILENSEKRRLINVFSTSAYRKEAERILRKQQEFNNKITDEFIEDYLTIHTGKRKYYHGPGNEKSRTDYGRYTTKKDSEGKYITLDNIFGVLIGKCTFYPDEYRASKASYTAQEFNLLNDLNNLTVPTETKKLSEEQKKTIIEYAKTAKTLGASTLLKYIAKLIGASVDQIHGYRIDPNKKPEMHTFEVYRKMQSLETIKVEELPRKVIDELAHILTLNTEREGIEEAINAKLKDTFSQDQVLELVQFRKNNSSLFSKGWHNFSLKLMMELIPELYETSEEQMTILTRLGKQKSKEASKRTKYIDEKELTEEIYNPVVAKSVRQAIKIINEATKRYGIFDNIVIEMAHENNEEDAKKEYIKRQKVNLDEKNAAMEKAAFQYNGKKELLDNVFHGHKELATKIRLWHQQGEKCLYTGKNIPISDLIQNQYKYEIDHILPLSLSFDDSLSNKVLVLATANQEKGQRTPFQALDSMDDAWSYHEFKSYVKDSKLLGNKKKEYLLTEEDISKIEVKQKFIERNLVDTRYSSRVVLNALQDFYKDHRFDTTISVVRGQFTSQLRRKWGLEKSRETYHHHAVDALIIAASSQLRLWKKHNNPLISYKEEQFVDSETGEIISLSDDEYKELVFKAPYDHFVDTLKSKKFEDSILFSYQVDSKYNRKISDATIYATRKAKLDKDKSEETYVLGKIKDIYSQAGYDVFIKIYNKDKSRFLMYHKDPQTFENVIKEILRTYPSKELNDKNKEVPCNPFEKYRQENGPIRKYSRKGNGPEIKSLKYYDKNIPESFINITPSNSKNKVILRQLNPWRTDVYFNHQTEKYELLGLKYADLQFEKKTGNYSITIDKYNEIKEKEGVDKGSEFKFTLYKNDLLLIKDTKNNEEQIFRFLSRTMPNKKNYVELKPYDKAKFDGNQELMTIFGNVAKGGQCLKGINKSDISIFKVKTDVLGNKHFIKKEGEEPKLKF

SEQ ID NO: 17775 - protein, 1272 aa, unidentified
  REGION 1..1272: note = Cas Enzyme sequence
MEADSAMDPRLIFEAVANHVVRRGHFLLENQNVSSTNSDIDTQVANYAEVLVSYFEDTLDERIELSLEALDINGNVTARELQKQFASAMCVSGDDIQKKTEKAQIKAIADLVAGYKADLTVLVPDAEKLPKVSISDGDALEEFLADSCPDSLVPVLMAAQALYTSWKLQGMLSYAPGKSLSHNQVAQHDVYGKQLRMLKDLALKYVAKQDANGNVDEDGFKDYVRFFGGPKREDGYRYDKVQVKKQDSPKNNMGYTAYNLNVLGYEEFAKRVELLFKDTDAVDDSQYKTMMEAFANHAFLRRIHTVDNAAIPYQLHAEVVNRIIDNQGRFYPWLIDAREHILKVLTSRIPYYVGPLDSTDHGKAGENGTRFAWVKRLAGHEDAFVSPWNYEDHIDIDTTAELFIRRMTGECSYLDGEDVLAKNSLLYEKYCFFNELASLSFTEDGDSWMPFDAGMRRAIYDAASDGKTMTVKRIESVLQRDFFIAHPHVRGTSNPKAMSSKRSNYAYFCRLFDVKALSASDMSMAEDLVLWNTVFEDRDILRRKILKTYGDLLTEKAVDDFCHKHLSGWGKLSERLLTGIWADTASGDMCVMDVLEQGRPYGRYRGSSMNLMQILNDDVLGFKMEIKRLNDSHMQTAEGFDLNALPGSPALRRGVSQAMKVLDDIVSVAGKAPDRIYLKVTRTASNSRKGKRTAKRCDKIKQALKALDADAAADLGAAKLLRELGMFDEKEINERIYLYFHQAGKCLYTGKPIDITRIASNDYYVDHVVPLAYRKDESLDNKVLVYAEASRYKSETLLVSPAVQRKMLPFWRMLRNAGLMSERKLNALNRTEVSEGMLKSIIGRQFTENSWEAKLFTAAIAAKYPGTVVIPVKAGVIGAVRSRIGIPKSLKANQFYHAHDALLAAEVGRYMELAKPALVHNRVKYEQYMRKIKLVDEENKKAPKSQLDFFAGGFFFDRVDKDTGEVYWNKDEEVERIYRACGWKNLRVTYAAFEDGGAFWKQTIYSPREKSKLIATKSDRPAEIYGGYSSQTFANFFVYEVMKKKVKQLRFGAVPAAIASKSDPDTYNAMLEMYARGLAKTAKEKFVRIVRARVLKNTMIELYGERFRIAGEKQVYPVRQMPLAIDEVYLLKGVETIAAAGNAGASAKIDFEKAAESLVGFWDLLLEKLPVNYPKLTVQLKLGSLKHPKDILAATSESEFPAIVYKIAEAEIQVMEQASGLRNMSDTKILGGNTFGGSLVFTFNKVLNDPKSKACFIDTTPAGLYEVKTKIW

SEQ ID NO: 17776 - protein, 1453 aa, unidentified
  REGION 1..1453: note = Cas Enzyme sequence
MEKYILGLDLGTNSIAWSLIQQHFNNKDGRILGMGTRIIPMSQDIISDFGKGKSISQTAERTAYHSTRIVRERHLLRRERLHRVLHILGFLPEHYDQQIDFKKYFGKFISGSQPKLVYNKKEFLFKDSFHEMLADFKQAQPDFLKDKKGNDCLIPYDWTIYFLRKKALTQKIEKEELAWILLNFNQKRGYYQLRGEEEEENPNKSVVFYSLRVLDVVADEEKNKKGETWYSLHLENGWTYRRSSKTELYDWKDKVRDFIVTTDLNEDGTEKKDKDGNVKRSFRAPGSDDWTLMKKKTEQDIAQSTKTVGEYIYDHLLLNPKQKIKGKLVRTIERKFYKEELEQILKTQLTFHSELQDTFLLKNCIEELYRNNKIQQQQLVLKDFVHLFVKDIIFYQRPLRSQKSNISNCSLEFRMTKNEKGENKVRPLKVIAKSNPYYQEFRVLQWIHNLAIYRKEDDVNVSDEFFNTIEDKEELFDFLNHKKDIEQKILIRFLLEKKGYKGKVLTAEIEKYRWNYVMDKKYPCNETKAMLYSCLSKVDNVPADFLSFHQELNLWHLIYSVTDKEEYNKALKTFARRHQLNEESFFEAFRKFPPFKSDYGSFSQKAILKLLPLMRFGKNWDWNQINTESQDRIAKIITGEYDEEITDRVREKAQHLTKETDFQQLPLWLAQYVVYGRHSEATNADKWYSVKDLENYIASFKQHSLRNPIVEQIVLETLRVVRDIWIQYGKGDKDFFNEIHIELGRDLKNTAEERERITTMITENENTNQRIKALLAEMALDKTVENARPYSPSQQEILRIYEDGVLNSGMDIEEDILKISKAAQPSNSDLKRYKLWLEQKYRSPYTGQIIPLNKLFTSEYEIEHIIPQSIYFDDSFSNKIICEAAVNKLKDNTIGLAFIKKFHGQVVDCGMGKQVKIFEVSGYEEFVNQNYAKNRTKRNKLLMEDIPEKMIERQLNDTRYISKYISGILSNIVRSESNDDGVNSKNLISGNGKITTALKQDWGLNDIWNDLILPRFERMNVLTNSSGFTSWNENYQKYLPTVPIELSKSFSKKRVDHRHHALDALIIACATRDHVNFMNNEHALKNGKTKEEKQKFRFDLRAKLCDKKYNSDSTENYQWVFKKPWETFTTDSKNELEKMVVSFKQNLRVINKATNYYEKWVDKNGTKVKETVKQEGINWAIRKPLHKETVSGKISLDRIKVGKGKILTATRKSLDTSFNENNIETITDTGIQKILSNYLKSKNNNSEIAFSPEGIEEMNQNIRDYNEGKLHQPILKVRVFEQGSKFQLGETGDKTKKYVEAAKGTNLFFAVYEDKSGKRNYETIALNLVIERQKQGLSSAPEVNEKGHELLFVLSPNDLVYVPMEEEDISRIEFNNLNREQASRIYKMVSSTGSECHFIHSRVATLIKSYDTKTKIGEFGSLNKLEVTMDNSVRIKEKCIKLKVDRLGNISKS

SEQ ID NO: 17777 - protein, 1385 aa, unidentified
  REGION 1..1385: note = Cas Enzyme sequence
VWEHFKRLQKRFIERQSKGKRRTIMKEVYNIGLDIGTSSVGYAMTDEKGRLLRFHKRPTYGSVLFEEAQTAKERRQKRSARRRLARRRKRIKLLQALVAPDVCAADPAFFLRMNESFLWAEDSKYEKFYAKLPKALFVDGTVSVETLPTIYHIRNELVKSTKQADIRYVYLAMHHIIKYRGHFLMEGQTLSDIGAEAPQKMQELLELLTDPESFVCGLAAAENAAKEICHTMENHSLRGMARKEQIQKLLYAGKKKESKEAAQALASLLLGYKGSLKALIGYESQTDAPEKTSLGAIEGETEETYLAGMTEAQAEVFALMLELYRWQLFAEIRQNGQTISDTMVARYEKHGRDLEKLKAWVKAYQPDKFYALFRDDENAKGYAAYTDHLRKPKKFKKEKLQRCTQDEFYKVLKAMLTGNKDAEAAAAAQPMLEAIDEPNGFLPLQRINLNGQIPNQIQAEELVKILDAQGKYYPTLRENREKILSICTFRLPYYVGPLYQDKNSPFQKWIVRDKTQPAYPWNFFDVVNQTKTAEGFIANLTNKCTYLPIEDVLPLHSLLYEEYLMLNELNRVRVKGNLIRDVQLKKRMMDELFAKNKSVSYKVFAKWLRQNSPYADVTENDISGTQEPGKFTASLRTRYDLEKHGFTVNDQTMERLETLVRWSTIFEDRSILKKLIQEQYPEVTDNQLSFLVQRRYTGWGRLSEKLLTGLLGEYENQPATIMDVLRATNENFMQVLNNPQYHFQEKIAKERLMELGEPKEKIEYDEIRKLQVSPALKRGIWTAVRIVKELIEHQGCHPHAIYLENTREETPDEKKQRTQSRLNQVEQMYKELAEDKTAEKVPSECWEVLKNCKDKKKLDDQQYLYLLQLGKSLYSGKPLDFDQLSATTEIDHILPQCYIVDNSIENRALVLSGENQRKADNLLLADSIRDSQRPWWNYLRQKGFMGEKKFKNLTRSMVSADDKQKFVARQLVETGQMVQCVTELFKRYYPDVHVSGIKAGLSSELREQYGLYKIRELNDMHHAYDAFLAATMGNFVERFIPWLDNESSAAIRFRKAQGAKKDDDKVDLSSKHGMILARFSRDQVDADTGEIIHNAQQEICYLKAVWGYHDGHVVFLKRQKSGAIYDETRYRAGSVKAKFALKKALGTERYGGFNSINPAFMTAIQYTQGKKVYHRVVGIPIYANVPTGKADELIRAFAADKIPGVTVVRPRLLMNQMLEWDGGVFVLRGGQTIDILTGKENAARVTISNGKQLFVSGKDMTTIALLFRGEENGLNPEQLKETVLHLLEKFKTQYAVFYQKCKADDINRILKNLETPEQLTTADWTAMVSELLNAMGKQRKASKEWITCEDWRIRGIPTKDVDLIDQSITGLREKRTKLWPDSEPS

SEQ ID NO: 17778 - protein, 914 aa, unidentified
  REGION 1..914: note = Cas Enzyme sequence
VKILDAQGKYYPTLRENREKILSICTFRLPYYVGPLYQDKNSPFQKWIVRDMTQPAYPWNFFDVVNQTETAEGFIANLTNKCTYLPIKDVLPLHSLLYEEYLMLNELNRVRVKGNLIRDVQLKKRMMDELFAKNKSVSYKVFAKWLRQNSPYTDVTENDISGTQEPGKFTASLRTRYDLEKHGFTVNDQTTEQLETLVRWSTIFEDRSILKKLIQEKYPDVTATQLSFLVQRRYTGWGRLSEKLLTGVLGEYENQPATIMEVLRATNENFMQVLNNPQYHFQEKIAKERLMELGEPKEEIEYDEIRKLQVSPALKRGIWTAVRIVKELIEHQGCHPHAIYLENTREETPDEKKQRTQSRLNQVEQMYKELAEDKTAEKVPSECWEVLKNCKDKKKLDDQQYLYLLQLGKSLYSGKPLDFDQLSATTEIDHILPRCYIVDNSIENRALVLKGENQRKADNLLLADSIRDSQRPWWNYLRQKGFMGEKKFKNLTRSMVSADDKQKFVARQLVETGQMVQCVTELFKRYYPDVHVSGIKAGLSSELREQYGLYKIRELNDMHHAYDAFLAATMGNFVERFIPWLDSESSAAIRVRKAQKANKGDDNKVDLSSKHGMILAKFSQDQEDPDTGEIIHNAQQEICYLKAVWGYHDGHVVFLKRQKSGAIYDESRYRAGSVKAKLCLKKDLDTMKYGGYNKEYPAYIAAISYQKGKKRVGELVNVPIYLAEAIEQNPKVLVDYLEKDYPGVQIIRPKILMNQRIEYEGSELLLRSCSEMYNARELFIPTYLHHTLWKLYKAPKQLQPDDEEHLNTLISLLIEKMEKQYPIFNGVAKRMSVIDFDTLCFQEKCIFIVETMKVMAVNGQYAMYKTALSRKELSDNQGRITNKVLNLSHITLIDQSITGLREKRTKLWPDSEPS

SEQ ID NO: 17779 - protein, 1352 aa, unidentified
  REGION 1..1352: note = Cas Enzyme sequence
MKEVYNIGLDIGTSSVGYAMTDEKGRLLRFHKRPTYGSVLFEEAQTAKERRQKRSARRRLARRRKRIKLLQALVAPDVCAADPAFFLRMNESFLWAEDSKYEKFYAKLPKALFVDGTVSVETLPTIYHIRNELVKSTKQADIRYVYLAMHHIIKYRGHFLMEGQTLSDIGAEAPQKMQELLELLTDPESFVCGLAPAENAAKEICHAMENHSLRGIARKEQIQKLLYAGKKKESKEAAQSLASLLLGYKGSLKTLIGYENQTDAPEKTSLGAIEGETEETYLAGMTEAQAEVFTRILELYRWQLFAEIRQNGQTISDTMVARYEKHGRDLEKLKAWVKAYQPDKFYALFRDDENAKGYAAYTDHLRKPKKFKKEKLQRCTQDEFYKVLKAMLTGNKDAEAAAAAQPMLEAIDEPNGFLPLQRINLNGQIPNQIQAEELVKILDAQGKYYPTLRENREKILSICTFRLPYYVGPLYQDKNSPFQKWIVRDKTQPAYPWNFFDVVNQTKTAEGFIANLTNKCTYLPIEDVLPLHSLLYEEYLMLNELNRVRVKGNLIRDVQLKKRMMDELFAKNKSVSYKVFAKWLRQNSPYTDVTENDISGTQEPNKFTASLRTRYDLEKHGFTVNDQTTEQLETLVRWSTIFEDRSILKKLIQEKYPDVTDTQLSFLVQRRYTGWGRLSEKLLTGVLGEYENQPATIMEVLRATNENFMQVLNNPQYHFQEKIAKERLMELGEPKEKIEYDEIRKLQVSPALKRGIWTAVRIVKELIEHQGCHPHAIYLENTREETPDEKKQRTQSRLNQVEQMYKELAEDKTAEKVPSECWEVLKNCKDKKKLDDQQYLYLLQLGKSLYSGKPLDFDQLSATTEIDHILPQCYIVDNSIENRALVLSGENQRKADNLLLADSIRDSQRPWWNYLRQKGFMGEKKFKNLTRSMVSADDKQKFVARQLVETGQMVQCVTELFKRYYPDVHVSGIKAGLSSELREQYGLYKIRELNDMHHAYDAFLAATMGNFVERFIPWLDSESSAAIRVRKAQKANKGDDNKVDLSSKHGMILAKFSQDQEDPDTGEIIHNAQQGICYLKAVWGYHDGHVVFLKRQKSGAIYDESRYRAGSVKAKLCLKKDLDTMKYGGYNKEYPAYIAAISYQKGKKRVGELVNVPIYLAEAIEQNPKVLVDYLEKDYPGVQIIRPTILMNQRIEYEGSELLLRSCSEMYNARELFIPTYLHHTLWKLYKAPKQLQPDDEEHLNTLISLLIEKMEKQYPIFNGVAKRMSVIDFDTLCFQEKCIFIVETMKVMAVNGQYAMYKTALSRKELSDNQGRITNKVLNLSHITLIDQSITGLREKRTKLWPDSEPS

SEQ ID NO: 17780 - protein, 1210 aa, unidentified
  REGION 1..1210: note = Cas Enzyme sequence
RLTRAAAALCVGYKANIQAICPDVPNEHKSCSVANSDELDAVAGEAPDELVPILEAAANIYMALKLQDLLSFQPGKTISYNLVGLYDKYRSDLRLLKDTSLELVVGRDARGELKVDGQGYRDHNAFFCGPRKEGEHAYDKYAVIADMKRGVNRGFTAYNLKVRPKDVKGGAMGDDYDLFAQNTVKYLVDHGLARAEVGKDGKSKTFVSDIADVSEILDGLRAKRFCRRVCTPDSRAIPFQLNAEELERIIDNQGRFHPFLLENRGHIMDVFRCRVPYYIGPLSTDGAPVGSRGRNRFAWSERKAGHEDARVSPWNIDEHIDRKASAESFIRRMTGECSYLIGEDTLPKCSLLYQEYCFRDELAGLKVTFDGDDERPLSRAERNAVMEVARHRNTVSYAAIEALLSDEAGGMKARLVGRRTNNGKDEASMASKLSSYNFFAHVVLGKDALTGVEASMCEEIILWNTLFEDRKMLRETIEEAFGEVLTPEQVDKICRKRLSGWGAFSERLLDELTVKVDGRDTTIMDILRDGYPFGKRRGRAVNFMQIVTDSRLGFSKAIEEENQAYADSFEDFEVTDLPGSPALQRAVSKAIAVVDDIAEVAGKNPSTIFYTNTRNSRKAKGKKTVSRQKRLAATLKDARKEYGYALDVDALLAELSSFADGDAFPLRAELYFRQGGRDLYTGERLSLAAALAGDYELDHIIAPSYRKDDSSSNLALVQRSSANLKGPDRLLTSDVRVKMSTFWRTLVLSGLMSKKKQVKLTCSEVKVQNLSDYLNRQLVEAGQYAQLFKLVASRRYPGCKIHAMKPGASGGLRAALSLPKVPAANGLHSAHDALFAASMGRYIKACFPEFFSNRFLHEKLRSYLDDALESRKMSEFDFFLRGFFLTHADRDTGEVIWDAEQEVAQLEREVCWKNLSQVRDSYSGDQVNSNGFWKMTAYSPRNPAIANLQIPRKENLPCDVYGGYTSTKFAYFFIYEYEDKRGKRSVAIAGVPNKLAADAERDPRLLDAEGMRLSSEAGKKFVKVLFRRVLKKQVFEAYGEEFFVSGLAECAPAGQLVFRREDQDRLYTAMRYGTLDPSRLDVEEVLADLDWLFGETMSILARLRPHSYSRLGVERLLTPSEAWHRALEDKPSADRGKLLTKLCREVSGIVSYFAHNTGAKAMELTLLGGSGIAKVNPGAIAKLIMTPEAGFAFVNRSAAGLRETRVKAAL

SEQ ID NO: 17781 - protein, 1481 aa, unidentified
  REGION 1..1481: note = Cas Enzyme sequence
MLIATFHSSVAQQVHASLRIGVYMRKLSGASSYTVGLNIGETGVGFSAVDDEGGEVLFHRGKPVMGVHLYNSAKHADGARAHRTARRTLRRKQARVREIERIFEPAVAEVDPGFFVRRHMSALVPADAVAAGADLGSPADRDFKALLGAFPTPAHLRVYLMESNHPADIRLIEHVFAHAVSKRGNFYLEGNDGVSAEHSQLVPALVELGVALDDFLWGEQEAHFEVDVDSAAAACGNKALTTAALCDALDSAFTAVPADPDLCDEKAMARLTRAAAALCVGYKANIQAICPDVPNEHKSCSVASSEDLDAIAAEVPDELVPILEAAANIYMALKLQDLLSFQPGKTISYNLVGLYDKYRSDLRLLKDTSLELVVGRDERGELKVDGQGYRDHNAFFCGPRKAGEHAYDKYAVIADMKRGVNRGFTAYNLKVRPKDVKGGAMGDDYDLFAQNTVKYLVDHGLARIEAGKDGKSKTYVSDIADVSEILDGLRAKRFCRRVCTPDSRAIPFQLNAEELERIIDNQGRFHPVLLENRDHLMDVFRCRVPYYIGPLSTDGAPVGSRGRNRFAWSERKAGHEDARVSPWNIDEHIDRKASAESFIRRMTGECSYLIGEDTLPKCSLLYQEYCFRDELAGLKVTFDGDDERPLSRSERNGVMEIARHRNTVSYSAIESLLSDEAGGMKARLIGRRTNNGKDEASMASKLSSYNFFAHVVLDKDALTGVEASMCEEIILWNTLFEDRKMLRETIEEAFGEVLTPEQVDKICRKRLSGWGAFSERLLDEVSVKVDGRDVTIMDILRDGYPFGKRRGRAVNFMQIVTDSRLGFSKAIEEENQAYADSFEDFEVTDLPGSPALQRAVSKAIAVVDDIAEVAGKNPSTIFYTNTRNSKKAKGKKTVSRQKRLATTLRDAKKEYGYALDVDALLAELSSFADDDAFPLRAELYFRQGGRDLYTGERLSLAAALAGDYDLDHIIAPSYRKDDSSSNLALVQRSSANLKGPDRLLTADVRVKMSGFWRTLVLSGLMSKKKQVKLTCSEVKVQNLSDYLNRQLVEAGQYAQLFKLVASRRYPGCEIHAMKRGVSGGLRAALALPKVPAANGLHSAHDSLFAAALGRYIKACFPEFFSNRFLYEKLRSYLDDALGSRKMGEFDFFLRGFFLTHADEDTGEVIWDAEQEVSQLEREVCWKNLSQVRDSYSGDQVNSNGFWKMTAYSPRNPAIANLQIPRKENLPCDVYGGYTSTKFAYFFIYEYEDKRGKRSVAIAGVPNKLATDVERDPRLLDAEGMRLSSEAGKKFVKVLFRRVLKKQVFEAYGEEFFVTGLAECAPAGQLVFNREDQDRLYTAMRYGTLDPSHLDVEEVLADLDWLFDETMSILARRRPHSYSRLGAERLLSPSEAWRRVIEDKPSADRGKLLTKLCREVSGIVSYFAHNIGAKAMELTLLGGPSVAKVNPGAIAKLIMTPEAGFAFVNRSAAGLRETRVEANLED

SEQ ID NO: 17782 - protein, 1520 aa, unidentified
  REGION 1..1520: note = Cas Enzyme sequence
MKILGLDLGTNSIGWAVIEKEDGKILNTGVRIFPEGVEEKTIGMGDKEQSKNATRRDKRQMRRHFYRKRLRKIKLLEILIEQKMCPLDAKEFKKWKNWSREEKAEGRVFPQSKDFVDWLRLNPYHLRDKATAEAISLIELGRVFYHMIQKRGFLSSRKGNEDPKTLFEKGKPDENILPINETKEKIKETSLGSYLNSISYKEKVPYKTVRDENGNEIRVRGRYTTRDMYVEEFERIWNQQANYSDIDDRQVRVKKIRKLKGELSGSRDAKRIRFLIQKYGKENVIIGDKGKKGETEITTITKMPFKQLLAGNIEKIKDNDGQDVIRFKSNESLLFWQRPLRSQKSLLANCRFEDQLPVIGKDGSFRRDKKGQIQTRNKKPCPISHPEFELFRAYQLVNNIKYGKVHELDSEQRAIVLDLINKNERGFDFEKIPKELKLTYEKFNYEDKFKVPGNTTIKLLKPLFDPTVWATHYEEIWHCFYFYDDSEKLYDKIKNDYGFKGDIEAVKKIKIKDGYSNVSLKAIRNILPYLEKGLQYDKAVILGGVRNAFGRRWEYFKEYHQEIENGVKGILKREHKSGEGIEEIKHFLSSPNFKYGFVKDDPRFTHLYHHSQEVEAKDELDQWVPQVDNLRNPIVQQALFETRRLVNSLLRKYRAQHEDDFYFDQIKIEMGRDLRNSKKQRQEISYKISKNEEKNLEARQRLSEYGLQPSRTNIQKYLMYKEIEERAGRGVCPYTGKTISINALLGTDNAIQIEHIIPYSVSLDDSFGNKTLCEANFNRDKGEKTPYQYHKENPDPKLWGAKDWGEVEERAFRLLPYLKARRFTAKKEFEKSSFIERQLNDSRYIARKSVELLSHVCKDVRVMPGQLTAELRHLWGLNNILQPIKNIELHDFDVDQDKTIPYYVVTDENGEVKFVQRKTNEKPKADDNEILLSGKLRKNRFSCGSYEAEIEGNDLDDGNYWGRFRVTEEILLSAKYAERPRQDENSIVFKGKVENGQFKNDTTGNIKIGHPDGTYWAKFHIKEKRFEAPVKDKQPKRKSNQVLLFGTVADGEFKSFIYQCATDLPDGKFWAVLDFDIQSVEFVQFRNPLPAINNNQLLLSGTIDEDGVLTADDDNDFQIETDRKTGKYYVVLNVVSMDQALYKLTNDRPKLEKGQLLQEGNIWVDKYTGEIKFDPKKNRDDHRHHALDAITIALTEQSYLQRLSTYNAQRKQKERGKLNSTENYPEPWNGFSTDAKKAVEEILVSYKKSNKALTKNRKGFSVRGQLHKENVFGKRKSPGQEADSYHRRVKIADLKDNKHVGKVVDDTIRKLIIDHLRDSCGVNTGNPKGFTVPPDSFYKDGQWRLFLPNNKKGDKIPIKKVRLRETIGKAMTLKSSTDINQWVNPRNNHHVLIYRDYNGNLQEQVVQFWTVVERRVQGLPTYILPEDGKEMVVTLETNDMFLLGLSSEDYHVYKENYGYLSQHLYRVQKISESYYNFRYHLASTLLNDYEEKRIQSFKAWETLNPIKVKISELGGIIRVR

SEQ ID NO: 17783 - protein, 1038 aa, unidentified
  REGION 1..1038: note = Cas Enzyme sequence
MVEYSDPREFGFHPETVMTALMPYEQFSSKTRRLILGIDIGIASVGVCLIDIRNHEIILMASHIFKAPVEGKQKDISARPSGASIRRGYRSVRRTTKRRKNRKKVVRDIEKKYVLIPDDADGQWFAIRKDEPDVLHLRGKALLYKLNARELARILYAFAGRRGYIDHGKGTTDDDSGKVKKALSENRKILDENGYETIAQYLLKQPTSRNREGDYRYMVDIEMVTDEVHTIFRHQRDLGSDIATEELEGEYLSALRRLTDTSARDKKIYSRVGYCTYLGAPEKRAASSLISFEMVRAYEKLSNIKIEHQGREATYISPEKRNEIVESLFAVSKNPKPLKWSQLREKLGMQSSDSFDSRLPTDEKGDCIKIPAWNALCTGLFTSNRALLDRLHDDTDIADAVSSALTYASSGESLRNALENLSLDLSEQDIDSLLDLPYASKLFSGYCSTGVRALQMLRDAFKDPQIEKLYDAEMATGLYEARQALAAERNESKDGLLCPYLEFDPTCTNPVVLRATAQVRRMINSIIRHYGLPNIIRVEVAKDLKRSKHEKAIIAATNKANKDSNEQAKKDLVAFYGLPNDAHVSSADFEKMRLYREQFGQDPYTGKGINLERMLNDRDYVEIDHILPLSRSCDDSKSNKVLCLTKSNRDKANRTPYEWMTSGEPSAPDFGDFCRRMDAWAGKGKSAHYTKSKLSKLKNSTFGKEEQKFIDRNLNDTRYMSRQLAMWVRECLPFPDDKRQHVFCVAGAATSLMRRIWGIGIVDKKGKKDRSDDRHHAVDAAVIACCSPEIVKGIARVNSGRSNIKERERLRYESMPYPEFKDQVEAWIPCIVPTRTVSRTATGSLLKDTVYPYVGVDDRGKDLYRRNGKIEPASTLWKDGSGGCKLYDGVYGLVAVFDEGMRKSGGWRFDPVYYIDVPNVRQDFIREFTKDLSIDYWTKVQLKGDEPRIFLKQGDVLLQDGCVMRYYKYNVSNGVISSYSKIGEKSVPLQKTGPLSEEKFPKQSKWDSSLTVMQEDCLGLCWLRFLSNRAGKFESFPV

SEQ ID NO: 17784 - protein, 1134 aa, unidentified
  REGION 1..1134: note = Cas Enzyme sequence
MKYVIGMDIGIGSIGWSVIRSDADCKRIEDFGVRIFDPGENASDRKSNSQIRREYRSVRRVLRRRKHRKELLKAHLENIGLTTIDRINEYFKHADGDIISLRVKGLDKKLAPEEIAACLINIANRRGYRPFYENEELSQYEKTSLNKTRQFMLSGEYRTSAEMILKNEQFDSEESEYRSYRNRSGNEETVLIERKWLRDEVEKILKKQSEFYPCLNDRNTNAIKRIIFDQRDFEDGPGDKNDPFRRYTGFLESMGQCRFYPDEKRGYRATLTADTYSLVNELSQYSYVDENGCFVFDSALAHDLIASALKNAKFTKSDFNKICKAHGIVPIYGGKGKDTDISRCFKFLKAIKPILEADGFDWETVCNIDTASDPDSILNRIGIIVSENITPARRKKALKNLNILNDDSITALCNYKFGGTSSVSYKYMSGAIEAFLNGDIYGKHQASHIEETATESVKHTKLPVFDKDFEFFKNPVVFRSINESRKVINAIIEKYGSPSAINIEVGSEVSRSFANRTADKNEQTKRMKEKDAAKKAIAELLGVDIASVTSKMIDRYFLGELQGWKCLYSGKEINKEECLRGSKAYEIDHIVPFSLILDNTLNNKALVLTSENQLKKQQTPLMYLSGEQRKNFIGTVNELFRAKKIKKKKYAYLLQPDLNDEKMSEWKSRNLNDMRYISRFMVGYLKENLKFDNSSKSEGRWQNVYAVKGSLTSMFRKLWLNETTWGRADKASIKAETYLDHAVDAVVIGNCLPVYVEIAQVNLRLRDIYKSNGRQFVAEYWDCFNKGVEMISRYYNIDKDTIRAFLKKSDRIPSLIPDLREEVDRRFVDHAIYSKYQKEIADHEGKDFEKPTYEEAEQAYRVSMENLYPTDLQFAHGLSMPLISCKPERKYRGEITAANPVKLREIDGKLYTLSKKEIGKIERKDIEKIYTSDTQLIAYLIELFDGAKDTATLSDIMKEKGISEIRTKNGNAIRKLTLRNICNKNFLKKEIDENNHTYLDTAKYYCVELYKDIKNQLQVQGIKRADIIPQNGKLCLAPWYKQPDGYFKHVMYLQKNDYLKVYKNGKLSFCGYYRSAAGLTNSRLYFIIDNQPEDKKKYITLKLEVKKYSVDILGKIGKKEIKCGEPLSSAKVKK

SEQ ID NO: 17785 - protein, 1138 aa, unidentified
  REGION 1..1138: note = Cas Enzyme sequence
MKYVIGMDIGIGSIGWSVIRSDADCKRIEDFGVRIFEPGENASDRKSNSQIRREYRSVRRVLRRRKHRKELLKAHLENIGLTTIDRINEYFKHADGDIISLRVKGLDKKLAPEEIAACLINIANRRGYRPFYENEELSQYEKTSLNKTRQFMLSGEYRTSAEMILKNEQFDSEESEYRSYRNRSGNEETVLIERKWLRDEVEKILKKQSEFYPCLNDRNTNAIKRIIFDQRDFEDGPGDKNDPFRRYTGFLESMGQCRFYPDEKRGYRATLTADTYSLVNELSQYSYVDENGCFVFDSALAHDLIASALKNAKFTKSDFNKICKAHGIVPIYGGKGKDTDISRCFKFLKAIKPILEADGFDWETVCNIDTASDPDSILNRIGIIVSENITPARRKKALKNLNILNDDSITALCNYKFGGTSSVSYKYMSGAIEAFLNGDIYGKHQASHIEETATESVKHTKLPVFDKDFEFFKNPVVFRAINESRKVINAIIEKYGSPSAINIEVGSEVSRSFANRTADKNEQTKRMKEKDAAKKAIAELLGVDIASVTSKMIDRYFLGELQGWKCMYSGKEINKEECLRGSKTYEIDHIVPFSLILDNTLNNKALVLTSENQLKKQQTPLMYLSGERRKNFIGTVNELFRAKKIKKKKYAYLLQPDLNDEKMSEWKSRNLNDMRYISRFMVGYLKENLKFDNSSKSEGRWQNVYAVKGSLTSMFRKLWLNETTWGRADKASIKAETYLDHAVDAVVIGNCLPVYVEIAQVNLRLRDIYKSNGRQFVAEYWDCFNKGVEMISRYYNIDKDTVRAFLKKSDRIPSLIPDLREEVDRRFVDHAIYSKYQKEVADHEGKDFKKPTYEEAEQAYRVSMENLYPTDLQFAHGLSMPLISCKPERKYRGKITADNPVKLREIDSKLYTLSKKEIGKIERKDIEKIYTSDTQLIAYLIELFDGAKDTATLGDIMKEKGISEIRTKNGNAIRKLTLRNICNKDFLKKEIDENNHTYLDTAKYYCVELYKDIKDKLRVQGIKRADIIPQNGKLCLAPWYKQPDGFFKHVMYLQKNDYLKVYENGELLFCGYYLSVEDIRNSKLYFIIDNQPGQNRKENCKSIHIKSEVKKYTVDILGKIGKKEIKCGEPLSSAKVKK

SEQ ID NO: 17786 - protein, 1136 aa, unidentified
  REGION 1..1136: note = Cas Enzyme sequence
MMERTYRFGFDIGIGSIGWAVISGEKDTARIEDFGVRIFDSGEKSDGKSRKSQERRAFRSVRRLTNRRHFRKIRLKRFLVNIGMLTDDLLINLSKNVDVNTMALKVKALDEKLTKIEIAQCLIHTCNHRGYKPFYMIDDEISDSDAEATDESEKMLQTAYSQMMKNYKRSGLRTISEFICQKLPNNGTDFPNYRNKEGSDNFRLIPRKLLEEEIEKILFAQSSYYPEITASNIQTLKEIIFAQRCFEDGPGDPNNPFRRYTGSLGKIGACPFYKGLERGYRSTLIGDIFAVVNTLSQYRFINQTTGEIALTSDAAKLMLAHVIESGKASIRDLQKLVSPLDILIKMNDNSESKKLSDSIKFINLLKNDVEGSGLSWKDFTSEEQFDCGHPSRIHQIGVVLSKYQTPSKREKALEEIEFLTPELRSRLSNRKTHGAANASDQFMCEAIQAFLKGEIYGNFQYRTTERIASQDMNQSFRKLGAELLKDEEFNDNPVVFRSINETRKIINALVRRYGSPEAVNIEVASDLNRGFLARQEIRKEQAKKEKENELCRMKIAELLKIDCTEVKGSQIDMYKLYNEQNGRSLYSGVNLGGLEAVLRNTHKEYEIDHIIPYSLILDNTLHNKALVFAGENQAKGQRTPLMYLSAEQKEKFLETINQMFSRKENPISAKKYQYCMLKTVYSDESQELLSQWKTRNINDTRYITKYLVGFIKKYLQFSGDAKVYGVKGGYTSQFRKIWLQAIDGEWGSEEKDRTSDLNHALDAVIIANLTPPYLEIASDNNKLQQIFRKNNGAETREYNEYLEDCVRKMKRYYGFQESYTVSLLKNPNRVPAYAPKLDTEVDIRFNITDPAKFNEKVNNFYGDCSDFIVPPHIPLVSYKPERRFQGQIADSNFIKIRKVDGKDRRIVRKSIKEICKKDIADLYTHDQDLLSSLSRILSEREEKYSIEKYMEENSLKEFRTDCGQLVRKVSLLEKNAVSNYRVKQISDTNHSILSSLKYYCVEVYKDAKGKIHCWGIRYVDIVRKGKKLQIKKASIPPDYVSHVHYLMANDYVEITDKNGKVKCAGYYQSVKNINSNLFYFKQMGLSEIIKIGIAQTDEVRKFDMSILGEKGGEIKCSAQSLFLREKESASAIDGLS

SEQ ID NO: 17787 - protein, 1398 aa, unidentified
  REGION 1..1398: note = Cas Enzyme sequence
MSGPYSIGFELSSTAHGFVATDPNGNVLYHGKQPVMGTRVFKEGQHAAEARMPRTSRRGIQRRRGREHEMERVFAPVISSIDPDFFIRCRMSYKLGKIRFESDPIGFSYSRLFHSFPTLAHLDVALMEADSAMDPRLIFEAVANHVVRRGHFLLENQNVSSTNSDIDTQVANYAEVLVSYFEDTLDERIELSLEALDINGNVTARELQKQFASAMCVSGDDIQKKTEKAQIKAIADLVAGYKADLTVLVPDAEKLPKVSISDGDALEEFLADSCPDSLVPVLMAAQALYTSWKLQGMLSYAPGKSLSHNQVAQHDVYGKQLRMLKDLALKYVAKQDANGNVDEDGFKDYVRFFGGPKREDGYRYDKVQVKKQDSPKNNMGYTAYNLNVLGYEEFAKRVELLFKDTDAVDDSQYKTMMEAFANHAFLRRIHTVDNAAIPYQLHAEVVNRIIDNQGRFYPWLIDAREHILKVLTSRIPYYVGPLDSTDHGKAGENGTRFAWVKRLAGHEDAFVSPWNYEDHIDIDTTAELFIRRMTGECSYLDGEDVLAKNSLLYEKYCFFNELASLSFTEDGDSWMPFDAGMRRAIYDAASDGKTMTVKRIESVLQRDFFIAHPHVRGTSNPKAMSSKRSNYAYFCRLFDVKALSASDMSMAEDLVLWNTVFEDRDILRRKILKTYGDLLTEKAVDDFCHKHLSGWGKLSERLLTGIWADTASGDMCVMDVLEQGRPYGRYRGSSMNLMQILNDDVLGFKMEIKRLNDSHMQTAEGFDLNALPGSPALRRGVSQAMKVLDDIVSVAGKAPDRIYLKVTRTASNSRKGKRTAKRCDKIKQALKALDADAAADLGAAKLLRELGMFDEKEINERIYLYFHQAGKCLYTGKPIDITRIASNDYYVDHVVPLAYRKDESLDNKVLVYAEASRYKSETLLVSPAVQRKMLPFWRKLRNAGLMSERKLNALNRTEVSEGMLKSIIGRQFTENSWEAKLFTAAIAAKYPGTVVIPVKAGVIGAVRSRIGIPKSLKANQFYHAHDALLAAEVGRYMELAKPALVHNRVKYEQYMRKIKLVDEENKKAPKSQLDFFAGGFFFDRVDKDTGEVYWNKDEEVERIYRACGWKNLRVTYAAFEDGGAFWKQTIYSPREKSKLIATKSDRPAEIYGGYSSQTFANFFVYEVMKKKVKQLRFGAVPAAIASKSDPDTYNAMLEMYARGLAKTAKEKFVRIVRARVLKNTMIELYGERFRIAGEKQVYPVRQMPLAIDEVYLLKGVETIAAAGNAGASAKIDFEKAAESLVGFWDLLLEKLPVNYPKLTVQLKLGSLKHPKDILAATSESEFPAIVYKIAEAEIQVMEQASGLRNMSDTKILGGNTFGGSLVFTFNKVLNDPKSKACFIDTTPAGLYEVKTKIW

SEQ ID NO: 17788 - protein, 1399 aa, unidentified
  REGION 1..1399: note = Cas Enzyme sequence
MKKLKQMSGPYSIGFELSSTAHGFVATDPNGNVLYHGKQPVMGTRVFKEGQHAAEARMPRTSRRGIQRRRGREHEMERVFAPVISSIDPDFFIRCRMSYKLGKIRFESDPIGFSYSRLFHSFPTLAHLDVALMEADSAMDPRLIFEAVANHVVRRGHFLLENQNVSSTNSDIDTQVANYAEVLVSYFEDTLDERIELSLEALDINGNVTARELQKQCVSGDDIQKKTEKAQIKAIADLVAGYKADLTVLVPDAEKLPKVSISDGDALEEFLADSCPDSLVPVLMAAQALYTSWKLQGMLSYAPGKSLSHNQVAQHDVYGKQLRMLKDLALKYVAKQDANGNVDEDGFKDYVRFFGGPKREDGYRYDKVQVKKQDSPKNNMGYTAYNLNVLGYEEFAKRVELLFKDTDAVDDSQYKTMMEAFANHAFLRRIHTVDNAAIPYQLHAEVVNRIIDNQGRFYPWLIDAREHILKVLTSRIPYYVGPLDSTDHGKAGENGTRFAWVKRLAGHEDAFVSPWNYEDHIDIDTTAELFIRRMTGECSYLDGEDVLAKNSLLYEKYCFFNELASLSFTEDGDSWMPFDAGMRRAIYDAASDGKTMTVKRIESVLQRDFFIAHPHVRGTSNPKAMSSKRSNYAYFCRLFDVKALSASDMSMAEDLVLWNTVFEDRDILRRKILKTYGDLLTEKAVDDFCHKHLSGWGKLSERLLTGIWADTASGDMCVMDVLEQGRPYGRYRGSSMNLMQILNDDVLGFKMEIKRLNDSHMQTAEGFDLNALPGSPALRRGVSQAMKVLDDIVSVAGKAPDRIYLKVTRTASNSRKGKRTAKRCDKIKQALKALDADAAADLGAAKLLRELGMFDEKEINERIYLYFHQAGKCLYTGKPIDITRIASNDYYVDHVVPLAYRKDESLDNKVLVYAEASRYKSETLLVSPAVQRKMLPFWRMLRNAGLMSERKLNALNRTEVSEGMLKSIIGRQFTENSWEAKLFTAAIAAKYPGTVVIPVKAGVIGAVRSRIGIPKSLKANQFYHAHDALLAAEVGRYMELAKPALVHNRVKYEQYMRKIKLVDEENKKAPKSQLDFFAGGFFFDRVDKDTGEVYWNKDEEVERIYRACGWKNLRVTYAAFEDGGAFWKQTIYSPREKSKLIATKSDRPAEIYGGYSSQTFANFFVYEVMKKKVKQLRFGAVPAAIASKSDPDTYNAMLEMYARGLAKTAKEKFVRIVRARVLKNTMIELYGERFRIAGEKQVYPVRQMPLAIDEVYLLKGVETIAAAGNAGASAKIDFEKAAESLVGFWDLLLEKLPVNYPKLTVQLKLGSLKHPKDILAATSESEFPAIVYKIAEAEIQVMEQASGLRNMSDTKILGGNTFGGSLVFTFNKVLNDPKSKACFIDTTPAGLYEVKTKIW

SEQ ID NO: 17789 - protein, 1410 aa, unidentified
  REGION 1..1410: note = Cas Enzyme sequence
  REGION 858..861: note = misc_feature - Xaa can be any naturally occurring amino acid
MKKLKQMSGPYSIGFELSSTAHGFVATDPNGNVLYHGKQPVMGTRVFKEGQHAAEARMPRTSRRGIQRRRGREHEMERVFAPVISSIDPDFFIRRRMSYKLGKIRFESDPIGFSYSRLFHSFPTLAHLDVALMESDSAMDPRLIFESVANHVVRRGHFLLENQNVSSTNSDIDTQVANYAEVLVSYFEDTLDERIEPSLEALDINGNVTARELQKRFASAMCVSGDDIQKKTEKAQIKAIADLVAGYKADLTVLVPDAEKLPKVSISDGDALEEFLADSCPDSLVPVLMAAQALYTSWKLQGMLSYAPGKSLSHNQVAQHDVYGKQLRMLKDLALKYVAKQDANGNVDENGFKDYVRFFGGPKREDGYRYDKVQVKKQDSPKNNMGYTAYNLNVLGYEEFAKRVELLFKDTDAVNDPQYKTMMEAFANHAFLRRIHTVDNAAIPYQLHAEVVNRIIDNQGRFYPWLIDAREHILKVLTSRIPYYVGPLDSTDHGKAGENGTRFAWVKRLAGHEDAFVSPWNYEDHIDIDTTAELFIRRMTGECSYLDGEDVLAKNSLLYEKYCFFNELASLSFTEDGDSWMPFDAGMRKAIYDAASDGKTMTVKRIESVLQRDFFIAHPHVRGTSNPKGMSSKRSNYAYFCRLFDVKALSASDMSMAEDLVLWNTVFEDRDILRRKILKTYGDLLTEKAVDDFCHKRLSGWGKLSERLLTGIWADTASGDLCVMDVLEQGRPYGRYRGSSMNLMQILNDDALGFKMEIKKINESHMQMAEGFDLNALPGSPALRRGVSQAMKVLDDIVSVAGKAPDRIYLKVTRTASNSRKGKRTAKRSDKIKLALKALDADAAADLGAAKLLHELGXXXXLGMFDEKEINERIYLYFHQAGKCLYTGKPIDITRIASNDYYVDHVVPLAYRKDESLDNKVLVYAEASRYKSETLLVSPAVQRKMLPFWRMLRNAGLMSERKLNALIRTEISEGMLKSIIGRQFTENSWEAKLFTAAIAAKYPGTVVIPVKAGVIGAVRSRIGIPKSLKANQFYHAHDALLAAEVGRYMELAKPAFVHNRVKYEQYMRKIKLVDEENKKAPKSQLDFFAGGFFFDRVDKDTGEVYWDKDEEVERIYRACGWKNLRVTYAAFEDGGAFWKQTIYSPREKSKLIATKSDRPAEIYGGYSSQTFANFFVYEVMKKKVKQLRFGAVPAAIASKSDPDTYNAMLEMYARGLAKTAKEKFVRIVRARVLKNTMIELYGERFRIAGEKQVYPVRQMPLAIDEVYLLKGVETIAAAGNAGASAKIDFEKAAESLVGFWDLLLEKLPVNYPKLTVQLKLGSLKHPKDILAATSESEFPAIVYKIAEAEIQVMEQASGLRNMSDTKILGGNTFGGSLVFTFNKVLNDPKSKACFIDTTSAGLHESKTKIG

SEQ ID NO: 17790 - protein, 1530 aa, unidentified
  REGION 1..1530: note = Cas Enzyme sequence
MKNILGLDLGTNSVGWALVSVDENGKLVKKIRLGSRIIPMSQDVLGKFDSGVTVSQTAERTEYRSHRRLLERALLRRERLHRVLHLLGFLPEHYAACIGWDRNDNATYGKFLPETEPKLAWRKADDGEYRFIFMQSFDEMLEDFKESQPSLLSNGKRIPLDWTLYYLRNKALTKPIAKEELAWILLNFNQKRGYYQLRGEEDEEVPSKRVEYHELKVVKVEATDEGKGGNIWYNVLLENGWVYRRQSKYPLDKWLGLTLPFIVTTNLEADGVTPKRDKDGNEKRSISLPKEDDWTLLKKRTEDHLEKSGLTVGAFIYQHLLANPSDKVRGQLVRTIDRKYYKRELQAIIARQMEFHPELRDAKLLKACAEELYRNNGEHRAQLMAKDFKHLLVEDVLFYQRPLKSKKSLISNCPYETRQYINKETGEIKDVNVKCIAKSNPYFQEFRLWQWISNLRLLRQIDGQDVTADYIKGNDDKERLFDLLNSQGEIKQEHILRDFLKLKKPKGGEFPLRWNYVDDKVYPANETRHAINKAIKGMAVDKEEKEMLGQLFVQSAEEYMLWNLLYSITDRNELTSALRRFALAHGISSVDAFVEAFLKVKPFKKEYGAYSEKATKKLLQVMRVGKYWCGDELADPAKRTKGNKQAVYDEMANRGICKQTLQNISNIIEENIDERLMGALLNPERPLTELSHFQGLSVSDACYVVYGRHSEVAEIVKWKDAGELNTFINNFKQHSMRNPIVEQCVLETLRTVRDVWEQEGQIDEIHVELGRNMKRTAEQRAHDTQAIQRNENTNMRISLLLTELKNDPSISDVRPYSPSQRELLKIYEEGALENLTNQDEDIAKISRLAQPSASELRRYKLWLDQKYVSPYTGRPIPLAKLFTPAYEIEHIIPQSRYFDNSFSNKVICEAEVNKLKDNNLGMEFIKKFGGKTKGILDEEAYKLHVTTNYAHNPAKRSKLLMEDLPTDFNSRQLNDTRYISKTVMSLLSNVVREEGERETRSKHVVVCTGGVTDTLKKDWGLHDVWNNLVHPRFIRLNNLTGTQDFGYWRALDEEKRKQGEDSKKVFQITLPPECQRGFVKKRIDHRHHAMDALVIACASANIVNYLNNQSAANPNSREDLRRLVCDIKRRIRKPWSTFTQDAQAALEDLVVSFKNTVRVVNKASNTYLRYDKDGKKKRFKQEGEGLKAIRKPMHKETYYGEVNLIRKEMLPLKRALEDVNAIVDKELRACIKGLLRDGFNLQQVLANFKAKDFKFNKRDIKKVEVYVSSAKSTPMVATRKSLDTSFNAKRIADITDTGIQKILLNYLKANDNSPEQAFTPEGIAYLNEHIAEYNNGKPHQPILKVRVSEIRGAKFAVGQTGSKKTKFVEAQSGTNLYFAIYEDKEGKRHFETIALNVAAERLKMGQTPVPETNDAGLPLKFYLSPNDLVYVPTDEDRAAARPSIDKRRIYKMVSATDRECYFLPFEVASIIADKVEFEAKNKVGRVIAALEYKEKSEEENKTSAGSKVMIKDVCWKLEVDRLGNITKIVR

SEQ ID NO: 17791 - protein, 1537 aa, unidentified
  REGION 1..1537: note = Cas Enzyme sequence
MKNILGLDLGTNSVGWALISVDENGKLVKKIRLGSRIIPMSQDVLGKFDSGVTVSHTAERTEYRSHRRLLERALLRRERLHRVLQLLGFLPEHYAACIGWDRNDNATYGKFLPETEPKLAWRKADDGEHRFIFMQSFDEMLEDFKESQPSLLANGKRIPLDRTLYYLRNKALTKPIAKEELAWILLNFNQKRGYYQLRGEEDEEIPSKRVEYHELKVVKVEATDEGKGGNIWYNVLLENGWVYRRQSKYPLDKWLGQTLPFIVTTDLEADGVTPKRDKDGNEKRSFRSPKEDDWTLVKKRTEDHLEKSGLTVGAFIYQHLLANPSDKVRGQLVRTIDRKYYKRELQAIIAKQMEFHPELRDAELLKACAEELYRNNGEHRAQLMAKDFKHLLVEDVLFYQRPLKSKKSLIANCPYETRQYINKETGEIKDVNVKCIAKSNPYFQEFRLWQWISNLRLLRQIDGQDVTADYIKGNDDKERLFDLLNNQGEIKQEHILRDFLKLKKPKGGEFPLRWNYVDDKIYPANETRHAINKAIKGMAVDKEEKETLGQLFVQPAVEYMLWNLLYSITDRNELASALRRFALTHGVSSVDAFVESFLKVKPFKKEYGAYSEKATKKLLQVMRVGKYWCGDELADPAKRTKGNKQAVYDEMANRGICKQTLQNISNIIEENIDERLIGALINPQRPLTALSHFQGLSVSDACYVVYGRHSEVAEIVRWKDAGELNTFINNFKQHSMRNPIVEQCVLETLRTVRDVWEQEGQIDEIHVELGRNMKRTAEQRARDTQAIQRNENTNMRISLLLTELKNDPSISDVRPYSPSQRELLKIYEEGALENLTNQDEDIAKISRLAQPSSSELRRYKLWLDQKYVSPYTGRPIPLAKLFTSAYEIEHIIPQSRYFDNSFSNKVICEAEVNKLKDNLLGMEFIKQFGGKQKGILDEDAYKQHVTTNYAHNPAKRSKLLMEDLPTDFNSRQLNDTRYISKTVMALLSNVVREEGERETRSKHVVVCTGGVTDTLKKDWGLHDVWHNLVYPRFIRLNNLTGTQNFGYWRALDEENKKQGEDSKKVFQITLPPECQRGFVKKRIDHRHHAMDALVIACASANIVNYLNNQSAANPNSREDLRRLVCDVKRRIRKPWPTFTQDAQAALEDLVVSFKNTVRVVNKASNTYLRYDKDGKKKRFKQEGEGLKAIRKPMHKETYYGEVNLIRKEMLPLKRALEDVNAIVDKELRANIKALLRDGFNLQQVLANFKAKDFKFNKRDIKKVEVYVSSAKSTPMVATRKSLDTSFNAKRIVDITDTGIQKILLNYLKANDNSPEQAFTPEGIAYLNEHIAEYNNGKPHQPILKVRVSEVMGAKFAVGQTGSKKNKFVEAQSGTNLYFAIYEDKDGKRNFETIALNVAAERLKKGRTPVCEKKGEGLSLKFYLSPNDLVYVPTDEDRTAEHPSIDKRRIYKMVSATDKECHFLPVSVASIIADKVEFEAMNKVGRVIDTSEYEEKEGRNKEEDKEVNKPSGISKIMIKDVCWKLEVDRLGNITKIVR

SEQ ID NO: 17792 - protein, 1199 aa, unidentified
  REGION 1..1199: note = Cas Enzyme sequence
LAGSKLNLAKAGEFLSLDDEDSKTDISLTDADFDVELENLVATLGDSPVFSIIKNAKFIYDSFQLGKLLGDGNISISKVMMRKYDRFQSDLKDLKYFIKNTHADLYKEIFGSPTKDVGNGKTAEVNNFSKYVGFYKGSKKKINLTPCTREKFLKYLVDELKLQDSNDERDISFKEKIASPDFLKKLNGTENGILPYQLNLYEMDAILKKQAKFYPFLNEIEVLSGASGEQRRVNNIDKIESLLTFKIPYYVGPLYNSNKEGDGRSVHSWVVREEGKIYPWNFDLMVDKDSSAEKFIKRMLNNCTYLSDCYCLPKNSILFSIYNVLNTINKICVNGVGLNDANVEIDGRGEVNLKKEILDGLFLKQRIVTKNQIIKFLEHYGSKDITTSNGKEIESVDLDIRAYYDFKNVFPIEFEKYGLNSVDSLIETYTSRDGGEARKFLDKIESIINDIVIFEDKDILERRLINKRGCDKQTAKKIKSLTYVGYGRISKELLLNIVASDENGEVKGSIIEDIYRSSDNFMEAIQKYNYISLIEEWNKKNMDLDPNSGVADFVDELYINPQSKRAIIQTYHILDELKRILKVPNFDNFKYFIEFARTNKAEKKRTNPRYQIVKKMLEDAAKISKEDYESVKESFEKVDPNSFQSDKYYLYFTQLGVDLYTGEKIDIEDLHKAEFYDIDHIIPRSFIKNDSINNRVLVSQEANREKSDIYPIDRSILRKNKGGYKSAKAFFDKLRKMHLITEEKYAALTRTEMNADELDGFINRQLVATDQSTKGLVQMLTGFCGVSTKNIVYSKAENVSGFRQEFGVVKSRTANNFHHAHDAYLNIVVGDVVNKYFKGHFIRGKSDLDEFKSVNKTANPENIFKSDKPVKNLYGDLVWDVHTMKDKVVDQIERHYDIMTTTMAYTTDNLFSKVTIKPHTESKGDNMIPIRYSGPYLDVDRYGGLTDYKFGSYSLIEMPNKKGDVDRYLIAIPGAYKDPNDYLVSQGYKNYKMIFPRLKINTVFKDGKKKFCVTGKTGDQFLLKNLNERIFSFDEVNIIRKIEKLIDKVQKLKLSLRKKDNEEDSILNDYFTKDNNKIIISPAMNDRNSVIELSDDELLSLYNSITKMFSKEIYSFSTISATANELIRKKEEFIELSFYKKCVLLNELLKLLQCNSRQTCDLSIIGLKSKTGTLRMSKELNKTTRVIFESYSGYYTKEI

SEQ ID NO: 17793 - protein, 1349 aa, unidentified
  REGION 1..1349: note = Cas Enzyme sequence
MKIRDYYLGLDMRTSSVGWAVTDKDYNILNLKGKDLWGVRTFPEATTAQDRRMARGQRRRIDRNKARRGLVQEMFAAEINKVDPSFFQRLSESKFQEDERTISAHYSLFNDPDFTDKDYFALYPTIAHLRKSLIESNKPHDVRLVYLAVNNILSSRGHFNALTLGTENGNSFDSAYKELLDALNNIGIELDTSVSAATVKTHLENRDISPSIKADRIATTYGIKKVKDKQKYEVIKAICGLNTNLNVLFGEDFVGDKGAIKVSFREAAFLEEVDEINTIIGEANAEILTLLKSIFDQALLSSIMAGCKYLSQARVLSYNKHKRDLMVLKNTIKELAPDQYDMMFRSDQYGTYSAYVNSCNSDKKKRREYKERTSEHLYATIKKILVNEKVPQDHPDVQYILGEIEKDNFLPKQTSNKNSIIPNQLHLAELNVILQNAKEYLPFLTVKDPECNLTPIEKLTQLMTFRIPYYIGPLNDTHKDKGGTAWVVRKQQGKVLPWTFDEMIDSKKSAEEFIRRLIGKCTYIKSESVIPKQSLLYQEFMVLNELNNLRIKGSKPSVKIKQDIYNEVFLVGNKVTQKKVENWLRKKELIKADEKGVLSGIDGDFKSTLSTQAKFRSIFKDDLNKKSTQEMIERIVYWGTIYTEPKMFKEIIAEHYSGVISKEDIEKISRYQFKDWANLSREFLLMEGVNKETGEKASIIDMLWTNNVNLMELMSSEYTFTERLKQDYSDVAKTFNELEYEDLDDLYLTPQAKRMVWQTILLLQELQDIIGEAPARIFVKRARTLNGKQKPKARKAKLIKLYKGLKDDRDWVKELEKLSDNDLQSKKLYLYYTQQGRCMYSGEKIDIKKLYDSNVYDIDHIYPKKLTKDDDLDTNLVLVKRDINKDIKKDKYPIPESIQKSQKKFWESLLKEDMTDKFITREKFNRLTSKTEFSDQELAEFISKQTTESRQDNRAITNLLEELFPNTKVITTKAQNTANFRQEFELLKVRSLNDFHFAQDAYLATIVGNCYYVKFTRNPLNYILETKKGKSKYHMDKVFKYTIQRNDDTAWVVGDDPDNPITLATVKREIQKTTPLITRQNLQGHGQLYNSTIYGNGKAYDHVYIPLKQDPRLQDVTKYGGYTSISTHTFFLVEHTSLGRRARSIEALPLLYKDISNNKEKLTKYCEDKLGYFSPEVKLCNIKPGSLIKINGYWYYLTGKSLDKLTVCNAVPMILDSKYSDYIKKIENTLTNNYMDKNITTKMNEELYEILMKKHTESIFSKRANPIGPLLTEGQPLFAQLKPTDQCYVLAEILKLSQTANTGADLRLIGGKKQSGIMGVNKHISLLAECILVNQSISGLHSNRTNLLS

SEQ ID NO: 17794 - protein, 1364 aa, unidentified
  REGION 1..1364: note = Cas Enzyme sequence
MSIGILRKKEKGRKKMKIRDYYLGLDMRTSSVGWAVTDKDYNILNLKGKDLWGVRTFPEATTAQDRRMARGQRRRIDRNKARRGLVQEMFAAEINKVDPSFFQRLSESKFQEDERTISAHYSLFNDPDFTDKDYFALYPTIAHLRKSLIESNKPHDVRLVYLAVNNILSSRGHFNALTLGTENGNSFDSAYKELLDALNNIGIELDTSVSAATVKTHLENRDISPSIKADRIATTYGIKKVKDKQKYEVIKAICGLNTNLNVLFGEDFVGDKGAIKVSFREAAFLEEVDEINTIIGEANAEILTLLKSIFDQALLSSIMAGCKYLSQARVLSYNKHKRDLMVLKNTIKELAPDQYDMMFRSDQYGTYSAYVNSCNSDKKKRREYKERTSEHLYATIKKILVNEKVPQDHPDVQYILGEIEKDNFLPKQTSNKNSIIPNQLHLAELNVILQNAKEYLPFLTVKDPECNLTPIEKLTQLMTFRIPYYIGPLNDTHKDKGGTAWVVRKQQGKVLPWTFDEMIDSKKSAEEFIRRLIGKCTYIKSESVIPKQSLLYQEFMVLNELNNLRIKGSKPSVKIKQDIYNEVFLVGNKVTQKKVENWLRKKELIKADEKGVLSGIDGDFKSTLSTQAKFRSIFKDDLNKKSTQEMIERIVYWGTIYTEPKMFKEIIAEHYSGVISKEDIEKISRYQFKDWANLSREFLLMEGVNKETGEKASIIDMLWTNNVNLMELMSSEYTFTERLKQDYSDVAKTFNELEYEDLDDLYLTPQAKRMVWQTILLLQELQDIIGEAPARIFVKRARTLNGKQKPKARKAKLIKLYKGLKDDRDWVKELEKLSDNDLQSKKLYLYYTQQGRCMYSGEKIDIKKLYDSNVYDIDHIYPKKLTKDDDLDTNLVLVKRDINKDIKKDKYPIPESIQKSQKKFWESLLKEDMTDKFITREKFNRLTSKTEFSDQELAEFISKQTTESRQDNRAITNLLEELFPNTKVITTKAQNTANFRQEFELLKVRSLNDFHFAQDAYLATIVGNCYYVKFTRNPLNYILETKKGKSKYHMDKVFKYTIQRNDDTAWVVGDDPDNPITLATVKREIQKTTPLITRQNLQGHGQLYNSTIYGNGKAYDHVYIPLKQDPRLQDVTKYGGYTSISTHTFFLVEHTSLGRRARSIEALPLLYKDISNNKEKLTKYCEDKLGYFSPEVKLCNIKPGSLIKINGYWYYLTGKSLDKLTVCNAVPMILDSKYSDYIKKIENTLTNNYMDKNITTKMNEELYEILMKKHTESIFSKRANPIGPLLTEGQPLFAQLKPTDQCYVLAEILKLSQTANTGADLRLIGGKKQSGIMGVNKHISLLAECILVNQSISGLHSNRTNLLS

SEQ ID NO: 17795 - protein, 1403 aa, unidentified
  REGION 1..1403: note = Cas Enzyme sequence
MKKKYLLGLDLGTNSVGWCLTDENNNVVKKNGKSLWGVRLFEEARDCSERRSHRSERRRLERRKERIRLLRDLMDEEMCKIDRTFFQRLDESMLHLDDRSNANKYTLFIDKEFNDKTYYSKFPTIYHLRKYLLESNKKEDIRLIYLALAHMIKYRGHFLFEGEFKSSNKDDAVAIFNSINDMLTSLNDNSEEEFKNLSFSGEIFENIKAINIEVKGISKKKEALNNILLQSKDDKFNKDVIIPLISGGSIKLLGKVLPKDGDLGDIKDSLDCKKEDFEDIIERLKSSFPAEETKLDILLECKKLYDFLLLGRLLGENKYLSLAMVNRYERHKEELKLLKSYVKENAKDKYFAIFRDASDKNPSNYVHYVGSNRTDGKGIRVEHCKQDDFYKFLKNTLNINDKSDGYLKEIFDKMSSYEYLPRLNSADNGVFPHQLNEIEMRTILDTQSKFYNFLNLVDEYGSVKDKIISILKYKIPYYVGPLYSSSKFAWVKRNSNEKIKPWNIDKIVNKDETAKEFIQRMQSKCEYLRGDDCYCLPKNSIYFSYYCVLQELNKIRINGSFITVEVKDALLKDLYLKKRKVTKKDLLAWFKSKFGEDVDITTSSGKQLEELNASLASLVDFSSIYGLDYIKNNIDIIENIIKDIVIFEDKKVLDQRLYNVYGIKDEKIRKNIKGFTYKKYGRLSKNLLLLQGVDNNGEIMSCSLLSHLHDTNDNLMEALNKTELGFGVAIDLYNERHCPELYNQDLKTYVNNLYVSPGMKRPLIQAYKIIEELEKIIGTHIDEFYIETPRTNKAEKKRTDSRYKKIKNLYDNAKEFVSSELRKQLDTKFKNDPTCFNSDRVFLYFTQLGKCLYTGKPLDLEEVMISDKYDIDHIIPQCLIKDDSMDNKVLVLNEANRVKSDIYPVPFTQLSNSFNQRHFIKQLHQLKFISEEKMDRLIRKDPITNEELMSFVNRQLVYTNQSIKALKDLIYNYHASKYNINPLVVLSKAENISDFRNKYDILKCRDANNYHHAHDAYLNVVVGRMGHTYFDYTTKDGQKNMYIEGKISEWIQENLVSGDETKKRTTNITKIFDNGDGFDKKPILDKDNNVVWNYCNDESLKKTKNQIINKFDIMVTTRAYRGTELFSKVSLKKASEYKDGNLLEKKQGLVASKYGGYSDLAFGSYTLVESLDKKGNKQVTIEAIPTMYNSNLKKKLNYLITGLELIEPKILVDELKINTIIKSNGSKFAITGKTGNKYVLKNVYEANWNYNQLLIIRKLSKLLAISKDKIDDECEEYVISPARKNNKAVIITKKECYELFTAIKEKLNSSIYQGISNLANQGNLLKSNDIKEKIDSLSLYDLCFVLNQLLKLTKCDRESSDLRLINGAGQAGVLSMSKKISSPISIISESITGYYTKVIWSNQ

SEQ ID NO: 17796 - protein, 1391 aa, unidentified
  REGION 1..1391: note = Cas Enzyme sequence
MTNKTWYLGLDIGSASVGWAATDTEYKIIRKNKKRLWGARLFEEATTAEDRRGYRSSRRRLARRKWRLNLLEELFAAEVKRIDETFFLRLKESQYHYEDKTHKVPYAIFNDKDYTDKDYYKDYPTIYHLRSKLMSEKNPDVRKVFLAIHHILKNRGHFLLQGQSFKDGNLKDLIKELLELDILNVGFDVSEEVVAKISDISLEKKTLTDKVNNLKELYPKEKQLLEVFRLIFGGKTSLDKLFAIEEYKELDATIKSISFKEKIYEEVRHDYEQVLSNYIELLDLAKLVYDSIILSDIKKEGKTLSESKVELYEKHKNDLLKLKNLVKNDSKLSEEKKVEVYTSIFKEDKDKGTNYVNYIRKSEEGKGCNYEDFKKFLVKELAKLEESSVKAEIIKELDLEQFLPLQRTKDNSVVPYQIHKEELVKILDNAVKYHDFLDEKDESGYSVKEKVVQLLEFRIPYYVGPLNSSKKAKEGGFAWSVRNKGYENTPVTPWNYSKVIDESASAEKFITNLTNKCTYLKGEDVLPKNSLLYSEFALLNELNALKYDGNRISLEARNTIIEKLFKQQGKKVTKNSIKNLLKAEGYIDGKGEISGIDITVKNDIKAYRDFKKILGDKFNSEHVENIILWITLYGESRKLIKAKIESVYGDIYSKDEITKMSRLVYKDWGRFSRKLLTELVSKKLYNEETGECLNIIGAMRQNNILFMELLADRFDYSEQISKFNKELQEEVTEITPEILDDLYVSPAVKRSIWQTVRIVEELKKIIGCAPAKIFVETTRSNQEKKKPTDSRKKQLELAYKAVKKDVKELEKEIDELKFDTLNNRLSDEEPSKLKAKKLYLYYTQLGRCMYSGEPITFENLNTTEYDIDHIYPQSKTKDDSFTNTVLVKREYNAKKEDRYPLSSDFQTPRNRRLWKFLKEKGLITDEKYNRLVRTEEFSEEELSGFIARQLVETSQSVKAVASILGELNPETSICYSKAENVSSFRQNFGKIKKGNRDSKNNEQLVKVREINDLHHAKDAYLNVVVGNVYDTKFTRNVFNFIKDKKDGRKYSLNKVFYENVSDTKTVAWEMDKTIHQVKKVMDNNSILVTRRTSEQKGGLFKATVYKAKIAAKAKEGVYYPLKTSNNVIKDVTKYGGYTSIGIAYYSIFEYILVNKKGKEKITRIIPIPIYVSQNIRDNSTLIEFGRSQVNIKDEEEIKDFKLKYAKLCIGSEIRMNNYPYYIGGKSKDTFYYDSAVQVIIDNQSEQYLKILSKYQNWKKENKDGGLWKNITKESNLELYNKLVEKMNSKIFTKKKPNKYNELNSEEIRNNFNSITAEEQVKVLLEILNLLTNKKSTFDLKNIKLGAARGQQLFDLTKLNQFSIMEQSVTGLYEKEITIIGDKGNDMENNNS

SEQ ID NO: 17797 - protein, 1258 aa, unidentified
  REGION 1..1258: note = Cas Enzyme sequence
MATTLGLDLGIASIGWCLFDDDEKGNPRKIIDIGSFVFDQIENPKSGQTENILRREKRLMRRQRRRKVRRLEDGRTLFQKTFGLDFFKVVNERHSPETPFDLKVKGLTEKLTPEEIMVALYHYLKYRGYKSNRKVDTGKDPDDKKLLSNISSLRKEISDRNASGEKIFASGLLLEKLKAKPKEEQRLHNTSNEFHLTVARDMYIDEITALLDRQIVFGVIGEDFKKEYLGLFQRQRDFSEGPDPSSKYHVSFANLIGTCVFDGKKRVGKDSYSAKQFVLLSALNNLMFKLDPSDAHYQRLSPEQIKILENFCLDKSEVKYSALFKKLDLVPFRIKGLALSRKQYKTAMAKFYEEHPEAKGGQGNGDPSTYEALSDFMQKKTLDVTFFKNSEIVYSLRRNLCARENLSEADAKLISENSFYDEIATILLTCKTDARIFDECSKRGYHTWIIDEVTKIKSVSKTIDLSLDLCRRLAAPLEHGLTYDKAMAEIGYDHSTISHSRLIGRIPDLDTALKETKQRLTNPVVRHTLVQLRNLLNAIADTYGIPTHFAIELNRDLKRNFEDRKEIRNAQMDNQGNNLRLKATLLDKFPNHFKSVFDLSKKNNDLLRYKLFDQQGGVSPYTNKIIREDDIFDDNLFQIDHILPYSRSFDDSFNNKVLVETKENQNKGDQTPFEYFKDLAPLKAYLSTHYLPREKVSRLLAKDIDSDFLDKDFEDSSYIAILAKNLITYFMLPEGEQCRTIAGSMTEKLRDLWHVSGKTHSFISSSSLHYSRKFIEEYEYRSFEANEVGGPSLVFDFAFRKSGNFEVQIKKASATGDKPLTKDQTDFNNALKEFIAQQGYFKERFSLALNQTLRGLEESISYESVNPESSIRRQAGIYILGRVIDEVERDITAKDRSNDLHHAVDAAVIGCITPKIVKHLTQFYQKNERAIEYATGEVKLSLDEPYPYFADEVLARVYERDETKLLSLLNDLPMYQENPAIEKTVHVLWPARSTEKDITGAISNETIFGFDKSSGMLTSKIAVAKLTKETLEKIMDKDGGNHAVYLACLDWLKKAGEKDRPPFPRLAKKGTLVRKVRILTGRTPSGIVDLSNDRYADNSDVVRVNVYRKNEGNKRFYFVPITYYQISRDKIRRRQFEEVKQGKRKAESVLSEPLYSLMWSQGDAGSCQITDDDLRKNYTLIACLPRHSLVEIERNGKKALCYTGGASSGMFEVYSLLGDNADLYYNGLTDSLRDRNLLTISTISALKVRSISVLGKIS

SEQ ID NO: 17798 - protein, 1262 aa, unidentified
  REGION 1..1262: note = Cas Enzyme sequence
MATTLGLDLGIASIGWCLFDDDENGNPRKIIDIGSFVFDQIENPKNGQTENILRREKRLMRRQRRRKVRRLEDGRTLFQKTFGLDFFKVINERHSLETPFDLKVKGLTEKLTPEELMVALYHYLKYRGYKSNRKVDIGKDSDDKKLLSNISSFRKEISDRNASGEKIFASGLLLEKFNAKPKEEQRLHNTSNEFHLTVARDMYIDEITALLDRQIAFRVIGEDFKKEYLDLFQRQRDFSEGPDSSSKYHVSFANLIGTCVFDGKKRASKDSYSARQFVLLSALNNLMFKLDPSDAHYRHLSPEQIKTLEYFCLDKSEVKYSALFKKLGLVPFRIKGLALSRKQYKTAITEFDTAYKKNHPDTKNWQSSGDSSVYEELSDFMQKKTLDVSFFKNSEIVYSLRRNLCARENLSEADAKLISENSFYDEIATILLTCKTDAKIFDECSKRGYQTWIIDEVTKIKSVSKTIDLSLDLCRRLVAPLERGLTYDKAMAEIGYDHSTISHSRVIGRIPDLDTALKETKQRLTNPVVRHTLVQLRNLLNAIADTYGIPTHFAIELNRDLKRNFEDRKEIRNAQMDNQANNLRLKATLLDKFPNHFKSVFDLSKKNNDLLRYKLFDQQGGVSPYTNKIIREDDIFDDNLFQIDHILPYSRSFDDSFNNKVLVETKENQNKGDQTPFEYFKDLAPLKAYLSTHYLPREKVSRLLAKDIDSDFLDKDFEDSSYIAILAKNLITYFMLPEGEQCRTIAGSMTEKLRDLWHVSGKTHSFISSSSLHYSRKFIEEYEYRSFEANEVGGPSLVFDFAFRKSGNFEVQIKKASATGDKPLTKDQTDFNNALKEFIAQQGYFKERFSLALNQTLRGLEESISYESVNPESSIRRQAGIYILGRVIDEVERDITAKDRSNDLHHAVDAAVIGCITPKIVKHLTQFYQKNERAIEYATGEVKLSLDEPYPYFADEVLARVYERDETKLLSLLNDLPMYQENPAIEKTVHVLWPARSTEKDITGAISNETIFGFDKSSGMLTSKIAVAKLTKETLEKIMDKDGGNHAVYLACLDWLKKAGEKDRPPFPRLAKKGTLVRKVRILTGRTPSGIVDLSNDRYADNSDVVRVNVYRKNEGNKRFYFVPVTYYQISRDKIRRRQFEEVKQGKRKAESVLSEPLYSLMWSQGNAGSCQIADDDLRKNYSLIACLPRHSLVEIERNGKKVLCYTGGLTSGLFEVYSLLGDNSDLYYEGLIDSFSDRARLTVSTISALKVRSISVLGKIS

SEQ ID NO: 17799 - protein, 1054 aa, unidentified
  REGION 1..1054: note = Cas Enzyme sequence
FEDFGLLTDFSKVSINLNPYQFRVQGLDNQLTNEELFIALKNIVKRRGISYLDDASEDGGTVSSDYGKAVEENRKLLAEQTPGQIQLNRFEKYGQVRGDFTVMENGEKRRLINVFSTSAYRIEAERILRKQQEFNKKITDGFIEDYLTILTGKRKYYHGPGNEKSRTDYGRFRADGTTLDNIFGVLIGKCTFYPDEYRASKASYTAQEFNLLNDLNNLTVPTETKKLNEEQKKIIVEYAKTAKTLGASTLLKYIAKLIGASVDQIHGYRIDSNKKPEMHIFETYRKMQSLETIRVEELHRKVLDELAHILTLNTEREGIEEAINANLKDTFSQDQVLELVQFRKNNSSLFSKGWHNFSLKLMMELIPELYETSEEQMTILTRLGKQKSKETSKRTKYIDEKELTEEIYNPVVAKSVRQAIKIINEATKKYGIFDNIVIEMARENNEEDAKKEYIKRQKANIDEKNAAMEKAAFQYNGKKELPDDVFHGHKELATKIRLWHQQGEKCLYTGKNIPIADLIQNQYKYEIDHILPLSLSFDDSLSNKVLVLATSNQEKGQRTPFQALDSMDDAWSYREFKTYVKDLKLLNNKKKDYLLTEEDISKIEVKQKFIERNLVDTRYSSRVVLNALQDFYKEHQFDTTISVVRGQFTSQLRRKWGLEKSRDTYHHHAVDALIIAASSQLRLWKKLNNSLISYKEEQFVDLETGEIIALSDDEYKELVFKAPYDHFVDTLKSKKFEDTILFSYQVDSKYNRKISDATIYATRKAKLDNDKSEETYVLGKIKDIYSQSGYDAFIKIYNKDKSRFLMYHKDPQTFEKVIEEILRTYPSKELNDKNKEVPCNPFEKYRQENGPIRKYSRKGNGPEIKSLKYYDKNIPESFINITPSNSKNKVILRQLNPWRTDVYFNHQTEKYELLGLKYADLQFEKKTGNYSITIDKYNEIKEKEGVSKQSEFKFTLYKNDLLLIKDTKNNEKQIFRFLSRTMPNQKNYVELKPYDKAKFDGNQELMTIFGNVAKGGQCMKGLNKSDISIFKVKTDVLGNKHFIKKEGEEPKLKF

SEQ ID NO: 17800 - protein, 1122 aa, unidentified
  REGION 1..1122: note = Cas Enzyme sequence
MNGLVLGLDIGIASVGVGILKKDTGEIIHANSRLFPAATADNNVERRTSRQARRLNRRKKHRSVRFHDLFEDFGLLTDFSKVSINLNPYQLRVQGLDNQLTNEELFIALKNIVKRRGISYLDDASEDGGTVSSDYGKAVEENRKLLAEQTPGQIQLDRFEKYGQLRGDFTVVENGEKRRLINVFSTSAYRKEAERILRKQQEFNNKITDEFIEDYLTILTGKRKYYHGPGNEKSRTDYGRFRTDGTTLDNIFGILIGKCTFYPDEYRASKGSYTAQEFNLLNDLNNLTVPTETKKLSEEQKKIIVEYAKTAKTLGASTLLKYIAKLIGASVDQIHGYRIDPNKKPEIHTFEVYRKMQSLETIRVEELPRKVIDDLAHILTLNTEREGIEEAINAKLKDTFSQDQVLELVQFRKNNSSLFGKGWHNFSLKLMMELIPELYETSEEQMTILTRLGKQKSKETSKRTKYIDEKELTEEIYNPVVAKSVRQAIKIINEATKKYGIFDNIVIEMARENNEEDAKKEYIKRQKANIDEKNAAMEKAAFQYNGKKELPDNVFHGHKELATKIRLWHQQGEKCLYTGKNIPISDLIQNQYKYEIDHILPLSLSFDDSLSNKVLVLATANQEKGQRTPFQALDSMDDAWSYHEFKSYVKDSKLLGNKKKEYLLTEEDISKIEVKQKFIERNLVDTRYSSRVVLNALQDFYKEHQFDTTISVVRGQFTSQLRRKWGLEKSRETYHHHAVDALIIAASSQLRLWKKQNNPLSSYKEGQFVDQETGEIISLSDDEYKELVFKAPYDHFVDTLKSKKFEDSILFSYQVDSKYNRKISDATIYATRKAKLDKDKSEETYVLGKIKDIYSQAGYDAFIKIYNKDKSRFLMYHKDPQTFEKVIEEILRTYPSKEFNDKNKEVPCNPFEKYRQENGPIRKYSRKGNGPEIKSLKYYDNKLGNHIDITPDESMNQVVLQSINPWRTDVYYNNKTKKYEFLGLKYSDLYFEKGTGKYKISKNKYDVIKKLEGVDEKSEFKFTLCKNDLILIKDIETGQEQLFRFLSRNNKGKHQVQLKPIDKSDFEKGEKLIDIFDTVPNSTTQCVKGLNKPNISIYKVKTDLLGNKYFIKKEGEEPKLKF

SEQ ID NO: 17801 - protein, 1121 aa, unidentified
  REGION 1..1121: note = Cas Enzyme sequence
MNGLVLGLDIGIASVGVGILKKETGEIVHSNSRLFPAATADNNVERRGFRGGRRLTRRKKHRSVRLHDLFEDFGLLTDFSKVSINLNPYQFRVQGLDNQLTNEELFIALKNIVKRRGISYLDDASEDGGTVSSDYGKAVEENRKLLAEQTPGQIQLNRFEKYGQVRGDFTVMENGEKRRLINVFSTSAYRIEAERILRKQQEFNKKITDGFIEDYLTILTGKRKYYHGPGNEKSRTDYGRFRADGTTLDNIFGVLIGKCTFYPDEYRASKASYTAQEFNLLNDLNNLTVPTETKKLSEEQKKIIVEYAKTAKTLGASTLLKYIAKLIGASVDQIHGYRIDSNKKPEMHTFETYRKMQSLETIRVEELHRKVLDELAHILTLNTEREGIEEAINANLKDTFSQDQVLELVQFRKNNSSLFSKGWHNFSLKLMMELIPELYETSEEQMTILTRLGKQKSKETSKRTKYIDEKELTEEIYNPVVAKSVRQAIKIINEATKKYGIFDNIVIEMARENNEEDAKKEYIKRQKANIDEKNAAMEKAAFQYNGKKELPDDVFHGHKELATKIRLWHQQGEKCLYTGKNIPIADLIQNQYKYEIDHILPLSLSFDDSLSNKVLVLATSNQEKGQRTPFQALDSMDDAWSYREFKTYVKDLKLLNNKKKDYLLTEEDISKIEVKQKFIERNLVDTRYSSRVVLNALQDFYKEHQFDTTISVVRGQFTSQLRRKWGLEKSRDTYHHHAVDALIIAASSQLRLWKKLNNSLISYKEEQFVDLETGEIIALSDDEYKELVFKAPYDHFVDTLKSKKFEDTILFSYQVDSKYNRKISDATIYATRKAKLDNDKSEETYVLGKIKDIYSQSGYDAFIKIYNKDKSRFLMYHKDPQTFEKVIEEILRTYPSKELNDKNKEVPCNPFEKYRQENGPIRKYSRKGNGPEIKSLKYYDKNIPESFINITPSNSKNKVILRQLNPWRTDVYFNHQTEKYELLGLKYADLQFEKKTGNYSITIDKYNEIKEKEGVSKQSEFKFTLYKNDLLLIRDTKNNEEQIFRFLSRTMPNQKNYVELKPYDKGNFEGKERIRVFDTTSNGRCIKGLNKKDISIYKVKTDVLGNKHFIKKEGEEPKLKF

SEQ ID NO: 17802 - protein, 1382 aa, unidentified
  REGION 1..1382: note = Cas Enzyme sequence
LQKQFIEQQSKGKRRTIMKEVYNIGLDIGTSSVGYAMTDEKGRLLRFHKRPTYGSVLFEEAQTAKERRQKRSARRRLARRRKRIKLLQALVAPDVCAADPEFFLQMNESFLWAVDSKYEKFYAKLPKALFVDGTVSVETLPTIYHIRKELVKSTKQADIRYVYLAMHHIIKYRGHFLMEGQTLSDIGAEAPQKMHELLELLTDPESFVCGLAPAENAAKEVCHTMENHSLRGLARKEQIQKLLYAGKKKESKEAAEALASLLLGYKGSLKALIGYESQTDAPEKTSLGVIEGEKEETYLAGMTEAQAEVFTRILELYRWQLFAEIRQNGQTISDMMVARYEKHKADLKRLKKWIRTYRKDEYVTLFRDDNDPSGYAAYTHHLSRPKRFQKEKFTRCRQEGAKIKSIPEGFYNKCRRILESKKIDLPENARAEADEMLEEMKADNVFLPLQRINLNGQIPNQIQAEELAKILDAQGKYYPTLRENREKILSICTFRLPYYVGPLYQDKNSPFQKWIVRDMTQPAYPWNFFDVVNQTKTAEGFIANLRNKCTYLPIEDVLPLHSLLYEEYLMLNELNRVRVKGNLIRDVQLKQRMLDELFAKNKSVSYKTFAKWLQLNSPYVDVTENDISGTQEPNKFTASLRTRYDLEKHGFTVNDQTTEQLETLVRWSTIFEDRSILKKLIQEKYPDVTDTQLSFLVQRRYTGWGRLSEKLLTGVLGEYENQPATIMDVLRATNENFMQVLNNPQYHFQEKIAKERLMELGEPKEEIEYDEIRKLQVSPALKRGIWTAVRIVKELIEHQGCHPHAIYLENTREETPDEKKQRTQSRLNQVEQMYKELAEDKTAEKVPSECWNVLKNCKDKKKLDDQQYLYLLQLGKSLYSGKPLDFDQLSATTQIDHILPQCYIVDNSIENRALVLSGENQRKADNLLLADSIRNSQRPWWNYLRQKGFMGEKKFKNLTRSVVSDEDKQRFIARQLVETGQMVQCVTELFKRYYPDVHVSGIKAGLSSELREQYGLYKIRELNDMHHAYDAFLAATMGNFVERFMPWLDSESSAAIRFRKAQEARKDDDDNKVDLSSKHGMILAKFSRDQVDADTREIIRNAQQEICYLKAVWGYHDGHVVFLKRQKSGKITEASRYRAGHASAKLPLKKGMSCQRYGGFDSIKPAYIAAISYQKGKKRVGELVNVPIYLAEAIEQNPKVLVDYLEKDYPGVQIIRPKILMNQRIEYEGSELLLRSCSEMYNARELFIPIYLHHTLWKLYKAPKQLQPDDEEHLNTLISLLIEKMEKQYPIFNGVAKRMSVIDFDTLCFQEKCIFIVETMKVMAVNGQYAMYKTALSRKELSDNQGRITNKVLNLSHITLIDQSITGLREKRTKLWPDSEPS

SEQ ID NO: 17803 - protein, 1107 aa, unidentified
  REGION 1..1107: note = Cas Enzyme sequence
LGYKGSLKALIGYESQTDAPEKTSLGAIEGETEETYLAGMTEAQAEVFTRILELYRWQLFAEIRQNGQTISDTMVARYEKHGRDLEKLKAWVKAYQPDKFYALFRDDENAKGYAAYTDHLRKPKKFKKEKLQRCTQDEFYKVLKAMLTGNKDAEAAAAAQPMLEAIDEPNGFLPLQRINLNGQIPNQIQAEELVKILDAQGKYYPTLRENREKILSICTFRLPYYVGPLYQDKNSPFQKWIVRDKTQPAYPWNFFDVVNQTKTAEGFIANLTNKCTYLPIEDVLPLHSLLYEEYLMLNELNRVRVKGNLIRDVQLKKRMMDELFAKNKSVSYKVFAKWLRQNSPYTDVTENDISGTQEPNKFTASLRTRYDLEKHGFTVNDQTTEQLETLVRWSTIFEDRSILKKLIQEQYPEVTDNQLSFLVQRRYTGWGRLSEKLLTGLLGEYENQPATIMEVLRATNENFMQVLNNPQYHFQEKIAKERLIELGEPKAEIDYDEIRKLQVSPALKRGIWTAVRIVKELIEHQGCHPHAIYLENTREETPDEKKQRTQSRLNQVEQMYKELAEDKTAEKVPSECWEVLKNCRDKKKLDDQQYLYLLQLGKSLYSGKPLDFDQLSATTEIDHILPRCYIVDNSIENRALVLKGENQRKADNLLLADSIRDSQRPWWNYLRQKGFMGEKKFKNLTRSVVSEEDKQKFIARQLVETGQMVQCVTELFKRYYPDVHVSGIKAGLSSELREQYGLYKIRELNDMHHAYDAFLAATMGNFVERFMPWLDNESSAAIRFRKAQGAKKDDDKVDLSSKHGMILARFSRDQVDADTGEIIRNAQQDICYLKAVWGYHDGHVVFLKRQKSGKITEASRYRAGHASAKLPLKKGMSCQRYGGFDSIKPAYIAAISYQKGKQRAGALVNVPIYLAEAIEKNPKVLVDYLEKDYPGVQIIRSKILIRQKIEYEGNELTLGSCTETYNAKELFLPTFLHPILAKIYNASCALTDADENQLNTLTDVLLEKLSSQYPIYSGALKALEAKKSEILSLSIADKGKFIAETMKITSAGKEYAKYSTSLPKLGIADKGRLNNKLPHPEKIILIDQSITGLREKRTKLWPDSEPS

SEQ ID NO: 17804 - protein, 1361 aa, unidentified
  REGION 1..1361: note = Cas Enzyme sequence
MKEAYNIGLDIGTSSVGYAMTDEKGRLLRFHKRPTYGSVLFEEAQTAKERRQKRSARRRLARRHKRIKLLQALVAPDVCAADPAFFLRMNESFLWAEDSKYEKLYAKLPKALFVDGTVSVETLPTIYHIRNELVKSTKQADIRYVYLAMHHIIKYRGHFLMEGQTLSDIGAEAPQKMQELLELLTDPESFVCGLAPAENAAKEVCHTMENHSLRGLARREQIQKLLYAGKKKESKEAAQSLASLLLGYKGSLKALIDYESQTDAPEKTSLGAIEGETEETYLAGMTEAQAEVFALMLELYRWQLFAEIRQNGQTISDTMVARYEKHGRDLEKLKAWVKAYQPDKFYALFRDDENAKGYAAYTDHLRKPKKFKKEKLQRCTQDEFYKVLKAMLTGNKDAEAAAAAQPMLEAIDEPNGFLPLQRINLNGQIPNQIQAEELVKILDAQGKYYPTLRENREKILSICTFRLPYYVGPLYQDKNSPFQKWIVRDMTQPAYPWNFFDVVNQTATAEGFIANLTNKCTYLPIEDVLPLHSLLYEEYLMLNELNRVRVKGNLIRDVQLKQRMLDELFAKNKSVSYKTFAKWLQLNSPYVDVTENDISGTQELGKFTASLRTRYDLEKHGFTVNDQTTEQLETLVRWSTIFEDRSILKKLIQEKYPDVTDTQLSFLVQRRYTGWGRLSEKLLTGVLGEYENQPATIMEVLRATNENFMQVLNNPQYHFQEKIAKERLMELGEPKEEIEYDEIRKLQVSPALKRGIWTAVRIVKELIEHQGCHPHAIYLENTREETPDEKKQRTQSRLNQVEQMYKELAEDKAAEKVPSECWEVLKNCRDKKKLDDQQYLYLLQLGKSLYSGKPLDFDQLSATTQIDHILPQCYIVDNSIENRALVLSGENQRKADNLLLADSIRDSQRPWWNYLRQKGLMGEKKFKNLTRSMVSADDKQKFAARQLVETGQMVQCVTELFKRYYPDVHVRGIKAGLSSELREQYGLYKIRELNDMHHAYDAFLAATMGNFVERFMPWLDNESSAAIRFRKAQGAKKADDKVDLSSKHGMILARFSRDQVDADTREIIRNAQQEICYLKAVWGYHDGHVVFLKRQKSGKITEDSRYRAGNKSAKMPLKKGLPCQRYGGFDSINPAFMTAIQYTQGKKVYHRVVGIPIYANVPVEKADELIRAFAADKIPGVTVVRPRLLMNQMLEWDGGIFVLRGGQTIDILTSKKNAARVTITNGKQLFVSGKDMTTIALLFRGKKDDLNPEQLKETVLHLLEKFKTQYAVFYQKCKADDINRILKNLETPEQLTDADWTAMVSELLNAMGKQRKVSKEWITCEDWRIRGIPTKDVDLIDQSITGLREKRTKLWPDSEPS

SEQ ID NO: 17805 - protein, 1363 aa, unidentified
  REGION 1..1363: note = Cas Enzyme sequence
MKEVYNIGLDIGTSSVGYAMTDEKGRLLRFHKRPTYGSVLFEEAQTAKERRQKRSARRRLARRRKRIKLLQALVAPDVCAADPAFFLRMNESFLWAEDSKYEKFYAKLPKALFVDGTVSVETLPTIYHIRNELVKSTKQADIRYVYLAMHHIIKYRGHFLMEGQTLSDIGAEAPQKMQELLELLTDPESFVCGLAPAENAAKELCHAMENHSLRGMARKEQIQKLLYAGKKKESKEAALSLASLLLGYKGSLKALIGYESQTDAPEKTSLGAIEGETEETYLAGMTEAQAEVFALMLELYRWQLFAEIRQNGQTISDTMVARYEKHGRDLEKLKAWVKAYQPDKFYALFRDDENAKGYAAYTDHLRKPKKFKKEKLQRCTQDEFYKVLKAMLTGNKDAEAAAAAQPMLEAIDEPNGFLPLQRINLNGQIPNQIQAEELAKILDAQGKYYPTLRENREKILSICTFRLPYYVGPLYQDKNSPFQKWIVRDMTQPAYPWNFFDVVNQTETAEGFIANLTNKCTYLPIEDVLPLHSLLYEEYLMLNELNRVRVKGNLIRDVQLKKRMMDELFAKNKSVSYKVFAKWLRQNSPYTDVTENDISGTQESGKFTASLRTRYDLEKHGFTVNDQTMEQLETLVRWSTIFEDRSILKKLIQEQYPEVTDNQLRFLVQRRYTGWGRLSEKLLTGVLGEYENQPATIMDVLRATNENFMQVLNNPQYHFQEKIAKERLMELGEPKEEIEYDEIRKLQVSPALKRGIWTAVRIVKELIEHQGCHPHAIYLENTREETPDEKKQRTQSRLNQVEQMYKELAEDKTAEKVPSECWEVLKNCKDKKKLDDQQYLYLLQLGKSLYSGKPLDFDQLSATTEIDHILPRCYIVDNSIENRALVLKGENQRKADNLLLADSIRDSQRPWWNYLRQKGFMGEKKFKNLTRSMVSADDKQKFVARQLVETGQMVQCVTELFKRYYPDVHVSGIKAGLSSELREQYGLYKIRELNDMHHAYDALLAATMGNFVERFMPWLDSESSAAIRFRKAQEAKKDDDDNKVDLSSKHGMILAKFSRDQEDPDTGEIIHNAQQEICYLKAVWGYHDGHVVFLKRQKSGAIYDETRYRAGSVKAKFALKKALGTERYGGFNSINPAFMTAIQYTQGNKLYRRVVGIPIYANVPTGEADELIRAFAADKISGVTVVRPRLLMNQMLEWDGGIFVLRGGQTIDILTSKENATRVTITNGKQLFVSGKDMTTIALLFRGEENGLNPEQLKETVLHLLEKFKTQYAVFYQKCKADDINRILKNLETPEQLTTADWTAMVSELLNAMGKQRKASKEWITCEDWRIRGIPTKNVDLIDQSITGLREKRTKLWPDSEPS

SEQ ID NO: 17806 - protein, 1363 aa, unidentified
  REGION 1..1363: note = Cas Enzyme sequence
MKEVYNIGLDIGTSSVGYAMTDEKGRLLRFHKRPTYGSVLFEEAQTAKERRQKRSARRRLARRRKRIKLLQALVAPDVCAADPAFFLRMNESFLWAEDSKYEKFYAKLPKALFVDGTVSVETLPTIYHIRNELVKSTKQADIRYVYLAMHHIIKYRGHFLMEGQTLSDIGAEAPQKMQELLELLTDPESFVCGLAPAENAAKELCHAMENHSLRGMARKEQIQKLLYAGKKKESKEAAQSLASLLLGYKGSLKALIGYESQTDAPEKTSLGAIEGETEETYLAGMTEAQAEVFALMLELYRWQLFAEIRQNGQTISDTMVARYEKHGRDLEKLKAWVKAYQPDKFYALFRDDENAKGYAAYTDHLRKPKKFKKEKLQRCTQDEFYKVLKAMLTGNKDAEAAAAAQPMLEAIDEPNGFLPLQRINLNGQIPNQIQAEELAKILDAQGKYYPTLRENREKILSICTFRLPYYVGPLYQDKNSPFQKWIVRDMTQPAYPWNFFDVVNQTETAEGFIANLTNKCTYLPIEDVLPLHSLLYEEYLMLNELNRVRVKGNLIRDVQLKKRMMDELFAKNKSVSYKVFAKWLRQNSPYTDVTENDISGTQESGKFTASLRTRYDLEKHGFTVNDQTMEQLETLVRWSTIFEDRSILKKLIQEQYPEVTDNQLRFLVQRRYTGWGRLSEKLLTGVLGEYENQPATIMDVLRATNENFMQVLNNPQYHFQEKIAKERLMELGEPKEEIEYDEIRKLQVSPALKRGIWTAVRIVKELIEHQGCHPHAIYLENTREETPDEKKQRTQSRLNQVEQMYKELAEDKTAEKVPSECWEVLKNCKDKKKLDDQQYLYLLQLGKSLYSGKPLDFDQLSATTEIDHILPRCYIVDNSIENRALVLKGENQRKADNLLLADSIRDSQRPWWNYLRQKGFMGEKKFKNLTRSMVSADDKQKFVARQLVETGQMVQCVTELFKRYYPDVHVSGIKAGLSSELREQYGLYKIRELNDMHHAYDALLAATMGNFVERFMPWLDSESSAAIRFRKAQEAKKDDDDNKVDLSSKHGMILAKFSRDQEDPDTGEIIHNAQQEICYLKAVWGYHDGHVVFLKRQKSGAIYDETRYRAGSVKAKFALKKALGTERYGGFNSINPAFMTAIQYTQGNKLYRRVVGIPIYANVPTGEADELIRAFAADKISGVTVVRPRLLMNQMLEWDGGIFVLRGGQTIDILTSKENATRVTITNGKQLFVSGKDMTTIALLFRGEENGLNPEQLKETVLHLLEKFKTQYAVFYQKCKADDINRILKNLETPEQLTTADWTAMVSELLNAMGKQRKASKEWITCEDWRIRGIPTKNVDLIDQSITGLREKRTKLWPDSEPS

SEQ ID NO: 17807 - protein, 1373 aa, unidentified
  REGION 1..1373: note = Cas Enzyme sequence
MKEVYNIGLDIGTSSVGYAMTDEKGRLLRFHKRPTYGSVLFEEAQTAKERRQKRSARRRLARRRKRIKLLQALVAPDVCAADPEFFLRMNESFLWSEDSKYEKLYAKLPKALFVDGTVSVETLPTIYHIRNELVKSTKQADIRYVYLAMHHIIKYRGHFLMEGQTLSDIGAEAPQKMQDLLELLTDPENFPCGFVPAENAAKEICHTMENHSLRGMARKEQIQKLLYAGKKKGSKETAQALASLLLGYKGSLKALIGYESQTDAPEKTSLGAIEGETEETYLAGMTEAQAEVFTRILELYRWQLFAEIRQNGQTISDMMVARYEKHKSDLKRLKKWIRTYRKDEYVTLFRDDNDPSGYAAYTHHLSRPKRFQKEKFTRCRQEGAKIKSIPEGFYNKCRRILESKKIDLPENARAEADEMLEEMKADNVFLPLQRINLNGQIPNQIQAEELAKILDAQGKYYPTLRENREKILSICTFRLPYYVGPLYQDKNSPFQKWIVRDMTQPAYPWNFFDVVNQTKTAEGFIANLRNKCTYLPIEDVLPLHSLLYEEYLMLNELNRVRVKGNLIRDVQLKQRMLDELFAKNKSVSYKVFAKWLRQNSPYTDVTENDISGTQEPGKFTASLRTRYDLEKHGFTVNDQTMERLETLVRWSTIFEDRSILKKLIQEQYPEVTDNQLSFLVQRRYTGWGRLSEKLLTGLLGEYENQPATIMEVLRATNENFMQVLNNPQYHFQEKIAKERLIELGEPKAEIDYDEIRKLQVSPALKRGIWTAVRIVKELIEHQGCHPHAIYLENTREETPDEKKQRTQSRLNQVEQMYKELAEDKTAEKVPSECWEVLKNCKDKKKLDDQQYLYLLQLGKSLYSGKPLDFDQLSATTEIDHILPRCYIVDNSIENRALVLKGENQRKADNLLLADSIQDSQRPWWNYLRQKGFMGEKKFKNLTRSMVSADDKQKFAARQLVETGQMVQCVTELFKRYYPDVHVSGIKAGLSSELREQYGLYKIRELNDMHHAYDAFLAATMGNFVERFMPWLDNESSAAIRFRKAQEAKKGGDEVDLSSKHGMILAKFSRDQVDADTREIIRNAQQDICYLKAVWGYHDGHVVFLKRQKSGAIYDETRYRAGSVKAKFALKKALGTERYGGFNSINPAFMTAIQYTQGNKIYRRVVGIPIYANVPTGKADELIRAFAADKISGAAVVRPRLLMNQMLEWDGGVFVLRGGQTIDILMGKENAARVTITNGKQLFVSGKDMTTIALLFRGKKDDLNPEQLKETVLHLLEKFKTQYAVFYQKCKADDINRILKNLETPEQLTDADWTAMVSELLNAMGKQRKVSKEWITCEDWRIRGIPTKDVDLIDQSITGLREKRTKLWPDSEPS

SEQ ID NO: 17808 - protein, 1374 aa, unidentified
  REGION 1..1374: note = Cas Enzyme sequence
MKEVYNIGLDIGTSSVGYAMTDEKGRLLRFHKRPTYGSVLFEEAQTAKERRQKRSARRRLARRRKRIKLLQALVAPDVCAADPAFFLQMNESFLWAVDSKYEKFYAKLPKALFVDGTVSVETLPTIYHIRKELVKSTKQADIRYVYLAMHHIIKYRGHFLMEGQTLSDIGAEAPQKMQELLELLTDPESFVCGLAPAENAAKEICHAMENHSLRGMARKEQIQKLLYAGKKKESKEAAQALASLLLGYKGSLKALIGYESQTDAPEKTSLGAIEGETEETYLAGMTEAQAEVFTRILELYRWQLFAEIRQNGQTISDMMVARYEKHKSDLKRLKKWIRTYRKDEYVTLFRDDNDPSGYAAYTHHLSRPKRFQKEKFTRCRQEGAKIKSIPEGFYNKCRRILESKKIDLPENARAEANEMLEEMKADNVFLPLQRINLNGQIPNQIQAEELVKILDAQGKYYPTLRENREKILSICTFRLPYYVGPLYQDKNSPFQKWIVRDKTQPAYPWNFFDVVNQTKTAEGFIVNLTNKCTYLPIEDVLPLHSLLYEEYLMLNELNRVRVKGNLIRDVQLKQRMLDELFAKNKSVSYKTFAKWLQLNSPYVDVTENDISGTQEPNKFTASLRTRYDLEKHGFTVNDQTTEQLETLVRWSTIFEDRSILKKLIQEKYPDVTDTQLSFLVQRRYTGWGRLSEKLLTGVLGEYENQPATIMEVLRATNENFMQVLNNPQYHFQEKIAKERLMELGEPKEKIEYDEIRKLQVSPALKRGIWTAVRIVKELIEHQGCHPHAIYLENTREETPDEKKQRTQSRLNQVEQMYKELAEDKTAEKVPSECWEVLKNCRDKKKLDDQQYLYLLQLGKSLYSGKPLDFDQLSATTQIDHILPQCYIVDNSIENRALVLSGENQRKADNLLLADSIRDSQRPWWNYLRQKGFMGEKKFKNLTRSVVSDEDKQRFIARQLVETGQMVQCVTELFKRYYPDVHVRGIKAGLSSELREQYGLYKIRELNDMHHAYDAFLAATMGNFVERFVPWLDSESSAAIRVRKAQKANKGDDNKVDLSSKHGMILAKFSRDQVDPDTGEIIRNAQQEICYLKAVWGYHDGHVVFLKRQKSGKITEDSRYRAGNKSAKMPLKKGLPCQRYGGFDSINPAFMTAIQYTQGKKVYHRVVGIPIYANVPVEKADELIRAFAADKIPGVTVVRLRLLMNQMLEWDGGVFVLRGGQTIDILTGKENAARVTISNGKQLFVSGKDMTTIALLFRGEENGLNPEQLKETVLHLLEKFKTQYAVFYQKCKADDINRILKNLETPEQLTTADWTAMVSELLNAMGKQRKASKEWITCEDWRIRGIPTKDVDLIDQSITGLREKRTKLWPDSEPS

SEQ ID NO: 17809 - protein, 1361 aa, unidentified
  REGION 1..1361: note = Cas Enzyme sequence
MKEVYNIGLDIGTSSVGYAMTDEKGRLLRFHKRPTYGSVLFEEAQTAKERRQKRSARRRLARRRKRIKLLQALVAPDVCAADPEFFLRMNESFLWAEDSKYEKFYAKLPKALFVDGTVSVETLPTIYHIRNELVKSTKQADIRYVYLAMHHIIKYRGHFLMEGQTLSDIGAEAPQKMQELLELLTDPESFVCGLAPAENAAKEICHTMENHSLRGMARKEQIQKLLYAGKKKESKEAAQALALLLLGYKGSLKTLIGYESQTDAPEKTSLGAIEGETEETYLAGMTEAQAEVFALILELYRWQLFAEIRQNGQTISDTMVARYEKHGRDLEKLKAWVKAYQPDKFYALFRDDENAKGYAAYTDHLRKPKKFKKEKLQRCTQDEFYKVLKAMLTGNKDAEAAAAAQPMLEAIDEPNGFLPLQRINLNSQIPNQIQAEELAKILDAQGKYYPTLRENREKILSICTFRLPYYVGPLYQDKNSPFQKWIVRDKTQPAYPWNFFDVVNQTKTAEGFIANLTNKCTYLPIEDVLPLHSLLYEEYLMLNELNRVRVKGNLIRDVQLKKQMMDDLFAKNKSVPYKVFAKWLRQNSPYTDVTENDISGTQEPNKFTASLRTRYDLEKHGFTVNGQTTEQLETLVRWSTIFEDRSILKKLIQEKYPDVTDTQLSFLVQRRYTGWGRLSEKLLTGVLGEYENQPATIMEVLRATNENFMQVLNNPQYHFQEKIAKERLMELGEPKEEIEYDEIRKLQVSPALKRGIWTAVRIVKELIEHQGCHPHAIYLENTREETPDERKQRTQSRLNQVEQMYKELAEDKTAEKVPSECWEVLKNCRDKKKLDDQQYLYLLQLGKSLYSGKPLDFDQLSTTTEIDHILPRCYIVDNSIENRALVLKGENQRKGDSLLLEDSIRDSQRPWWNYLRQKGLMGEKKFKNLTRSVVSEEDKQKFIARQLVETGQMVQCVTELFKRYYPDVHVSGIKAGLSSELREQYGLYKIRELNDMHHAYDAFLAATMGNFVERFMPWLDNESSAAIRFRKAQEAKKGGDEVDLSSKHGMILAKFSRDQVDADTREIIRNAQQEICYLKAVWGYHDGHVVFLKRQKSGKITEDSRYRAGNKSAKMPLKKGLPCQRYGGFDSINPAFMTAIQYTQGKKVYHRVVGIPIYANVPVEKADELIRAFAADKIPGVTVVRPRLLMNQMLEWDGGVFVLRGGQTIDILMGKENAARVTITNGKQLFVSGKDMTTIALLFRGKKDALNQEQLKETVLHLLEKFKTQYAVFYQKCKADDINRILKNLETPEQLTTADWTAMVSELLNAMGKQRKASKEWITCEDWRIRGIPTKDVDLIDQSITGLREKRTKLWPDSEPS

SEQ ID NO: 17810 - protein, 1376 aa, unidentified
  REGION 1..1376: note = Cas Enzyme sequence
MKEVYNIGLDIGTSSVGYAMTDEKGRLLRFHKRPTYGSVLFEEAQTAKERRQKRSARRRLARRRKRIKLLQALVAPDVCAADPEFFLRMNESFLWAEDSKYEKLYAKLPKALFVDGTVSVETLPTIYHIRNELVKSTKQADIRYVYLAMHHIIKYRGHFLMEGQTLSDIGAEAPQKMHELLELLTDPESFACGLAPAENVAKEICHAMENHALRGMARKEQIQKLLYAGKKKESKEAAQSLASLLLGYKGSLKALIGYESQTDAPEKTSLGAIEGETEETYLAGMTEAQAEVFTRILELYRWQLFAEIRQNGQTISDMMVARYEKHKADLKRLKKWIRTYRKDEYVTLFRDDNDPSGYAAYTHHLTSPARFQQEKFTRCRQEGTKIKSIPEGFYNKCRRILESKKIDLPENARAEANEMLEEMKADNVFLPLQRINLNGQIPNQIQAEELAKILDAQGKYYPTLRENREKILSICTFRLPYYVGPLYQDKNSPFQKWIVRDKTQPAYPWNFFDVVNQTETAEGFIANLTNKCTYLPIKDVLPLHSLLYEEYLMLNELNRVRVKGNLIRDVQLKQRMLDELFAKNKSVSYKTFAKWLQLNSPYVDVTENDISGTQEPGKFTASLRTRYDLEKHGFTVNDQTTEHLETLVRWSTIFEDRSILKKLIQEHYPEITDNQLSFLVQRRYTGWGRLSEKLLTGVLGEYENQPATIMEVLRATNENFMQVLNNPQYHFQEEIAKERLMELGEPKEEIEYDEIRKLQVSPALKRGIWTAVRIVKELIEHQGCHPHAIYLENTREETPDEKKQRTQSRLNQVEQMYKELAEDKTAEKVPSECWEVLKNCKDKKKLDDQQYLYLLQLGKSLYSGKPLDFDQLSATTEIDHILPRCYIVDNSIENRALVLKGENQRKADNLLLADSIRDLQRPWWNYLHQKGFMGEKKFKNLTRSMVSADDKQKFVARQLVETGQMVQCVTELFKRYYPDVHVSGIKAGLSSELREQYGLYKIRELNDMHHAYDAFLAATMGNFVERFMPWLDSESSAAIRFRKAQEAKKDDNNKVDLSSKHGMILAKFSRDQEDPDTDTGEIIRNAQQDICYLKAVWGYHDGHVVFLKRQKSGKITEDSRYRAGNKSAKMPLKKGLPCQRYGGFDSINPAFMTAIQYTQGKKVYHRVVGIPIYANVPVEKADELIRAFAADKIPGVTVVRPRLLMNQMLEWDGGIFVLRGGQTIDILTSKKNAARVTITNGKQLFVSGKDMTTIALLFRGKKDDLNPEQLKETVLHLLEKFKTQYAVFYQKCKADDINRILKNLETPEQLTDADWTAMVSELLNAMGKQRKASKEWITCEDWRIRAIPTKDVELIDQSITGLREKRTKLWPDSEPS

SEQ ID NO: 17811 - protein, 1045 aa, unidentified
  REGION 1..1045: note = Cas Enzyme sequence
MMTAEAELEPYVLGLDLGVESVGWAVIDLDQDGTPCGIRRAGVRCFDSGVEGQIESGRDHPRNTKRRKARLQRRQLWRRARRHGKLFGVLQRAGLLPPGPGRSSEDRHKLLFDLDRSLAGRYPADEDRAAAQLLPYRIRAKALDEPLEPFALGRALYHLGQRRGFLSNRKAVKDADEEGQVKAAIGELRRKMQQAAARTLGEYFAGLDAEEERVRGRWTSRQMYEEEFEAIWSAQAPHHAALTPELKREVHDAIFRQRKLKSQKGLIGFCELEPECRRAPWACLDAQRFRFLQRVNDLEVIAPDGEIRPLTAQERDKLINALDTGGDLTFAAIRKLLGLNKPRGYSFNLEEGGEKKLVGNRTAAKFVAAIGKGRWADLSEADRDRLVEDLLSFEKTDPLVQRLIRAWGFSEAEAVQIAEIQLEPDYCRLSRRALRRVVPLLERGEHYATTRKKLYGDRLAEAETVDLLPPVADASAELRNPVVKRALTELRKVVNALLRRYGKPALVRVELARDMKRSRAARKDASQRNRQNERAREEAKKKILVELGNEHPSRADVEKLLLAKECGWHCPYTHEEISMATLLGPSPQFDVEHIIPFSRSLDNSFRNKTLCYHEENRTRKRNRTPVEAYAGSAQWDEILGRVRKFKGSMAAAKLRQFQLKEIPEDFASRQLNDTRYISRLAGEYLGLLYGGRTDADGKLRVQVSSGPVTAYLRNRWGLNAILGEGPRKERTDHRHHAVDAIAIALTSPSTVKLLSDAAQRADAWGGRLFVPIDPPWDGFLDQARHAVDAICVSWRVDRRVAGALHKETLYGKSHPAPDARGRPVECRHLRKPLVDMSIGEIDSIVDDQVRWMVQGKLQQLGGTPKQAFADPANLPYFRTKDGRIIPIRKARIRQNVTTVELAGRGAPRFVAPGDNHHMEIVAATDAKGHTKWEGHLVTLMEAARRARSGEPVVRRDHGRGKKFLFSLANNDYVVMEHHPGEVQLYRVVVITESQVEFRLHTDARPTTVVKKIPGARVRRSPGKLLEAKARKVAVDPLGNILPAND

SEQ ID NO: 17812 - protein, 1168 aa, unidentified
  REGION 1..1168: note = Cas Enzyme sequence
SDEKFAAACEIVRSKKTGSDKQKKLAEIFGINRSDKRALSVLRLICGNTCKADDLYGKELDDNVKIDLSAIDDVKFSQIQEMYDDGCLLDGIKAIYDWSVLSDILGGEKSISAARVHSYDTHKYDLSLLKKYVREQCADKYKNVFRYDVNAKNYAAYIGMDKHKSYKKATRDAFYKFMEKQIFVDGKDGFIRWLDDNGANDARVRYERGEFLPKQKLFSNGVIPHQLHLNELSAILNNAKCKYAFLSETDSRGKSVAERVEELLKFRIPYYVGPLGGGKFAWAVRHEGMQNVKITPWNFDEVIDKDASEEKFIKNMTCKCTYIPTEDVLPTGSLLYGEAVFLSELNNLKVNGQKDDKLIDWVYELAHTEKKITKSKIWNALKIHGCDMTNITKESITGIDGDMKSSLSSYILFNKTLEGNIENEREMCEEIILWSTLVSDKDRLKKRITAKYGKKLTEKQIKEICGFTFTKWGRLSRTLLDGITSEKALGAAGECLTVIQSMRLNKTNLSETLTAARWGFDKAILEYNERNASGDKQKIDDMYCSPSVKRALRRTLAVVKEIVKIMGCAPKKIMIETARGGTKEQKGKRTVSRKEKLLGLYKSVKSDTREFAKAIAEIDGREERDFSSKRLYAYYMQNCRCMYSGERIEINELFDKNKYDFDHIYPQSKVNDDSFDNNLALVKKEYNARKTDKYPLPADIQIKMRGFWDDLHKHGFISDEKYKRLTRTSELTPSDIADFESRQLVITQQSTKLVAQILKANFGESEIVYSKASKAAEFKNRFGEFAEKAGCAEKYRAELVKVRELNNLHHAKDAYINIVVGNVLNTEYGHDISAYYKNKSEKEMKSDYALFRRGVKGAWDPVRDIPLVFDTYYTDNCRVVRFVNEDSGQLFDATIKTAGTNDKLIPLKAKGKISDTKKYGGYNKVKIAYFALVKSKDEKGKAILSLEPIPVMATKLSDGVQRHIIEKSGLADPKIVIPKIRLSSLLIVNGSPVYIKSKTNKSIVIDNAAELYIDKEMTAYLKKVGSFNNKYNEAKKYKKTIKLDEKYDGITRDKNVKLYDIFTEKLGMKIYAGLSMVGQKKTLENLRNQFQEKSTEIQCVILCKILSFMKAGGQSLDLSDFNKANGSAYGSQLGVNTIPSKLKDHIKLVVQSPTGQYRQVIDFDKFLP

SEQ ID NO: 17813 - protein, 1125 aa, unidentified
  REGION 1..1125: note = Cas Enzyme sequence
FVNKEFAMKQHYYGLDIGIGSVGWAVLEVGADNARILDFGVRLFDSGENTGSSETKNQQRRGFRSTRRVIRRKKHRRMRLKNFLCHIGLSTLDAIDKWYQKNELNIYKVRSKGLDKKLSPEELAVSLIHISNHRGYKEFYGDQSEDAKEAELIKSAITKTKTIFAQSGYRTIGEMIAKDKTFCNPNSKDCALPLCRNHHGKYDYMFLRKDLENETKMILEKQKEYYAALTDENIKNIMDIIFRQRYFEYGPGNKEDSTRRYKGFLHTIGHCAIYNNELRGARHTVIGDLFAVVNALSQYHYYETETGEEADFGIVVKLVLEYVLNECNINKTTLIKLLKENGIEVIISSATGTQDINKCIKFLKPIRAAIEQAGLDWSSFISEPQLDLHAPSRLHRLGQCISSYITPSLRREKLEALGFVNTGFINNCMREKFSGTANVSDKYMVEAILAAQKGVRVGDYQAQVNKQEKQERKELKRLPPINDKDVISNPVVFRAINETRKIVNALISKYGQQPAIINIEVARELGRSEKARKEIARAQINNQKIRDEAANKIKELFGIANPKPAQLERYLLYEMQEGKCLYSNTPVEIGRLLTDDYEVDHIIPYSLILDDSLHNKALVLTKENREKGQKAPLEYLHGERRTDFKKRVINAYKHNKISKKKYDYLMLESLNNEEVLKDWKSRNINDTRYITKYVAGYLQQNLLFDSPNKKNVHCINGAVTSRFRQIWLRDSKWGKPEKEREETELHHAIDAIVVANLTPRYIELASDYLKLRAMKRAYKGLALLPAEYYAYLDKCCKKMKKYYYMNEDETQNLLEGGRIPTIVPRLFDEVSLRFDSDDEETLRERAKTFYRDETFANGLRLPLVSRKQERKYRGAVVSSENPVSLKTINGKTYQYVAKKLEKITVKDIDKIVGISKAARAQLRAAFEGQKEQYSLGDYLKSHDIPALRRKDGTLPKRFTLAIGEDIPVYKKAIESGIKKENTQLWEVKSYYCLEIYKDTKGNTRWRGIRYTDIKRKDKKLYLCCAYPEDYQSHVMYLFKNDYIVVYNRKGEETKRGFYQAIKALSQGQIRIIRDNNAKAEVISLAQSCTVKKYDISILGVIGGEIKCGEPYSLLTDPGSAQGTSA

SEQ ID NO: 17814 - protein, 1054 aa, unidentified
  REGION 1..1054: note = Cas Enzyme sequence
MSRKYGIGLDIGIGSVGFAVISRTNKEDARIEDLGVRLFDSGETNDHKARKSQERRAHRSVRRLIRRRAHRKERVKNFLQKINLISNDKLKAWQEQNGNQNIFAVRLKGLDAKLTPEEIADCIIHICNHRGYREFYEEESTDKEAGVIKQALAEFEQRFQDGNYRSVADMILHDEVFKTETAFPDYHNHKESERHILIKRAYLEKELLEILKHQQNYYPQLTEHNIDFLCNKIVFAQRDFETGPGEPGKMLNRKTGQKEEQLRKFLGFLDSIGKCMFYKDEKRAFRSTVLSDVYALINCLSQFTYVDVETGEIVLPKEAASVILKEVLIKASATEKELKALLKRFGIEMIKPGKLEVKAPDTIKTLKILKATLEASGYNYEELIAEEQFDLENPSKLQRLCVILSENITPKRRERALEREGWNKKLREEMKRKKFGGTASVCERYMVEAINAFLNGETYGNFQARRLQEREEATEIKTKYKTLPALTKNTDEEIIENVVVFKAINETRKVLNAIIRKYGSPEYINVEVADELGRSFKERDKISKMNRDNEKERKQIVDKIVQLGLRNEGEVKNKDILRFRLWKAQNGVDLYTGRPIEENEVLSEIYEVDHIVPFSLILDDTINNKALVSRTANQEKRQRVPREYLADDEEFMKRVNTLFNKGKISAKKYKYLTLESLYTPQARLLLEEWKSRNINDTRYITRYIVNYLAGNLLFDSDKAKNVYAIKGAITSKMRKLWLNSKSWGNAEKDRENNLHHAADAVVIANLTPAYVEIASDTLKLQSIYKAHHKQESFEYTTYLNGAVRKMEKYYGFNEAYSRRLLEAKGRIPSLVRNLYAEVDKRLVDNSLEFFQDVTCEQFVANVKDYYRDDQIFAESLSMPLVSYKQNKKFQGQITDDNPVKQSQRKDTSIAKLDTLGNENVLSANKYYCIEIYRDKQNKTALRGIRYVDLVKKNKKLYLATPLPENYKEHVMYLFANDYVRIFDGNNKLKFEGYYRSTKNVNRNLLYIRNNNVNSDVIVSVTKNDKVIKLNVDILGKLGGEVKCSVPFMLLSEKD

SEQ ID NO: 17815 - protein, 1012 aa, unidentified
  REGION 1..1012: note = Cas Enzyme sequence
ETNDHKARKSQERRAHRSVRRLIRRRAHRKERVKNFLQKINLISNDKLKAWQEQNGNQNIFAVRLKGLDAKLTPEEIADCIIHICNHRGYREFYEEESTDKEAGVIKQALAEFEQRFQDGNYRSVADMILHDEVFKTETAFPDYHNHKESERHILIKRAYLEKELLEILKHQQNYYPQLTEHNIDFLCNKIVFAQRDFETGPGEPGKMLNRKTGQKEEQLRKFLGFLDSIGKCMFYKDEKRAFRSTVLSDVYALINCLSQFTYVDVETGEIVLPKEAASVILKEVLIKASATEKELKALLKRFGIEMIKPGKLEVKAPDTIKTLKILKATLEASGYNYEELIAEEQFDLENPSKLQRLCVILSENITPKRRERALEREGWNKKLREEMKRKKFGGTASVCERYMVEAINAFLNGETYGNFQARRLQEREEATEIKTKYKTLPALTKNTDEEIIENVVVFKAINETRKVLNAIIRKYGSPEYINVEVADELGRSFKERDKISKMNRDNEKERKQIVDKIVQLGLRNEGEVKNKDILRFRLWKAQNGVDLYTGRPIEENEVLGEIYEVDHIVPFSLILDDTINNKALVNRTANQEKRQRVPREYLADDEEFMKRVNTLFNKGKISAKKYKYLTLESLYTPQARLLLEEWKSRNINDTRYITRYIVNYLAGNLLFDSDKAKNVYAIKGAITSKMRKLWLNSKSWGNAEKDRENNLHHAADAVVIANLTPAYVEIASDTLKLQSIYKAHHKQESFEYTTYLNGAVRKMEKYYGFNEAYSRRLLEAKGRIPSLVRNLYAEVDKRLVDNSLEFFQDVTCEQFVANVKDYYRDDQIFAESLSMPLVSYKQNKKFQGQITDDNPVKQSQRKDTSIAKLDTLGNENVLSANKYYCIEIYRDKQNKTALRGIRYVDLVKKNKKLYLATPLPENYKEHVMYLFANDYVRIFDGNNKLKFEGYYRSTKNVNRNLLYIRNNNVNSDVIVSVTKNDKVIKLNVDILGKLGGEVKCSVPFMLLSEKD

SEQ ID NO: 17816 - protein, 1054 aa, unidentified
  REGION 1..1054: note = Cas Enzyme sequence
MSRKYGIGLDIGIGSVGFAVISRTNKEDARIEDLGVRLFDSGETNDHKARKSQERRAHRSVRRLIRRRAHRKERVKNFLQKINLISNDKLKAWQEQNGNQNIFAVRLKGLDAKLTPEEIADCIIHICNHRGYREFYEEESTDKEAGVIKQALAEFEQRFQDGNYRSVADMILHDEVFKTETAFPDYHNHKESERHILIKRAYLEKELLEILKHQQNYYPQLTEHNIDFLCNKIVFAQRDFETGPGEPGKMLNRKTGQKEEQLRKFLGFLDSIGKCMFYKDEKRAFRSTVLSDVYALINCLSQFTYVDVETGEIVLPKEAASVILKEVLIKASATEKELKALLKRFGIEMIKPGKLEVKAPDTIKTLKILKATLEASGYNYEELIAEEQFDLENPSKLQRLCVILSENITPKRRERALEREGWNKKLREEMKRKKFGGTASVCERYMVEAINAFLNGETYGNFQARRLQEREEATEIKTKYKTLPALTKNTDEEIIENVVVFKAINETRKVLNAIIRKYGSPEYINVEVADELGRSFKERDKISKMNRDNEKERKQIVDKIVQLGLRNEGEVKNKDILRFRLWKAQNGVDLYTGRPIEENEVLGEIYEVDHIVPFSLILDDTINNKALVNRTANQEKRQRVPREYLADDEEFMKRVNTLFNKGKISAKKYKYLTLESLYTPQARLLLEEWKSRNINDTRYITRYIVNYLAGNLLFDSDKAKNVYAIKGAITSKMRKLWLNSKSWGNAEKDRENNLHHAADAVVIANLTPAYVEIASDTLKLQSIYKAHHKQESFEYTTYLNGAVRKMEKYYGFNEAYSRRLLEAKGRIPSLVRNLYAEVDKRLVDNSLEFFQDVTCEQFVANVKDYYRDDQIFAESLSMPLVSYKQNKKFQGQITDDNPVKQSQRKDTSIAKLDTLGNENVLSANKYYCIEIYRDKQNKTALRGIRYVDLVKKNKKLYLATPLPENYKEHVMYLFANDYVRIFDGNNKLKFEGYYRSTKNVNRNLLYIRNNNVNSDVIVSVTKNDKVIKLNVDILGKLGGEVKCSVPFMLLSEKD

SEQ ID NO: 17817 - protein, 1054 aa, unidentified
  REGION 1..1054: note = Cas Enzyme sequence
MSRKYGIGLDIGIGSVGFAIISRTNKEDARIEDLGVRLFDSGETNDHKARKSQERRAHRSVRRLIRRRAHRKERVKNFLQKINLISNDKLKAWQEQNGNQNIFAVRLKGLDAKLTPEEIADCIIHICNHRGYREFYEEESTDKEAGVIKQALAEFEQRFQDGNYRSVADMILHDEVFKTETAFPDYHNHKESERHILIKRAYLEKELLEILKHQQNYYPQLTEHNIDFLCNKIVFAQRDFETGPGEPGKMLNRKTGQKEEQLRKFLGFLDSIGKCMFYKDEKRAFRSTVLSDVYALINCLSQFTYVDVETGEIVLPKEAASVILKEVLIKASATEKELKALLKRFGIEMIKPGKLEVKAPDTIKTLKILKATLEASGYNYEELIAEEQFDLENPSKLQRLCVILSENITPKRRERALEREGWNKKLREEMKRKKFGGTASVCERYMVEAINAFLNGETYGNFQARRLQEREEATEIKTKYKTLPALTKNTDEEIIENVVVFKAINETRKVLNAIIRKYGSPEYINVEVADELGRSFKERDKISKMNRDNEKERKQIVDKIVQLGLRNEGEVKNKDILRFRLWKAQNGVDLYTGRPIEENEVLGEIYEVDHIVPFSLILDDTINNKALVNRTANQEKRQRVPREYLADDEEFMKRVNTLFNKGKISAKKYKYLTLESLYTPQARLLLEEWKSRNINDTRYITRYIVNYLAGNLLFDSDKAKNVYAIKGAITSKMRKLWLNSKSWGNAEKDRENNLHHAADAVVIANLTPAYVEIASDTLKLQSIYKAHHKQESFEYTTYLNGAVRKMEKYYGFNEAYSRRLLEAKGRIPSLVRNLYAEVDKRLVDNSLEFFQDVTCEQFVANVKDYYRDDQIFAESLSMPLVSYKQNKKFQGQITDDNPVKQSQRKDTSIAKLDTLGNENVLSANKYYCIEIYRDKQNKTALRGIRYVDLVKKNKKLYLATPLPENYKEHVMYLFANDYVRIFDGNNKLKFEGYYRSTKNVNRNLLYIRNNNVNSDVIVSVTKNDKVIKLNVDILGKLGGEVKCSVPFMLLSEKD

SEQ ID NO: 17818 - protein, 1122 aa, unidentified
  REGION 1..1122: note = Cas Enzyme sequence
MNRGYRIGLDIGIGSVGWAVISGKDNTARIEDAGVRIYDSGELIKEQSRKSQKRRLFRSARRLVRRRYFRKERLKAHLENIGFLSAQQITEYCSSSNENVFELKMKGISDKISKEQLALCLIHTCNHRGYKDFYESDEDNEDKETAINRKAAHEFDVIFKNSGCKTVSECICKHFTNEKTGQPEFRNRDSKETYLLIHRQHIKDEICQILKYQSKFYPELNNNAIDLIDKIIFSQRDFEDGPGDASLAFRRYTGFLKSIGKCPFYKLEDRGFRATLISDIYSVVNTLSQYRYIAKETGEYTLPPDIARQIVYTTIERGSITMTEVKSFLSDAGIELRKGENSDDKALSKAIKFISIAKKCIERADLKWNDFIGEEQFDIEKPSKLHQIGVLLSKYQTPSRRHSELHKLSFMTDKLEKELSGKKISGTAAVSDKYMCDAIEVFMNGEIYGNFQAEAIKRSVEQGVSADYKKTRIIEPSVFDDDIKDNPVVFRAINETRKIINSIINTYGSPEYINIEVASDLNRSFVERREIFNKQKKNEAENDAIRSKIAEILDISVEEVNGSSIEKYKLFYEQNGRCMYSDEILGDIADVLRDKTKRYEVDHIIPYSLILDNTLNNKALVFGSQNQIKGQRTPLMYLTGDKRKKYIEKVNYMYSRKEKPISLKKYNYFMLKDIYSAEAEDILKDWKSRNINDTRYITKYITSLLKNHLEFTGESKMMVYGIKGGLTSKFRKIWLNDKTWGNEDKNRNTYLNHAVDAVIIANLTPAYVEIASDNIKLQQIRRKFRRTDIPEYTDYLSQCIKKMRKYYGFSEEYTCTLLTKTERVPSYVPNIGYEVDIRFNDNDEDLFRTKIQEYYGNCDDFIIKPHMILTSHKPERRFRGTIADSNPVKLREIDGVIQKIFRKNVSELSAKEIDRLYTKDTDLITSLKHILDGKSADYTVGEYMSEKGIKCFLTEKGQPVYKVSLFEGKPYSNYYKKTIDKDNYTMLGMLKYYCIEIYKDTNGKTRTRGIRYVDIVKKDKKLYLKAECVPENYSEHVMYMFKNAYIEVYKKNGQLKFKGVFCSVKTIDRSMFYGKRNNESEAIDNLSIASTDIVRKYEIDILGRKGGEIKCSEPLSLIREKK

SEQ ID NO: 17819 - protein, 1124 aa, unidentified
  REGION 1..1124: note = Cas Enzyme sequence
MNYRIGLDIGIGSIGWAVIREGERPFIEDFGTRIFESGENQRKESLCQERRGYRGTRRLERRRAHRKELLKNHFINIQLTNTSFYDDLAACKNEDVYTLKVKALSEKLSPAQLYKCLVHTCNHRGYRDFYETNEEDDKEEGQNIKAANEFEANYLASGARTVSEYLISNHTENDFVKFRNRKNSDSKHMLIRRRLMEEETDQILRHQATYYPVLNTKNIDATKAIIFNQRDFEDGPGDPNDPNRRYQGFLESLGQCPFHKEDKRGFRCTVISDVFAVTNTLSQYRFICKETGEAELSPIVARELVEHLMQNAELTMKQVKNILKKNGYELKKSEKSDDKALGKSIKFLKIAKKCIDNTGMDWNAIISEEQFDFQNPSLLHRIGELISKYQTPTRRKNEMKNAGISRELIEEFANKKFSGTASAGYRYMCESIEAFMSGDIYGNFQSDFIKNAAENNPVERMPKLLPMHISDPEIRENRVVFKAVNETRKVVNAIIDRYGAPNKIIVEIASDLGKSASDRNRIEAENRKREKEKDAMAKKIAEILSIDIEEVKKKGHLFERYSLWKEQNGISVYSGEQLGELRNVLENKNGEYEIDHIIPYSWILDNTLHNKVLVFSSENQRKRQQIPLQYMRGTEREAFLARVNEMFSRKENPIGRKKYEYLTQEYDNTLYGEDGKLSQWKSRNINDTRYITKYIVGLLKNNLVFATDSKDPVIAVKGAVTQKFRREWFYGTDFGKQDKDRKSYLNHALDAVVAANLTRAYIEIGSDALRLQTLWKKHKNIRSAEYDEYLESCIRKMEKHYGFSEQRTRMLLEMRGRVPSYVPFLCEEVQVRFFEGTENASPEENQTAFDKGVANYYKDLSVFTVKPHMPITSHKPNRKFQGQLADANPIKVIEINGETHKIKRTAVKKLKKSDVAKLYTGDISLIRTLNSIFDGKDDSYTIEKHMQENKLTVFMTDAGQPVHAVSLDTGACSNYYKIEKDGESYSYLGGLKYYCVEVYRDTAGKLQTCGIRYVDLIKKNKKLYRKDASRPDDYSEHVTFLYAKDYIRICKKNGTVKFEGIYKSVDNINQSKLTCIGMTSLDEKTITVGKTDRVFRYNITLLGEKSEEPICSEPLPYISESVSE

SEQ ID NO: 17820 - protein, 1095 aa, unidentified
  REGION 1..1095: note = Cas Enzyme sequence
MKYIIGLDIGIGSVGWAVVRNDDDCKRLEDFGVRIFESGEIIESNKNIRKSQRRRKYRGMRRRIRRRNHRKERLKNYLENIEFVSRAELSEFFAKNNHDIIDIRVRALDEKVTPVELTAALLHIAKRRGYKAFYELSDENNNAKDKKAKEEEEKDIYKALTNTADVIKNGGYRSIAEAIMKDSEHFSDKISGRYKYRNIKEKDEKGKKESSGKISENDILFPTEMFEDEVRKILGKQKEFYPQLTDESIDKIFDIIFSRRDFEDGPGNADDENRPYKGFVDSIGNCPYYKNEKRGHRYTVIGDLFALANKLSQYKYVEKNTGEVVKLPRDLMRNIVSQSLQSGSITKTKINELAKELNIVILNTKTAKNENIADCIKYLKAVKPIFESYGFDWDKLISEEYTDQNSLLNRVGDTISFNITPKRRIDALNKIDELKGKDELIKKLSKQNFSGTAKVSDKYMIDAINAFFDGTLVGEFQANVQQDEFSVSIKTEKLLKLKPFDNNSEYAQNPVVFRAINETRKVVNAIVQKYGAPNAMNIEIASELNKSFDTRQKISTQQNKNEKERKNAIKQISLITGLDEGEIRPQYIERYLLGELQGWRCMYSNEEITNKKEAILNKEKQYEIDHIVPFSRILDDTLNNKALVLARENQKKGARTPLMYLSAEKEKEFKQRVNKLFKDNKITEKKYRYFMLESLVGEDAEKILGDWKTRNLNDTRYIAKFLVKYFNDNLYFAREKCDDKRPAVYAVKGAITSSLRRQWLNKETWGRYDKGELKKITYFDHAVDAIVIANCLPAYVIIAAENHKLRDIYYSAGKIKTEEYRKSLDNCVDTLMKYYGMSPTVSRKLLEKVKETPSLLKNIRFEVEYRVRDYELMKYFFNYDTKVGEDTLDQIFRNDLYKIYDHQFADSIEMPIVSIKPERKYSGQMVKDGFIKKKDAISGKNSVKTIGENNSTVLNDSRFYCVDVYRTCNDETNLSFIKYTDLLKRNNHLYLRSDYRYPDDYAMHEMYLFYGDYIEITKKNKICCGYYFSLKNSLRNELYISKGNTRRRLNNMKENEVCSITKKDTVKKFEIDILGKKLGEVKKCGEPLSLLPEKN

SEQ ID NO: 17821 - protein, 1092 aa, unidentified
  REGION 1..1092: note = Cas Enzyme sequence
MKYIIGLDIGIGSVGWAVVRNDDDCKRLEDFGVRIFESGEIIESNKNIRKSQRRRKYRGMRRRIRRRNHRKERLKNYLENIEFVSRAELSEFFAKNNHDIIDIRVRALDEKVTPVELAAALLHIAKRRGYKAFYELSDENNNAKDKKAKEEEKDIYKALTNTADVIKNGGYRSIAEAIMKDSEHFSDKISGRYKYRNIKEKDEKGKKESSSKISENDILFPTEMFEDEVRKILGKQKEFYPQLTDESIDKIFDIIFSRRDFEDGPGNADDENRPYKGFVDSIGNCPYYKNEKRGHRYTVIGDLFALANKLSQYKYVEKNTGEVVKLPRDLMRNIVNQSLQSGSITKTKINELAKEFNIVILNTKTAKNENIADCIKYLKAVKPIFESYGFDWDKLISEEYTDQNSLLNRVGDTISFNITPKRRIDALNRIDELKGKDELIKKLSKQNFSGTAKVSDKYMIDAINAFFDGTLVGEFQANVQQEEFSVSIKTEKLLKLKPFDNNSEYAQNPVVFRAINETRKVVNAIVQKYGAPNAMNIEIASELNKSFDTRQKISTQQNKNEKERKNAIKQISLITGLDEREIRPQYIERYLLGELQGWRCMYSNEEITNKKEAILNKGKQYEIDHIVPFSRILDDTLNNKALVLARENQKKGARTPLMYLSTEKEKEFKQRVNKLFKDNKITEKKYRYFMLESLVGEDAEKILGDWKTRNLNDTRYIAKFLVKYFNDNLYFAREKGDDKRPVVYAVKGAITSSLRRQWLNKETWGRYDKGELKKITYFDHAVDAIVIANCLPAYVIIAAENHKLRDIYYSAGKIKTEEYRKSLDNCVDTLMKYYGMSPAVSRKLLEKVKETPSLLKNIRFEVEYRVRDYELMKYFFNYDTKVGEDTLDQIFRNDLYKIYDHQFADSIEMPIVSIKPERKYSGQMVKDNFLKKRVANSENKYVKTIDKNNDAVLDNSYYYCVEVYRTRSGNIDLQGIKYTDLVNKNKKLYLKPCYKYPENYYKYIMYLFKGDYLRIKGPKSTRLGFYKAVNNINQNSIKITRYNSKYTRAFREESTTISADAEIEKIYVDILGKKGKVLTKHGEPLSLLPEKN

SEQ ID NO: 17822 - protein, 1092 aa, unidentified
  REGION 1..1092: note = Cas Enzyme sequence
MKYIIGLDIGIGSVGWAVVRNDDDCKRLEDFGVRIFESGEIIESNKNIRKSQRRRKYRGMRRRIRRRNHRKERLKNYLENIEFVSRAELSEFFAKNNHDIIDIRVRALDEKVTPVELTAALLHIAKRRGYKAFYELSDENNNAKDKKAKEEEKDIYKALTNTADVIKNGGYRTIAEAIMKDSEHFSDKISGRYKYRNIKEKDEKGKKESGGKISENDILFPTEMFEDEVRKILGKQKEFYPQLTDESIDKIFDIIFSRRDFEDGPGNTDDENRPYKGFVDSIGNCPYYKNEKRGHRYTVIGDLFALANKLSQYKYVEKNTGEVVKLPRDLMRNIVNQSLQSGSITKTKINELAKELNIVILNTKTAKNENIADCIKYLKAVKPIFESYGFDWDKLISEEYTDQNSLLNRVGDTISFNITPKRRIDALNKIDELKGKDELIKKLSEQNFSGTAKVSDKYMIDAINAFFDGTLVGEFQANVQQDEFSVSIKTEKLLKLKPFDNNSEYAQNPVVFRAINETRKVVNAIVQKYGAPNAMNIEIASELNKSFDTRQKISTQQNKNEKERKNAIKQISLITGLDEREIRPQYIERYLLGELQGWRCMYSNEEITNKKEAILNKGKQYEIDHIVPFSRILDDTLNNKALVLARENQKKGARTPLMYLSAEKEKEFKQRVNKLFKGNKITEKKYRYFMLESLVGEDAEKILGDWKTRNLNDTRYIAKFLVKYFNDNLYFAREKGDDKRPVVYAVKGAITSSLRRQWLNKETWGRYDKGELKKITYFDHAVDAIVIANCLPAYVIIAAENHKLRDIYYSAGKIKTEEYRKSLDNCVDTLMKYYGMSPAVSRKLLEKVKETPSLLKNIRFEVEYRVRDYELMKYFFNYDTKVGEDTLDQIFRNDLYKIYDHQFADSIEMPIVSIKPERKYSGQMVKDNFLKKRVANSENKYVKTIDKNNDAVLDNSYYYCVEVYRTRSGNIDLQGIKYTDLVNKNKKLYLKPCYKYPENYYKYIMYLFKGDYLRIKGPKSTRLGFYKAVNNINQNSIKITRYNSKYTRAFREESTTISADAEIEKIYVDILGKKGKVLTKHGEPLSLLPEKN

SEQ ID NO: 17823 - protein, 1095 aa, unidentified
  REGION 1..1095: note = Cas Enzyme sequence
MKYIIGLDIGIGSVGWAVVRNDDDCKRLEDFGVRIFESGEIIESNKNIRKSQRRRKYRGMRRRIRRRNHRKERLKNYLENIKFVNRAELSEFFAKNNHDIIDIRVRALDEKVTPVELTAALLHIAKRRGYKAFYELSDENNNAKDKKAKEEEEKDIYKALTNTADVIKNGGYRSIAEAIMKDSEHFSDKISGRYKYRNIKEKDEKGKKKSDGKISENDILFPTEMFEDEVRKILSKQKEFYSQLTDESIDKIFDIIFSRRDFEDGPGNTDDENRPYKGFVDSIGNCPYYKNEKRGHRYTVIGDLFALANKLSQYKYVEKNTGEVVKLPRDLMRNIVNQSLQSGSITKTKINELAKELNIVILNTKTAKNENIADCIKYLKAVKPIFESYGFDWDKLISEEYTDQNSLLNRVGDTISFNITPKRRIDALNKIDELKGKDELIKKLSKQNFSGTAKVSDKYMIDAINAFFDGTLVGEFQANVQQDEFSVSIKTEKLLKLKPFDNNSEYAQNPVVFRAINETRKVVNAIVQKYGAPNAMNIEIASELNKSFDTRQKISTQQNKNEKERKNAIKQISLITGLDEREIRSQYIERYLLGELQGWRCMYSNEEITNKKEAILNKGKQYEIDHIVPFSRILDDTLNNKALVLARENQKKGARTPLMYLSAEKEKEFKQRVNKLFKGNKITEKKYRCFMLESLVGEDAEKILGDWKTRNLNDTRYIAKFLVKYFNDNLYFAREKGDDKRPVVYAVKGAITSSLRRQWLNKETWGRYDKGELKKITYFDHAVDAIVIANCLPAYVIIAAENHKLRDIYYSAGKIKTDEYRKSLDNCVDTLMKYYGMSPTVSRKLLEKVKETPSLLKNIRFEVEYRVRDYELMKYFFNYDTKVGKDTLDQIFRNDLYKIYDHQFADSIEMPIVSIKPERKYSGQMVKDGFIKKKDAISGKNSVKTIGENNSTVLNDSRFYCVDVYRTCNDETNLNFIKYTDLLKRNNHLYLRSDYRYPDDYAMHEMYLFYGDYIEITKKNKICCGYYFSLKNSSRNELYMSKGNTRRKLNNMKENEVCSITKKDTVKKFEIDILGKKLGEVKKCGEPLSLLPEKN

SEQ ID NO: 17824 - protein, 1095 aa, unidentified
  REGION 1..1095: note = Cas Enzyme sequence
MKYIIGLDIGIGSVGWAVVRNDDDCKRLEDFGVRIFESGEIIESNKNIRNSQRRRKYRGMRRRIRRRNHRKERLKNYLENIGFVSRAELSEFFAKNNHDIIDIRVRALDEMVTPVELTAALLHIAKRRGYKAFYELSDENNNAKDKKAKEEEEKDIYKALTNTADVIKNGGYRSIAEAIMKDSEHFSDKISGRYKYRNIKEKDEKGKKKSDGKISENDILFPTEMFEDEVRKILSKQKEFYSQLTDESIDKIFDIIFSRRDFEDGPGNTDDENRPYKGFVDSIGNCPYYKNEKRGHRYTVIGDLFALANKLSQYKYVEKNTGEVVKLPRDLMRNIVNQSLQSGSITKTKINELAKELNIVILNTKTAKNENIADCIKYLKAVKPIFESYGFDWDKLISEEYTDQNSLLNRVGDTISFNITPKRRIDALNKIDELKGKDELIKKLSKQNFSGTAKVSDKYMIDAINAFFDGTLVGEFQANVQQDEFSVSIKTEKLLKLKPFDNNSEYAQNPVVFRAINETRKVVNAIVQKYGAPNAMNIEIASELNKSFDTRQKISTQQNKNEKERKNAIKQISLITGLDEREIRSQYIERYLLGELQGWRCMYSNEEITNKKEAILNKGKQYEIDHIVPFSRILDDTLNNKALVLARENQKKGARTPLMYLSAEKEKEFKQRVNKLFKGNKITEKKYRCFMLESLVGEDAEKILGDWKTRNLNDTRYIAKFLVKYFNDNLYFAREKGDDKRPVVYAVKGAITSSLRRQWLNKETWGRYDKGELKKITYFDHAVDAIVIANCLPAYVIIAAENHKLRDIYYSAGKIKTDEYRKSLDNCVDTLMKYYGMSPTVSRKLLEKVKETPSLLKNIRFEVEYRVRDYELMKYFFNYDTKVGKDTLDQIFRNDLYKIYDHQFADSIEMPIVSIKPERKYSGQMVKDGFIKKKDAISGKNSVKTIGENNSTVLNDSRFYCVDVYRTCNDETNLNFIKYTDLLKRNNHLYLRSDYRYPDDYAMHEMYLFYGDYIEITKKNKICCGYYFSLKNSSRNELYMSKGNTRRKLNNMKENEVCSITKKDTVKKFEIDILGKKLGEVKKCGEPLSLLPEKN

SEQ ID NO: 17825 - protein, 1094 aa, unidentified
  REGION 1..1094: note = Cas Enzyme sequence
MKYIIGLDIGIGSVGWAVVRNDDDCKRLEDFGVRIFESGEIIESNKNIRKSQRRRKYRGMRRRIRRRNHRKERLKNYLENIGFVSRAELSEFFAKNNHDIIDIRVRALDEMVTPVELTASLLHIAKRRGYKAFYELSDENNNAKDKKAKEEEKDIYKALTNTADVIKNGGYRSIAEAIMKDSEHFSDKISGRYKYRNIKEKDEKGKKKSDGKISENDILFPTEMFEDEVRKILGKQKEFYPQLTDESIDKIFDIIFSRRDFEDGPGNTDDENRPYKGFVDSIGNCPYYKNEKRGHRYTVIGDLFALANKLSQYKYVEKNTGEVVKLPRDLMRNIVNQSLQSGSITKTKINELAKEFNIVILNTKTAKNENIADCIKYLKAVKPIFESYGFDWDKLISEEYTDQNSLLNRVGDTISFNITPKRRIDALNKIDELKGKDELIKKLSKQNFSGTAKVSDKYMIDAINAFFDGTLVGEFQANVQQDEFSVSIKTEKLLKLKPFDNNSEYAQNPVVFRAINETRKVVNAIVQKYGAPNAMNIEIASELNKSFDTRQKISTQQNKNEKERKNAIKQISLITGLDEREIRPQYIERYLLGELQGWRCMYSNEEITNKKEAILNKGKQYEIDHIVPFSRILDDTLNNKALVLARENQKKGARTPLMYLSAEKEKEFKQRVNKLFKGNKITEKKYRYFMLESLVGEDAEKILGDWKTRNLNDTRYIAKFLVKYFNDNLYFAREKGDDKRPVVYAVKGAITSSLRRQWLNKETWGRYDKSELKKITYFDHAVDAIVIANCLPAYVIIAAENHKLRDIYYSAGKIKTEEYRKSLDNCVDTLMKYYGMSPAVSRKLLEKVKETPSLLKNIRFEVEYRVRDYELMKYFFNYDTKVGEDTLDQIFRNDLYKIYDHQFADSIEMPIVSIKPERKYSGQMVKDGFIKKKDAISGKNSVKTIGENNSTVLNDSRFYCVDVYRTCNDETNLNFIKYTDLLKRNNHLYLRSDYRYPDDYAMHEMYLFYGDYIEITKKNKICCGYYFSLKNSSRNELYMSKGNTRRKLNNMKENEVCSITKKDTVKKFEIDILGKKLGEVKKCGEPLSLLPEKN

SEQ ID NO: 17826 - protein, 1092 aa, unidentified
  REGION 1..1092: note = Cas Enzyme sequence
MKYIIGLDIGIGSVGWAVVRNDDDCKRLEDFGVRIFESGEIIESNKNIRNSQRRRKYRGMRRRIRRRNHRKERLKNYLENIEFVSRAELSEFFAKNNHDIIDIRVRALDEKVTPVELTAALLHIAKRRGYKAFYELSDENNNAKDKKAKEEEKDIYKALTNTADVIKNGGYRSIAEAIMKDSEHFSDKISGRYKYRNIKEKDEKGKKKSDSKISENDILFPTEMFEDEVRKILGKQKEFYSQLTDESIDKIFDIIFSRRDFEDGPGNTDDENRPYKGFVDSIGNCPYYKNEKRGHRYTVIGDLFALANKLSQYKYVEKNTGEVVKLPRDLMRNIVNQSLQSGSITKTKINELAKEFNIVILNTKTAKNENIADCIKYLKAVKPIFESYGFDWDKLISEEYTDQNSLLNRVGDTISFNITPKRRIDALNKIDELKGKDELIKKLSKQNFSGTAKVSDKYMIDAINAFFDGTLVGEFQANVQQDEFSVSIKTEKLLKLKPFDNNSEYAQNPVVFRAINETRKVVNAIVQKYGAPNAMNIEIASELNKSFDTRQKISTQQNKNEKERKNAIKQISLITGLDEREIRPQYIERYLLGELQGWRCMYSNEEITNKKEAILNKGKQYEIDHIVPFSRILDDTLNNKALVLARENQKKGARTPLMYLSAEKEKEFKQRVNKLFKDNKITEKKYRYFMLESLVGEDAEKILGDWKTRNLNDTRYIAKFLVKYFNDNLYFAREKGDDKRPVVYAVKGAITSSLRRQWLNKETWGRYDKGELKKITYFDHAVDAIVIANCLPAYVIIATENHKLRDIYYSAGKIKTEEYRKSLDNCVDTLMKYYGMSPTVSRKLLEKVKETPSLLKNIRFEVEYRVRDYELMKYFFNYDTKVGEDTLDQIFRNDLYKIYDHQFADSIEMPIVSIKPERKYSGQMVKDNFLKKRVANSENKYVKTIDKNNDAVLDNSYYYCVEVYRTRSGNIDLQGIKYTDLVNKNKKLYLKPCYKYPENYYKYIMYLFKGDYLRIKGPKSTRLGFYKAVNNINQNSIKITRYNSKYTRAFREESTTISADAEIEKIYVDILGKKGKVLTKHGEPLSLLPEKN

SEQ ID NO: 17827 - protein, 1095 aa, unidentified
  REGION 1..1095: note = Cas Enzyme sequence
MKYIIGLDIGIGSVGWAVVRNDDDCKRLEDFGVRIFESGEIIESNKNIRNSQRRRKYRGMRRRIRRRNHRKERLKNYLENIEFVSRAELSEFFAKNNHDIIDIRVRALDEMVTPVELTAALLHIAKRRGYKAFYELSDENNNAKDKKAKEEEEKDIYKALTNTADVIKNGGYRSIAEAIMKDSEHFSDKISGRYKYRNIKEKDEKGKKESGGKISENDILFPTEMFEDEVRKILGKQKEFYPQLTDESIDKIFDIIFSRRDFEDGPGNTDDENRPYKGFVDSIGNCPYYKNEKRGHRYTVIGDLFALANKLSQYKYVEKNTGEVVKLPRDLMRNIVNQSLQSGSITKTKINELAKEFNIVILNTKTAKNENIADCIKYLKAVKPIFESYGFDWDKLISEEYTDQNSLLNRVGDTISFNITPKRRIDALNKIDELKGKDELIKKLSKQNFSGTAKVSDKYMIDAINAFFDGTLVGEFQANVQQDEFSVSIKTEKLLKLKPFDNNSEYAQNPVVFRAINETRKVVNAIVQKYGAPNAMNIEIASELNKSFDTRQKISTQQNKNEKERKNAIKQISLITGLDEREIRPQYIERYLLGELQGWRCMYSNEEITNKKEAILNKGKQYEIDHIVPFSRILDDTLNNKALVLARENQKKGARTPLMYLSAEKEKEFKQRVNKLFKGNKITEKKYRYFMLESLVGEDAEKTLGDWKTRNLNDTRYIAKFLVKYFNDNLYFAREKGDDKRPVVYAVKGAITSSLRRQWLNKETWGRYDKGELKKITYFDHAVDAIVIANCLPAYVIIAAENHKLRDIYYSAGKIKTEEYRKSLDNCVDTLMKYYGMSPAVSRKLLEKVKETPSLLKNIRFEVEYRVRDYELMKYFFNYDTKVGEDTLDQIFRNDLYKIYDHQFADSIEMPIVSIKPERKYSGQMVKDGFIKKKDAISGKNSVKTIGENNSTVLNDSRFYCVDVYRTCNDETNLNFIKYTDLLKRNNHLYLRSDYRYPDDYAMHEMYLFYGDYIEITKKNKICCGYYFSLKNSSRNELYMSKGNTRRKLNNVKENEVCSITKKDTVKKFEIDILGKKLGEVKKYGEPLSLLPEKN

SEQ ID NO: 17828 - protein, 985 aa, unidentified
  REGION 1..985: note = Cas Enzyme sequence
MVTPVELTAALLHIAKRRGYKAFYELSDENNNAKDKKAKEEEEKDIYKALTNTADVIKNGGYRSIAEAIMKDSEHFSDKISGRYKYRNIKEKDEKGKKKSDSKISENDILFPTEMFEDEVRKILGKQKEFYSQLTDESIDKIFDIIFSRRDFEDGPGNTDDENRPYKGFVDSIGNCPYYKNEKRGHRYTVIGDLFALANKLSQYKYVEKNTGEVVKLPRDLMRNIVNQSLQSGSITKTKINELAKEFNIVILNTKTAKNENIADCIKYLKAVKPIFESYGFDWDKLISEEYTDQNSLLNRVGDTISFNITPKRRIDALNKIDELKGKDELIKKLSKQNFSGTAKVSDKYMIDAINAFFDGTLVGEFQANVQQDEFSVSIKTEKLLKLKPFDNNSEYAQNPVVFRAINETRKVVNAIVQKYGAPNAMNIEIASELNKSFDTRQKISTQQNKNEKERKNAIKQISLITGLDEREIRPQYIERYLLGELQGWRCMYSNEEITNKKEAILNKGKQYEIDHIVPFSRILDDTLNNKALVLARENQKKGARTPLMYLSAEKEKEFKQRVNKLFKGNKITEKKYRYFMLESLVGEDAEKILGDWKTRNLNDTRYIAKFLVKYFNDNLYFAREKGDDKRPVVYAVKGAITSSLRRQWLNKETWGRYDKGELKKITYFDHAVDAIVIANCLPAYVIIAAENHKLRDIYYSAGKIKTEEYRKSLDNCVDTLMKYYGMSPAVSRKLLEKVKETPSLLKNIRFEVEYRVRDYELMKYFFNYDTKVGEDTLDQIFRNDLYKIYDHQFADSIEMPIVSIKPERKYSGQMVKDRFIKKKDAISGKNSVKTIGENNSTVLNDSRFYCVDVYRTCNDETNLNFIKYTDLLKRNNHLYLRSDYRYPDDYAMHEMYLFRGDYIEITKKNIIRCGYYFSLKDSSKNELYISKGNTRRKLNNMKEKEACSITKKDTVKKFEIDILGKKLGEVKKYGEPLSLLPEKN

SEQ ID NO: 17829 - protein, 1092 aa, unidentified
  REGION 1..1092: note = Cas Enzyme sequence
MKYIIGLDIGIGSVGWAVVRNDDDCKRLEDFGVRIFESGEIIESNKNIRKSQRRRKYRGMRRRIRRRNHRKERLKNYLENIEFVSRAELSEFFAKNNHDIIDIRVRALDEKVTPVELTAALLHIAKRRGYKAFYELSDENNNAKDKKAKEEEKDIYKALTNTADVIKNGGYRSIAEAIMKDSEHFSDKISGRYKYRNIKEKDEKGKKKSDGKISENDILFPTEMFEDEVRKILGKQKEFYSQLTDESIDKIFDIIFSRRDFEDGPGNTDDENRPYKGFVDSIGNCPYYKNEKRGHRYTVIGDLFALANKLSQYKYVEKNTGEVVKLPRNLMRNIVNQSLQSGSITKTKINELAKEFNIVILNTKTAKNENIADCIKYLKAVKPIFESYGFDWDKLISEEYTDQNSLLNRVGDTISFNITPKRRIDALNKIDELKGKDELIKKLSKQNFSGTAKVSDKYMIDAINAFFDGTLVGEFQANVQQDEFSVSIKTEKLLKLKPFDNNSEYAQNPVVFRAINETRKVVNAIVQKYGAPNAMNIEIASDLNKSFDTRQKISTQQNKNEKERKNAIKQISLITGLDEGEIRPQYIERYLLGELQGWRCMYSNEEITNKKEAILNKRKQYEIDHIVPFSRILDDTLNNKALVLARENQKKGARTPLMYLSAEKEKEFKQRVNKLFKDNKITEKKYRYFMLESLVGEDAEKILGDWKTRNLNDTRYIAKFLVKYFNDNLYFAREKGDDKRPVVYAVKGAITSSLRRQWLNKETWGRYDKGELKKITYFDHAVDAIVIANCLPAYVIIAAENHKLRDIYYSAGKIKTEEYRESLDNCVDTLMKYYGMSPTVSRKLLEKVKETPSLLKNIRFEVEYRVRDYELMKYFFNYDTKVGEDTLDQVFRNDLYKIYDHQFADSIEMPIVSIKPERKYSGQMVKDNFLKKRVANSENKYVKTIDKNNDAVLDNSYYYCVEVYRTRSGNIDLQGIKYTDLVNKNKKLYLKPCYKYPENYYKYIMYLFKGDYLRIKGPKSTRLGFYKAVNNINQNSIKITRYNSKYTRAFREESTAISADAEIEKIYVDILGKKGKVLTKHGEPLSLLPEKN

SEQ ID NO: 17830 - protein, 1092 aa, unidentified
  REGION 1..1092: note = Cas Enzyme sequence
MKYIIGLDIGIGSVGWAVVRNDDDCKRLEDFGVRIFESGEIIESNKNIRNSQRRRKYRGMRRRIRRRNHRKERLKNYLENIEFVSRAELSEFFAKNNHDIIDIRVRALDEMVTPVELTAALLHIAKRRGYKAFYELSDENNNAKDKKAKEEEKDIYKALTNTADVIKNGGYRTIAEAIMKDSEHFSDKISGRYKYRNIKEKDEKGKKKSDGKISENDILFPTEMFEDEVRKILGKQKEFYSQLTDESIDKIFDIIFSRRDFEDGPGNTDDENRPYKGFVDSIGNCPYYKNEKRGHRYTVIGDLFALANKLSQYKYVEKNTGEVVKLPRDLMRNIVNQSLQSGSITKTKINELAKEFNIVILNTKTAKNENIADCIKYLKAVKPIFESYGFNWDKLISEEYTDQNSLLNRVGDTISFNITPKRRIDALNKIDELKGKDELIKKLSKQNFSGTAKVSDKYMIDAINAFFDGTLVGEFQANVQQDEFSVSIKTEKLLKLKPFDNNSEYAQNPVVFRAINETRKVVNAIVQKYGAPNAMNIEIASELNKSFDTRQKISTQQNKNEKERKNAIKQISLITGLDEREIRPQYIERYLLGELQGWRCMYSNEEITNKKEAILNKGKQYEIDHIVPFSRILDDTLNNKALVLARENQKKGARTPLMYLSAEKEKEFKQRVNKLFKGNKITEKKYRYFMLESLVGEDAEKILGDWKTRNLNDTRYIAKFLVKYFNDNLYFAREKGDDKRPVVYAVKGAITSSLRRQWLNKETWGRYDKGELKKITYFDHAVDAIVIANCLPAYVIIAAENHKLRDIYYSAGKIKTEEYRKSLDNCVDTLMKYYGMSPAVSRKLLEKVKETPSLLKNIRFEVEYRVRDYELMKYFFNYDTKVGEDTLDQIFRNDLYKIYDHQFADSIEMPIVSIKPERKYSGQMVKDNFLKKRVANSENKYVKTIDKNNDAVLDNSYYYCVEVYRTRSGNIDLQGIKYTDLVNKNKKLYLKPCYKYPENYYKYIMYLFKGDYLRIKGPKSTRLGFYKAVNNINQNSIKITRYNSKYTRAFREESTTISADAEIEKIYVDILGKKGKVLTKHGEPLSLLPEKN

SEQ ID NO: 17831 - protein, 1095 aa, unidentified
  REGION 1..1095: note = Cas Enzyme sequence
MKYIIGLDIGIGSVGWAVVRNDDDCKRLEDFGVRIFESGEIIESNKNIRKSQRRRKYRGMRRRIRRRNHRKERLKNYLENIGFVSRAELSEFFAKNNHDIIDIRVRALDEMVTPVELTAALLHIAKRRGYKAFYELSDENNNAKDKKAKEEEEKDIYKALTNTADVIKNGGYRSIAEAIMKDSEHFSDKISGRYKYRNIKEKDEKGKKKSDSKISENDILFPTEMFEDEVRKILGKQKEFYSQLTDESIDKIFDIIFSRRDFEDGPGNTDDENRPYKGFVDSIGNCPYYKNEKRGHRYTVIGDLFALANKLSQYKYVEKNTGEVVKLPRDLMRNIVNQSLQSGSITKTKINELAKEFNIVILNTKTAKNENIADCIKYLKAVKPIFESYGFDWDKLISEEYTDQNSLLNRVGDTISFNITPKRRIDALNKIDELKGKDELIKKLSKQNFSGTAKVSDKYMIDAINAFFDGTLVGEFQANVQQDEFSVSIKTEKLLKLKPFDNNSEYAQNPVVFRAINETRKVVNAIVQKYGAPNAMNIEIASELNKSFDTRQKISTQQNKNEKERKNAIKQISLITGLDEREIRPQYIERYLLGELQGWRCMYSNEEITNKKEAILNKGKQYEIDHIVPFSRILDDTLNNKALVLARENQKKGARTPLMYLSAEKEKEFKQRVNKLFKGNKITEKKYRYFMLESLVGEDAEKILGDWKTRNLNDTRYIAKFLVKYFNDNLYFAREKGDDKRPVVYAVKGAITSSLRRQWLNKETWGRYDKGELKKITYFDHAVDAIVIANCLPAYVIIAAENHKLRDIYYSAGKIKTEEYRKSLDNCVDTLMKYYGMSPAVSRKLLEKVKETPSLLKNIRFEVEYRVRDYELMKYFFNYDTKVGEDTLDQIFRNDLYKIYDHQFADSIEMPIVSIKPERKYSGQMVKDRFIKKKDAISGKNSVKTIGENNSTVLNDSRFYCVDVYRTCNDETNLNFIKYTDLLKRNNHLYLRSDYRYPDDYAMHEMYLFRGDYIEITKKNIIRCGYYFSLKDSSKNELYISKGNTRRKLNNMKEKEACSITKKDTVKKFEIDILGKKLGEVKKYGEPLSLLPEKN

SEQ ID NO: 17832 - protein, 1098 aa, unidentified
  REGION 1..1098: note = Cas Enzyme sequence
KERIMKYIIGLDIGIGSVGWAVVRNDDDCKRLEDFGVRIFESGEIIESNKNIRKSQRRRKYRGMRRRIRRRNHRKERLKNYLENIEFVSRAELSEFFAKNNHDIIDIRVRALDEKVTPVELTAALLHIAKRRGYKAFYELSDENNNAKDKKAKEEEKDIYKALTNTADVIKNGGYRSIAEAIMKDSEHFSDKISGRYKYRNIKEKDEKGKKKSDSKISENDILFPTEMFEDEVRKILGKQKEFYPQLTDESIDKIFDIIFSRRDFEDGPGNTDDENRPYKGFVDSIGNCPYYKNEKRGHRYTVIGDLFALANKLSQYKYVEKNTGEVVKLPRDLMRNIVNQSLQSGSITKTKINELAKEFNIVILNTKTAKNENIADCIKYLKAVKPIFESYGFDWDKLISEEYTDQNSLLNRVGDTISFNITPKRRIDALNKIDELKGKDELIKKLSKQNFSGSAKVSDKYMIDAINDFFDGTLVGEFQENIQQDEFSVSIKTEKLLKLKPFDNNSEYAQNPVVFRAINETRKVVNAIVQKYGAPNAMNIEIASELNKSFDTRQKISTQQNKNEKERKNAIKQISLITGLDEREIRPQYIERYLLGELQGWRCMYSNEEITNKKEAILNKGKQYEIDHIVPFSRILDDTLNNKALVLARENQKKGARTPLMYLSAEKEKEFKQRVNKLFKGNKITEKKYRYFMLESLVGEDAEKILGDWKTRNLNDTRYIAKFLVKYFNDNLYFAREKGDDKRPVVYAVKGAITSSLRRQWLNKETWGRYDKGELKKITYFDHAVDAIVIANCLPAYVIIAAENHKLRDIYYSAGKIKTEEYRKSLDNCVDTLMKYYGMSPTVSRKLLEKVKETPSLLKNIRFEVEYRVRDYELMKYFFNYDTKVGEDTLDQIFRNDLYKIYDHQFADSIEMPIVSIKPERKYSGQMVKDGFIKKKDAISGKNSVKTIGENNSTVSNDSRFYCVDVYRTCNDETNLNFIKYTDLLKRNNHLYLRSDYRYPDDYAMHEMYLFYGDYIEITKKNKICCGYYFSLKNSSRNELYMSKGNTRRKLNNMKENEVCSITKKDTVKKFEIDILGKKLGEVKKCGEPLSLLPEKN

SEQ ID NO: 17833 - protein, 1095 aa, unidentified
  REGION 1..1095: note = Cas Enzyme sequence
MKYIIGLDIGIGSVGWAVVRNDDDCKRLEDFGVRIFESGEIIESNKNIRNSQRRRKYRGMRRRIRRRNHRKERLKNYLENIGFVSRAELSEFFAKNNHDIIDIRVRALDEMVTPVELTAALLHIAKRRGYKAFYELSDENNNAKDKKAKEEEEKDIYKALTNTADVIKNGGYRSIAEAIMKDSEHFSDKISGRYKYRNIKEKDEKGKKKSDGKISENDILFPTEMFEDEVRKILSKQKEFYSQLTDESIDKIFDIIFSRRDFEDGPGNTDDENRPYKGFVDSIGNCPYYKNEKRGHRYTVIGDLFALANKLSQYKYVEKNTGEVVKLPRDLMRNIVNQSLQSGSITKTKINELAKELNIVILNTKTAKNENIADCIKYLKAVKPIFESYGFDWDKLISEEYTDQNSLLNRVGDTISFNITPKRRIDALNKIDELKGKDELIKKLSKQNFSGTAKVSDKYMIDAINAFFDGTLVGEFQANVQQDEFSVSIKTEKLLKLKPFDNNSEYAQNPVVFRAINETRKVVNAIVQKYGAPNAMNIEIASELNKSFDTRQKISTQQNKNEKERKNAIKQISLITGLDEREIRSQYIERYLLGELQGWRCMYSNEEITNKKEAILNKGKQYEIDHIVPFSRILDDTLNNKALVLARENQKKGARTPLMYLSAEKEKEFKQRVNKLFKGNKITEKKYRCFMLESLVGEDAEKILGDWKTRNLNDTRYIAKFLVKYFNDNLYFAREKGDDKRPVVYAVKGAITSSLRRQWLNKETWGRYDKGELKKITYFDHAVDAIVIANCLPAYVIIAAENHKLRDIYYSAGKIKTDEYRKSLDNCVDTLMKYYGMSPTVSRKLLEKVKETPSLLKNIRFEVEYRVRDYELMKYFFNYDTKVGKDTLDQIFRNDLYKIYDHQFADSIEMPIVSIKPERKYSGQMVKDGFIKKKDAISEKNSVKTIGENNSTVLNDSRFYCVDVYRTCNDETNLNFIKYTDLLKRNNHLYLRSDYRYPDDYAMHEMYLFYGDYIEITKKNKICCGYYFSLKNSSRNELYMSKGNTRRKLNNMKENEVCSITKKDTVKKFEIDILGKKLGEVKKCGEPLSLLPEKN

SEQ ID NO: 17834 - protein, 1025 aa, unidentified
  REGION 1..1025: note = Cas Enzyme sequence
KTVYYVFALLYTMLLHCTLSEFFAKNNHDIIDIRVRALDEMVTPVELTAALLHIAKRRGYKAFYELSDENNNAKDKKAKEEEEKDIYKALTNTADVIKNGGYRSIAEAIMKDSEHFSDKISGRYKYRNIKEKDEKGKKKSDGKISENDILFPTEMFEDEVRKILGKQKEFYPQLTDESIDKIFDIIFSRRDFEDGPGNTDDENRPYKGFVDSIGNCPYYKNEKRGHRYTVIGDLFALANKLSQYKYVEKNTGEVVKLPRDLMRNIVNQSLQSGSITKTKINELAKELNIVILNTKTAKNENIADCIKYLKAVKPIFESYGFDWDKLISEEYTDQNSLLNRVGDTISFNITPKRRIDALNKIDELKGKDELIKKLSKQNFSGTAKVSDKYMIDAINAFFDGTLVGEFQANVQQDEFSVSIKTEKLLKLKPFDNNSEYAQNPVVFRAINETRKVVNAIVQKYGAPNAMNIEIASELNKSFDTRQKISTQQNKNEKERKNAIKQISLITGLDEREIRPQYIERYLLGELQGWRCMYSNEEITNKKEAILNKGKQYEIDHIVPFSRILDDTLNNKALVLARENQKKGARTPLMYLSAEKEKEFKQRVNKLFKGNKITEKKYRYFMLESLVGEDAEKILGDWKTRNLNDTRYIAKFLVKYFNDNLYFAREKGDDKRPVVYAVKGAITSSLRRQWLNKETWGRYDKGELKKITYFDHAVDAIVIANCLPAYVIIAAENHKLRDIYYSAGKIKTEEYRKSLDNCVDTLMKYYGMSPAVSRKLLEKVKETPSLLKNIRFEVEYRVRDYELMKYFFNYDTKVGEDTLDQIFRNDLYKIYDHQFADSIEMPIVSIKPERKYSGQMVKDRFIKKKDAISGKNSIKTIGENNSTVLNDSRFYCVDVYRTCNDETNLNFIKYTDLLKRNNHLYLRSDYRYPDDYAMHEMYLFRGDYIEITKKNKICCGYYFSLKDSSKNELYISKGNTRRKLNNMKEKEACSITKKDTVKKFEIDILGKKLGEVKKYGEPLSLLPEKN

SEQ ID NO: 17835 - protein, 1092 aa, unidentified
  REGION 1..1092: note = Cas Enzyme sequence
MKYIIGLDIGIGSVGWAVVRNDDDCKRLEDFGVRIFESGEIIESNKNIRKSQRRRKYRGMRRRIRRRNHRKERLKNYLENIEFVSRAELSEFFAKNNHDIIDIRVRALDEKVTPVELTAALLHIAKRRGYKAFYELSDENNNAKDKKAKEEEKDIYKALTNTADVIKNGGYRSIAEAIMKDSEHFSDKISGRYKYRNIKEKDEKGKKKSDSKISENDILFPTEMFEDEVRKILGKQKEFYPQLTDESIDKIFDIIFSRRDFEDGPGNTDDENRPYKGFVDSIGNCPYYKNEKRGHRYTVIGDLFALANKLSQYKYVEKNTGEVVKLPRDLMRNIVNQSLQSGSITKTKINELAKEFNIVILNTKTAKNENIADCIKYLKAVKPIFESYGFDWDKLISEEYTDQNSLLNRVGDTISFNITPKRRIDALNKIDELKGKDELIKKLSKQNFSGTAKVSDKYMIDAINAFFDGTLVGEFQANIQQDEFSVSIKTEKLLKLKPFDNNSEYAQNPVVFRAINETRKVVNAIVQKYGAPNAMNIEIASELNKSFDTRQKISTQQNKNEKERKNAIKQISLITGLDEREIRPQYIERYLLGELQGWRCMYSNEEITNKKEAILNKGKQYEIDHIVPFSRILDDTLNNKALVLARENQKKGARTPLMYLSAEKEKEFKQRVNKLFKGNKITEKKYRYFMLESLVGEDAEKILGDWKTRNLNDTRYIAKFLVKYFNDNLYFAREKGDDKRPVVYAVKGAITSSLRRQWLNKETWGRYDKGELKKITYFDHAVDAIVIANCLPAYVIIAAENHKLRDIYYSAGKIKTEEYRKSLDNCVDTLMKYYGMSPAVSRKLLEKVKETPSLLKNIRFEVEYRVRDYELMKYFFNYDTKVGEDTLDQIFRNDLYKIYDHQFADSIEMPIVSIKPERKYSGQMVKDNFLKKRVANSENKYVKTIDKNNGAVLDNSYYYCVEVYRTRSGNIDLQGIKYTDLVNKNKKLYLKPCYKYPENYYKYIMYLFKGDYLRIKGPKSTRLGFYKAVNNINQNSIKITRYNSKYTRAFREESTTISADAEIEKIYVDILGKKGKVLTKHGEPLSLLPEKN

SEQ ID NO: 17836 - protein, 1093 aa, unidentified
  REGION 1..1093: note = Cas Enzyme sequence
MKYIIGLDIGIGSVGWAVVRNDDDCKRLEDFGVRIFESGEIIESNKNIRNSQRRRKYRGMRRRIRRRNHRKERLKNYLENIEFVSRAELSEFFAKNNHDIIDIRVRALDEMVTPVELTAALLHIAKRRGYKAFYELSDENNNAKDKKAKEEKDIYKALTNTADVIKNGGYRSIAEAIMKDSEHFSDKISGRYKYRNIKEKDEKGKKESGGKISENDILFPTEMFEDEVRKILGKQKEFYPQLTDESIDKIFDIIFSRRDFEDGPGNTDDENRPYKGFVDSIGNCPYYKNEKRGHRYTVIGDLFALANKLSQYKYVEKNTGEVVKLPRDLMRNIVNQSLQSGSITKTKINELAKEFNIVILNTKTAKNENIADCIKYLKAVKPIFESYGFDWDKLISEEYTDQNSLLNRVGDTISFNITPKRRIDALNKIDELKGKDELIKKLSKQNFSGTAKVSDKYMIDAINAFFDGTLVGEFQANVQQDEFSVSIKTEKLLKLKPFDNNSEYAQNPVVFRAINETRKVVNAIVQKYGAPNAMNIEIASELNKSFDTRQKISTQQNKNEKERKNAIKQISLITGLDEREIRPQYIERYLLGELQGWRCMYSNEEITNKKEAILNKGKQYEIDHIVPFSRILDDTLNNKALVLARENQKKGARTPLMYLSAEKEKEFKQRVNKLFKGNKITEKKYRYFMLESLVGEDAEKTLGDWKTRNLNDTRYIAKFLVKYFNDNLYFAREKGDDKRPVVYAVKGAITSSLRRQWLNKETWGRYDKGELKKITYFDHAVDAIVIANCLPAYVIIAAENHKLRDIYYSAGKIKTEEYRKSLDNCVDTLMKYYGMSPAVSRKLLEKVKETPSLLKNIRFEVEYRVRDYELMKYFFNYDTKVGEDTLDQIFRNDLYKIYDHQFADSIEMPIVSIKPERKYSGQMVKDGFIKKKDAISGKNSVKTIGENNSTVLNDSRFYCVDVYRTCNDETNLNFIKYTDLLKRNNHLYLRSDYRYPDDYAMHEMYLFYGDYIEITKKNKICCGYYFSLKNSSRNELYMSKGNTRRKLNNVKENEVCSITKKDTVKKFEIDILGKKLGEVKKYGEPLSLLPEKN

SEQ ID NO: 17837 - protein, 1095 aa, unidentified
  REGION 1..1095: note = Cas Enzyme sequence
MKYIIGLDIGIGSVGWAVVRNDDDCKRLEDFGVRIFESGEIIESNKNIRNSQRRRKYRGMRRRIRRRNHRKERLKNYLENIEFVSRAELSEFFAKNNHDIIDIRVRALDEMVTPVELTAALLHIAKRRGYKAFYELSDENNNAKDKKAKEEEEKDIYKALTNTADVIKNGGYRSIAEAIMKDSEHFSDKISGRYKYRNIKEKDEKGKKKSDGKISENDILFPTEMFEDEVRKILGKQKEFYPQLTDESIDKIFDIIFSRRDFEDGPGNTDDENRPYKGFVDSIGNCPYYKNEKRGHRYTVIGDLFALANKLSQYKYVEKNTGEVVKLPRDLMRNIVNQSLQSGSITKTKINELAKELNIVILNTKTAKNENIADCIKYLKAVKPIFESYGFDWDKLISEEYTDQNSLLNRVGDTISFNITPKRRIDALNKIDELKGKDELIKKLSKQNFSGTAKVSDKYMIDAINAFFDGTLVGEFQANVQQDEFSVSIKTEKLLKLKPFDNNSEYAQNPVVFRAINETRKVVNAIVQKYGAPNAMNIEIASELNKSFDTRQKISTQQNKNEKERKNAIKQISLITGLDEREIRPQYIERYLLGELQGWRCMYSNEEITNKKEAILNKGKQYEIDHIVPFSRILDDTLNNKALVLARENQKKGARTPLMYLSAEKEKEFKQRVNKLFKGNKITEKKYRCFMLESLVGEDAEKILGDWKTRNLNDTRYIAKFLVKYFNDNLYFAREKGDDKRPVVYAVKGAITSSLRRQWLNKETWGRYDKGELKKITYFDHAVDAIVIANCLPAYVIIAAENHKLRDIYYSAGKIKTDEYRKSLDNCVDTLMKYYGMSPTVSRKLLEKVKETPSLLKNIRFEVEYRVRDYELMKYFFNYDTKVGKDTLDQIFRNDLYKIYDHQFADSIEMPIVSIKPERKYSGQMVKDGFIKKKDAISGKNSVKTIGENNSTVLNDSRFYCVDVYRTCNDETNLNFIKYTDLLKRNNHLYLRSDYRYPDDYAMHEMYLFYGDYIEITKKNKICCGYYFSLKNSSRNELYMSKGNTRRKLNNMKENEVCSITKKDTVKKFEIDILGKKLGEVKKCGEPLSLLPEKN

SEQ ID NO: 17838 - protein, 1022 aa, unidentified
  REGION 1..1022: note = Cas Enzyme sequence
LKNYLENIEFVSRAELSEFFAKNNHDIIDIRVRALDEMVTPVELTAALLHIAKRRGYKAFYELSDENNNAKDKKAKEEEEKDIYKALTNTADVIKNGGYRSIAEAIMKDSEHFSDKISGRYKYRNIKEKDEKGKKKSDGKISENDILFPTEMFEDEVRKILGKQKEFYPQLTDESIDKIFDIIFSRRDFEDGPGNTDDENRPYKGFVDSIGNCPYYKNEKRGHRYTVIGDLFALANKLSQYKYVEKNTGEVVKLPRDLMRNIVNQSLQSGSITKTKINELAKELNIVILNTKTAKNENIADCIKYLKAVKPIFESYGFDWDKLISEEYTDQNSLLNRVGDTISFNITPKRRIDALNKIDELKGKDELIKKLSKQNFSGTAKVSDKYMIDAINAFFDGTLVGEFQANVQQDEFSVSIKTEKLLKLKPFDNNSEYAQNPVVFRAINETRKVVNAIVQKYGAPNAMNIEIASELNKSFDTRQKISTQQNKNEKERKNAIKQISLITGLDEREIRPQYIERYLLGELQGWRCMYSNEEITNKKEAILNKGKQYEIDHIVPFSRILDDTLNNKALVLARENQKKGARTPLMYLSAEKEKEFKQRVNKLFKGNKITEKKYRYFMLESLVGEDAEKILGDWKTRNLNDTRYIAKFLVKYFNDNLYFAREKGDDKRPVVYAVKGAITSSLRRQWLNKETWGRYDKGELKKITYFDHAVDAIVIANCLPAYVIIAAENHKLRDIYYSAGKIKTEEYRKSLDNCVDTLMKYYGMSPAVSRKLLEKVKETPSLLKNIRFEVEYRVRDYELMKYFFNYDTKVGEDTLDQIFRNDLYKIYDHQFADSIEMPIVSIKPERKYSGQMVKDRFIKKKDAISGKNSIKTIGENNSTVLNDSRFYCVDVYRTCNDETNLNFIKYTDLLKRNNHLYLRSDYRYPDDYAMHEMYLFRGDYIEITKKNKICCGYYFSLKDSSKNELYISKGNTRRKLNNMKEKEACSITKKDTVKKFEIDILGKKLGEVKKYGEPLSLLPEKN

SEQ ID NO: 17839 - protein, 1094 aa, unidentified
  REGION 1..1094: note = Cas Enzyme sequence
MKYIIGLDIGIGSVGWAVVRNDDDCKRLEDFGVRIFESGEIIESNKNIRNSQRRRKYRGMRRRIRRRNHRKERLKNYLENIEFVSRAELSEFFAKNNHDIIDIRVRALDEMVTPVELTAALLHIAKRRGYKAFYELSDENNNAKDKKAKEEEKDIYKALTNTADVIKNGGYRSIAEAIMKDSEHFSDKISGRYKYRNIKEKDEKGKKKSDGKISENDILFPTEMFEDEVRKILGKQKEFYPQLTDESIDKIFDIIFSRRDFEDGPGNTDDENRPYKGFVDSIGNCPYYKNEKRGHRYTVIGDLFALANKLSQYKYVEKNTGEVVKLPRDLMRNIVNQSLQSGSITKTKINELAKELNIVILNTKTAKNENIADCIKYLKAVKPIFESYGFDWDKLISEEYTDQNSLLNRVGDTISFNITPKRRIDALNKIDELKGKDELIKKLSKQNFSGTAKVSDKYMIDAINAFFDGTLVGEFQANVQQDEFSVSIKTEKLLKLKPFDNNSEYAQNPVVFRAINETRKVVNAIVQKYGAPNAMNIEIASELNKSFDTRQKISTQQNKNEKERKNAIKQISLITGLDEREIRPQYIERYLLGELQGWRCMYSNEEITNKKEAILNKGKQYEIDHIVPFSRILDDTLNNKALVLARENQKKGARTPLMYLSAEKEKEFKQRVNKLFKGNKITEKKYRYFMLESLVGEDAEKILGDWKTRNLNDTRYIAKFLVKYFNDNLYFAREKGDDKRPVVYAVKGAITSSLRRQWLNKETWGRYDKGELKKITYFDHAVDAIVIANCLPAYVIIAAENHKLRDIYYSAGKIKTEEYRKSLDNCVDTLMKYYGMSPAVSRKLLEKVKETPSLLKNIRFEVEYRVRDYELMKYFFNYDTKVGEDTLDQIFRNDLYKIYDHQFADSIEMPIVSIKPERKYSGQMVKDRFIKKKDAISGKNSIKTIGENNSTVLNDSRFYCVDVYRTCNDETNLNFIKYTDLLKRNNHLYLRSDYRYPDDYAMHEMYLFRGDYIEITKKNKICCGYYFSLKDSSKNELYISKGNTRRKLNNMKEKEACSITKKDTVKKFEIDILGKKLGEVKKYGEPLSLLPEKN

SEQ ID NO: 17840 - protein, 1095 aa, unidentified
  REGION 1..1095: note = Cas Enzyme sequence
MKYIIGLDIGIGSVGWAVVRNDDDCKRLEDFGVRIFESGEIIESNKNIRKSQRRRKYRGMRRRIRRRNHRKERLKNYLENIEFVSRAELSEFFAKNNHDIIDIRVRALDEKVTPVELTAALLHIAKRRGYKAFYELSDENNNAKDKKAKEEEEKDIYKALTNTADVIKNGGYRSIAEAIMKDSEHFSDKISGRYKYRNIKEKDEKGKKKSDGKISENDILFPTEMFEDEVRKILGKQKEFYPQLTDESIDKIFDIIFSRRDFEDGPGNTDDENRPYKGFVDSIGNCPYYKNEKRGHRYTVIGDLFALANKLSQYKYVEKNTGEVVKLPRDLMRNIVNQSLQSGSITKTKINELAKELNIVILNTKTAKNENIADCIKYLKAVKPIFESYGFDWDKLISEEYTDQNSLLNRVGDTISFNITPKRRIDALNKIDELKGKDELIKKLSKQNFSGTAKVSDKYMIDAINAFFDGTLVGEFQANVQQDEFSVSIKTEKLLKLKPFDNNSEYAQNPVVFRAINETRKVVNAIVQKYGAPNAMNIEIASELNKSFDTRQKISTQQNKNEKERKNAIKQISLITGLDEREIRPQYIERYLLGELQGWRCMYSNEEITNKEEAILNKGKQYEIDHIVPFSRILDDTLNNKALVLARENQKKGARTPLMYLSAEKEKEFKQRVNKLFKDNKITEKKYRYFMLESLVGEDAEKILGDWKTRNLNDTRYIAKFLVKYFNDNLYFAREKGDDKRPVVYAVKGAITSSLRRQWLNKETWGRYDKGELKKITYFDHAVDAIVIANCLPAYVIIAAENNKLRDIYYSAGKIKTEEYRKSLDNCVDTLMKYYGMSPAVSRKLLEKVKETPSLLKNIRFEVEYRVRDYELMKYFFNYDTKVSEDTLDQIFRNDLYKIYDHQFADSIEMPIVSIKPERKYSGQMVKDGFIKKKDAISGKNSVKTIGENNSTVLNDSRFYCVDVYRTCNDETNLNFIKYTDLLKRNNHLYLRSDYRYPDDYAMHEMYLFYGDYIEITKKNKICCGYYFSLKNSSRNELYMSKGNTRRKLNNVKENEVCSITKKDTVKKFEIDILGKKLGEVKKYGEPLSLLPEKN

SEQ ID NO: 17841 - protein, 1095 aa, unidentified
  REGION 1..1095: note = Cas Enzyme sequence
MKYIIGLDIGIGSVGWAVVRNDDDCKRLEDFGVRIFESGEIIESNKNIRKSQRRRKYRGMRRRIRRRNHRKERLKNYLENIEFVSRAELSEFFAKNNHDIIDIRVRALDEKVTPVELTAALLHIAKRRGYKAFYELSDENNNAKDKKAKEEEEKDIYKALTNTADVIKNGGYRSIAEAIMKDSEHFSDKISGRYKYRNIKEKDEKGKKKSDGKISENDILFPTEMFEDEVRKILGKQKEFYPQLTDESIDKIFDIIFSRRDFEDGPGNTDDENRPYKGFVDSIGNCPYYKNEKRGHRYTVIGDLFALANKLSQYKYVEKNTGEVVKLPRDLMRNIVNQSLQSGSITKTKINELAKELNIVILNTKTAKNENIADCIKYLKAVKPIFESYGFDWDKLISEEYTDQNSLLNRVGDTISFNITPKRRIDALNKIDELKGKDELIKKLSKQNFSGTAKVSDKYMIDAINAFFDGTLVGEFQANVQQDEFSVSIKTEKLLKLKPFDNNSEYAQNPVVFRAINETRKVVNAIVQKYGAPNAMNIEIASELNKSFDTRQKISTQQNKNEKERKNAIKQISLITGLDEREIRPQYIERYLLGELQGWRCMYSNEEITNKEEAILNKGKQYEIDHIVPFSRILDDTLNNKALVLARENQKKGARTPLMYLSAEKEKEFKQRVNKLFKDNKITEKKYRYFMLESLVGEDAEKILGDWKTRNLNDTRYIAKFLVKYFNDNLYFAREKGDDKRPVVYAVKGAITSSLRRQWLNKETWGRYDKGELKKITYFDHAVDAIVIANCLPAYVIIAAENNKLRDIYYSAGKIKTEEYRKSLDNCVDTLMKYYGMSPAVSRKLLEKVKETPSLLKNIRFEVEYRVRDYELMKYFFNYDTKVSEDTLDQIFRNDLYKIYDHQFADSIEMPIVSIKPERKYSGQMVKDGFIKKKDAISGKNSVKTIGENNSTVLNDSRFYCVDVYRTCNDETNLNFIKYTDLLKRNNHLYLRSDYRYPDDYAMHEMYLFRGDYIEITKKNIIRCGYYFSLKDSSKNELYMSKGNTRRKLNNMKENEVCSITKKDTVKKFEIDILGKKLGEVKKCGEPLSLLPEKN

SEQ ID NO: 17842 - protein, 1095 aa, unidentified
  REGION 1..1095: note = Cas Enzyme sequence
MKYIIGLDIGIGSVGWAVVRNDDDCKRLEDFGVRIFESGEIIESNKNIRKSQRRRKYRGMRRRIRRRNHRKERLKNYLENIEFVSRAELSEFFAKNNHDIIDIRVRALDEKVTPVELTAALLHIAKRRGYKAFYELSDENNNAKDKKAKEEEEKDIYKALTNTADVIKNGGYRSIAEAIMKDSEHFSDKISGRYKYRNIKEKDEKGKKKSDGKISENDILFPTEMFEDEVRKILGKQKEFYSQLTDESIDKIFDIIFSRRDFEDGPGNTDDENRPYKGFVDSIGNCPYYKNEKRGHRYTVIGDLFALANKLSQYKYVEKNTGEVVKLPRDLMRNIVNQSLQSGSITKTKINELAKEFNIVILNTKTAKNENIADCIKYLKAVKPIFESYGFDWDKLISEEYTDQNSLLNRVGDTISFNITPKRRIDALNKIDELKGKDELIKKLSKQNFSGTAKVSDKYMIDAINAFFDGTLVGEFQANVQQDEFSVSIKTEKLLKLKPFDNNSEYAQNPVVFRAINETRKVVNAIVQKYGAPNAMNIEIASELNKSFDTRQKISTQQNKNEKERKNAIKQISLITGLDEREIRPQYIERYLLGELQSWRCMYSNEEITNKKEAILNKEKQYEIDHIVPFSRILDDTLNNKALVLARENQKKGARTPLMYLSAEKEKEFKQRVNKLFKGNKITEKKYRYFMLESLVGEDAEKILGDWKTRNLNDTRYIAKFLVKYFNDNLYFAREKGDDKRPVVYAVKGAITSSLRRQWLNKETWGRYDKGELKKITYFDHAVDAIVIANCLPAYVIIAAENHKLRDIYYSAGKIKTEEYRKSLDNCVDTLMKYYGMSPAVSRKLLEKVKETPSLLKNIRFEVEYRVRDYELMKYFFNYDTKVGEDTLDQIFRNDLYKIYDHQFADSIEMPIVSIKPERKYSGQMVKDGFIKKKDAISGKNSVKTIGENNSTVLNDSRFYCVDVYRTCNDETNLNFIKYTDLLKRNNHLYLRSDYRYPDDYAMHEMYLFYGDYIEITKKNKICCGYYFSLKNSSRNELYMSKGNTRRKLNNMKENEVCSITKKDTVKKFEIDILGKKLGEVKKCGEPLSLLPEKN

SEQ ID NO: 17843 - protein, 1382 aa, unidentified
  REGION 1..1382: note = Cas Enzyme sequence
MEHYSLGLDIGTDSVGWALVDENNDVIKKNGKHLWGVRMFDEASSAQNRRTFRNSRRRLNRRRQRIVLLQKIFFDEINKKDKTFFERLDDSFFKIEDKRNKNVNTLFCDKNYTDRDYKKEYPTIYHLRDALIKTDEPKDIRFIYLAFHHMIKYRGNFLKEGEEFEPSDISLIENFFAELNEELENRALALDEDNMAHDNYYQTIDTSKENFYTDLQNILLAKKGKKETKEDLIHLFGCNKKTFVQEAIAPLLSGSSVNLAKLTIVKEENHEKTEIDLSKEEYLANIEAACQNIPELSSLISLFEGVKMVRDHYELVSILGNHKFLSEAMKEIYESHNKDLAELKKLIKNYLPEDYNYCFRRTQTVIKKGKEHIEPINNYVNYIGFNDYRGKKERFGKIRQEDFYKFIKAELDKIKADEAQETIRNILDKIDKQTYMRKQNSASNGCFPMQLNLMEMDAIIKKQSEHYPFLSEEKDKILSILKFKLPYYVGPLNTSSKYSWVIKKTQDKIYPWNLDKVVDLDETAQKFIRRMQRKCTYLHGENDYCLPQESMIYSAYKCFSYLNKIYVNYKPIQISTKEKVFKDVFLKEKKPTKKSITVAIKAIEGTKEIAITHTEGKELEEVNCNMKSYILFSNLFGEKFEENKEMIEDIISDITLFEDKSILEKRLREKYHLDEAKIKEIKGYNFKDYGRLSKQLLVGFELTNNSTGEVFSNVIELMEKTTLNLQEILYNTEYNLMAEIDKYNKSVNADEATNDFKSYIDNYLYLSPIAKRSLIQSYEIIEELEKIIKHPIERYYVECTRTNQAKKNRVDSRYDKLKKLYTEVKNDADSFNVDMNKLKKQLDDNKDNLRSDKLYFYFTQLGKCMYSLKPIDLDKLISSNDTYDIDHIFPQSLIKDDSLSNRVLTEKSINNNRKSDKFLFETDILEPKCYKFYDMLLKKELISKEKYRRLTLKEISKNELDGFVNRQLVSTNQSVKGLIEVLKACKVNNTADIIYSKAEVVSDFRKDFDLPKSRLANNFHHAHDAYLNVVCGRVVDQYFKAHNYRDIKDYYHLKDQKITTNPQTIFKYDRYVNGSPLWKKEETIAKIKHYLYETFDVFETTRAYIGNELYSKVTIQPAGKGSYPVKVKENDPRKDTEKYGGFSDPSYTFYCVIKCKKKKNQIEYHYVSIPALYKNNIDAYLESKNYKDYEIVLNNLKINTVFKVGKLKFCVTGNTKGSYYIKNLLDRRFDYHSIVTIKKIEKYFDMVKRGNYLKREEDKIILSPARNEKCKEIALENQELEKLYQTIKTMFSKEIYSFSNIVNICGKLPECLNHLNIDDKVYTLNELLRLLKTNERGTADLTTINMSSTCGTLLFNGTIQPGTQIIAESVTGYYTKVLFEVK

SEQ ID NO: 17844 - protein, 986 aa, unidentified
  REGION 1..986: note = Cas Enzyme sequence
KKLLFDHNLLTDHSDLSGINPYEARVKGLSQKLSEEEFSAALLHLAKRRGVHNVNEVEEDTGNELSTKEQISRNSKALEEKYVAELQLERLKTDGEVRGSINRFKTSDYVKEAKQLLKVQKEYHQLDQSFIDTYINLLETRRTYYEGPGEGSPFGWKDIKEWYEMLMGHCTYFPEELRSVKYAYNADLYNALNDLNNLVIARDENEKLEYYEKFQIIENVFKQKKKPTLKQIAKEILVNEEDIKGYRVTSTGKPEFSNLKVYHDIKDITASKEIIENVELLDQIAEILTIYQSSEDIQEELVNLNSELTQEEIEQISKLTGYTGTHNLSLKAINLILDELWHTNDNQMAIFNRLKLVPKKVDLSQQKEIPTTLVDDFILSPVVKRSFIQSIKVINAIIKKYGLPNDIIIELAREKNSKDAQKMINEMQKRNRQTNERIEEIIRTTGKENAKYLIEKIKLHDMQEGKCLYSLEAIPLEDLLNNPFNYEVDHIIPRSVSFDNSFNNKVLVKQEENSKKGNRTPFQYLSSSDSKVSYETFKKHILNLAKGKGRISKKKKEYLLEERDINRFSVQKDFINRNLVDTRYATRELMNLLRSYFRVNDLDVKVKSINGGFTSFLRRKWKFKKERNKGYKHHAEDALIIANADFIFKEWKKLDKAKKVMENQTVEEKQAESMPEMETEQEYKEIFITPHQIQHIKDFKDYKYSHRVDKKPNRELINDTLYSTRKDDKGNTLIVNNLNGLYDKDNDKLKKLINKSPEKLLMYHHDSQTYQKLKLVMEQYGDEKNPLYKYYEETGNYLTKYSKKDNGPVIKKIKYYGNKLNAHLDITDDYPNSRNKVVKLSLKPYRFDVYLDNGVYKFVTVKNLDVIKKENYYEVNSKRYKEAKNLKKISDQAEFIASFYNNDLIKFNGELYRTIGVNNDLLNRIEVNMIDITYREYLENMNDKRPPRIIKTIARKTQSIKKYSTDILGNLYEVKSKQHPQMIMKG

SEQ ID NO: 17845 - protein, 1514 aa, unidentified
  REGION 1..1514: note = Cas Enzyme sequence
MEEKGITLGLDMGTNSLGWAVVDNSTNDLVSYHGHPMWGVRMFSESSPAEDRRKKRGARRRYQRRRQRILLLREIFQKEICDKDPYFFYRMDQAFYVSDDRTDEGKGYLLENQKATKDFYNKYPTIWHLRYDLVTNKEKKDIRLVYLAIHHILKYRGNFLHEGDIKLSAKPNDELNMFISCISSTYEGNFEKEEDDDNANWDKYFVVEQINNDKFIDSLISIIDNYLDRFKKLTKVVDPSKKRYELFADELIQLVGEPKNILTELLPDALFKGTVDLSKNRIYKEIYKNQIDLDKKDLKIIFNSDDFENKISNLSSKLKEISPLIEGLIYLKSIYNNYYFKDFMKGSSSLSEAFIKKYNENKEDLKNLKSYYDKYLSDKKNSMFRDNKVNNNFVNYIGHYSPNEKNPDGKSWSEGEIIKIEKKKSDYSEFLNKLKEDLGDPSKKDPEAQKEADGFLKKIEDNTLLQRLNNASNSVIPMQFNKKELVAIINNQKEYYPDLFTDSNISHIEQIFSFKREYFIGPIDFDKNNKSKFSWVVQKETALSKKQKIYPWNFYDVVDKKETQKNFIQRMLNHCTYLKGENDYCIPSSSISYQAFVCLQYVNKLRDSNNNLISVDAKQQLFKDLFLNNKTVTAKEIKEWMYQHKLGNTASIPTCNCNMSTYISFKNLNKYKKYEFLRLEQIKEIDEIVKLMMIFSDKETRNDILKNDYHFDDEDIKQIKGFNYKNWGRLSDRFLNGIKIEYNDEESNEHREYNSLNNVLWFTNFNLNEILFNSKFNFHDEIEKYNENQNIDFKESDDDFLKNWMEKNACVSPIWTRSFVQTYKLIKEVNELLKEEGKEISYYSVECTRENKPDKKGKETCSRYDRLLNIFKDKGFNKEARDQGVNVSTLIKSLQDNKDSINNSDHFLLYFQQLGKDMYTLEPITDLDEIGTNKAYDIDHIYPQSILKDDSISNRVLTKSTINRDFKKNKFLSDPDCLLKLPKEAFSFYKFLFDNSLISRTKYNRLTEKEIHVDSLESFINRQKVATDQSTKAIIELLKFLETNKYCERNNEMSRDEARKEAEKHIIYSKAGIVSDFRKRYQIYKSRIANNYHHAHDAYLNAMLGKTLKDYYDDKKIYLFGDELKRRIQKDGEYTINPDNILSERIRESNDHRVIWGGMKEIDFIKNNIQNNFDIRETMYTYYGNTLIGEETVEGKKGKGKETIKSLTPNGNRMDLEKYGGYKQASYPFFYLIKKNNDEAMICPVNSFYKDDSKIDRFIEENFFTEKEIMKSKASNKPLFTKKLKLKINTVILSPKDDTQHLRKMYLKSVDAFPNRLKVTNAFDRNFNAKDMKTIHMITKFLKVFETNKNRIDVNEKQELIIKSAQDCVISRKDLSDLYQHILDMWNKNLYFCESVQTVSEKVQYNFGPWFNGSASFGNKEDIIKDYLNKIYALNEMLNFLQTNTSFKIKIKKDYLKADKKDDEKNSKSKEETNVGKMTISNKLCKGMRIVSYSITGFKTKLLYKQEETNKVKK

SEQ ID NO: 17846 - protein, 1058 aa, unidentified
  REGION 1..1058: note = Cas Enzyme sequence
LKKIEDNTLLQRLNNASNSVIPMQFNKKELVAIINNQKEYYPDLFTDININHIEQIFSFKREYFIGPIDFDKNNKSKFSWVVQKETALNKKQKIYSWNFYDVVDKKETQKNFIQRMLNHCTYLKGENDYCIPSSSISYQAFVCLQYVNKLRDSNNNLISVDAKQQLFKELFLNNKTVTAKEIKEWMYQHKLGNTASIPTCNCNMSTYISFKNLNKYKKYEFLRLEQIKEIDEIVKLMMIFSDKETRNDILKNDYHFGDQDIKQIIGFNYKNWGRLSDRFLNGIKIEYNDEESNEHREYNSLNNVLWFTNFNLNEILFNSKFNFHDEIEKYNENKYIDLKESDDDFLKNWMEKNVCVSPIWTRSFVQTYKLIKEVNELLKEEGKEISYYSVECTRENKSDKKGKETCSRYDRLLNIFKDKDFNKEARDQGVNVSTLIKSLQENKDSINNSDHFLLYFQQLGKDMYTLEPITDLDEIGTNKAYDIDHIYPQSILKDDSISNRVLTKSTINRDLKKNKFLSDPNCGLKLPKEAFSFYKFLFDNSLISRTKYNRLTEKEIHVDSLESFINRQKVATDQSTKAIIELLKFLETNKYCERNNEMSRDEARKEAEKHIIYSKAGIVSDFRKKYQIYKSRIANNYHHAHDAYLNAVLGKTLKEYYDDKKIYLFGDELKKRIQNDGEYTINPDNILGERVRESKDHHIIWGGIKEIDFIKNNIQNNFDIRETMYTYYGNTLIGQETVEGKKGQGKETIKSLTPNGNKMDLKKYGGYKQASYPYFYLIEKNNREAMICPINSFYKDDSKIDRFIEENFLKKDKKNTDKGKPLFKKILKLKINTVILSPKDDNKHLRKMYLKSVDSFPNSLKICNAFDRNFDAGDMKTIHMITKFLKVFETNKNRIDVNEKQELIIKSAQDCVISQKDLSDLYQHILDMWNKNLYFCELVQTVSEKVQYNFGPWFNGSVFYENKEDIIKDYLNKIHALNEMLNFLQTNTSFKIKIKKDYLKADKKDDEKNSKSKEETNVGKMTISNKLCKGMRIVSYSITGFKTELLYKVKEKKEKVKE

SEQ ID NO: 17847 - protein, 1386 aa, unidentified
  REGION 1..1386: note = Cas Enzyme sequence
MKKYSIGLDLGTNSVGWAVVDEQNQIVKKNGFTLWRVRMFEEANSAADRRMYRGSRRRLQRRKFRIKLLQDEFYNEIIKVDSTFFQRLNDSFYKIDDKILNNKYTFFDDHLSDIDFFERFPTIYHLRNYLMNSNKKEDIRMIYLAIHHIIKYRGHFLNETENYDIEDSHGIIQIFKELNLVLLEFRNQFEDNEEYFSSIQNMENEENILKLIQIINSYKSKREKIFDICSLFNVEKKTLVSELVIPLILGSKVNISSLSILKEQKLEKQEIMLDDLNLEENLNNAKLLCPDLLLIFDFIPLLKELTDTIYLRKLIGESTTISEAMIKIYDNHKKQLSTLKCFIKKYCPNKYYECFKKVDVKLNNYPKYIGMNQTNSSKNSKGKRERFSHCTVDEFYSYLKKILESVTSDEAIKEKQAILLEIENNNYLLRQNSSHNTIFPMQLNLKELKEILFKQSEFYPFLTEMNGDLTRIERIISIFKFKISYYVGPLNKNSDYGWVIRKDEKIYPWNYESVIDLDTTAMKFIQRMQNKCTYLHGYDDYCLPKKSLLFSEYNCLQYINKIKINGSEITKAIKEDLFENIFLKIKKPSKKQVVSYLQSNYELSEYDKLSISEVNCDMSSYITFKQLFGNQFERNIAIIEEIIKDITIFEDKKILEKRLREIYSLNDELVQNIKGLNYKGYGALSKKLLTQIYRTDDNGEKISDSIIEIMRKTNLNLQQIILGEEYHYIEIIDDYNNSLYKDDELNVINFIDDNLYVSPIMKRTLIQAYNIIEEVEKILGTKLDEYYIETSRTNKIRKQASNSRYETLKELYQECRKVSAELNNYNISANKLNELSKKLEEQKNSLRSEKIFLYFMQLGKCLYTMEDIDIDQLLKDDYDIDHIYPQSVIKDDSFSNKVLTKKTFNQNTKKDKFLFELDYKRPSNLFAFYDTLLNLKLLTKEKYRRLTQKEMTKGELDIFVNRQIVATSQSTKSLIELLKNFKGVESSKIIYSKAENISDFRQEYDILKSRIANNYHHAHDAYMNVVIGRTLNNYYKWHGLYGNNDFLSFRNNKYTINPMTILSKDRIITYKGLKKVIWDKDNTIKLIKKNILNRFDINETIRTYNSNEMFKKVTIQPAGLGEHIPTKTSTPAKDVTKYGGITSHSYCQYALLETVDKKGKKEYILEAIPRMYKEHLSKYIQEKFINSKIISTKIVIENIKTNVVIEYDKLKFCITGKTGSDYLIKNLKDRNFSYDAIKIIKKIDKYNENIKFNNYMEVSEEKVTINPSLKNKNIEISKDECYKLLNEIKSIYSKNIYAYSIIQEIVKSMDDLSSNSTIKDLIELTSELLKLLKTNERATADLRLIGKSKDSGTLKITKKLKPGYKFISESVTGYYKKVIFEVPNVV

SEQ ID NO: 17848 - protein, 1257 aa, unidentified
  REGION 1..1257: note = Cas Enzyme sequence
MKKNYILGLDLGLASIGWAAMEINEEGDPIKLLDANSVIFTSLDNDNGKLYNVERREKRGSKRVRRRKVNRIKTIKKFIIDNNILKEIELKNLFKGTLEDIYLIRLKGLKEQLSNFEIARLMIYYAKNRGFKSNKKSEDNLIKKIDLKKDTKEENNEKKLKLAIAKSMKYIEEGGLSPVEVINKIREENDILKFRNESGVYKFGFTRKQIETEIREIFMNQNILTNEIVEKYLKIWGSQRDFSDGPGGDSEYKVDFRNISGKCIYTGEIRAVKASPSSEIFVLLQKLNDIRYYEEVEENYKNEYKKLSVDNIKNILLKAQNGKKINYELLSKELNGQNIKFKDLPDLPKSKWKEYREKIQDVEEFNKKIFNERMKIEILKDGLKNFKKLKVEFKNNGISNEKIEELGGIDFLDIVAELLTYSKTDNKLIKYIENDERYKFLSKYPEVIEAMKNMSTYSGNMNLSLTAIKKLNSKMLEGKDYYDSRKDLGYFNTKEVYWEKFPTINEIEDVLNISITNVNVKHVLVQLRKLYNTLLEKFGKPSKVHIELAREMSKDFSERKKIKDKQLERYNEKQIAKFELFSENKDIINKNDLSNEAFLRFNLWKEQDYKCIYSGKYIPREKVLSYELEVDHILPYSRTRNNSYFNKVLVYKEENQNKKEKTPFEWLGNNELKWKEFKNRVENLKITEIKKRNLFRKDSVEVEGFLERELHATSYVSRLSYTIFNKMIDPSEKYLVNEDGSIKEERYNDNVAAYNGSITSQLRKSYGLNKFTHNLENSNLIRDVNYRFNDIKIEINDKDNKYTLIFEIYDEIFRIYSEIKYTTNYNKKDKMFKTNKDESMYRFIVKLSENEKFYSEFKDIVFNWKLEKISKNDINSLNIKFENELLEDEVIDDNVKAVIWGLLSNIKNRVNIKNRDNHLHHALDATLLTIMNKKMQNKLLKYNQLLMKKSNKDEKLEDEINKLLIDGVVEEKESDGLKFNIYNKEIKLCLKYPYLDFENDILKIIFDKINGKLPYHVPIKNTKGALHAETILGKSKGKITKRINISELKLKEGKIDKEIFDKEGSQKEVYEVLFKWLKDKKSYTPILKNGNIIKKVKIVVSDKVIEIGNKRYVEMGQTITKILVFRKKNKKGESKLYFSSLGRFRYNQMLKGVDINILLFPNEEKSEIKYSELKDKGYEKYLEIKPHNCYKIKFKDKREVKCKITGYTNGLLEIKSIIGDGLDLIKNGIERTKDNRFRPNVNKIDSIEELKYDILGD

SEQ ID NO: 17849 - protein, 1112 aa, unidentified
  REGION 1..1112: note = Cas Enzyme sequence
GWAVIRNDDYKRIEDFGVRLFESGESNNGKDRSSQERRGFRSARRLIRRRSHRKYRLKKHFEVIGLISEADINKYYEGCSPHPLYFREKGLTEKLSPEELAAALIHICNRRGYQDFYEIDEKQLKAMSPSEQKEYKQECEGIEKIRALMERGGYASVASLLLHDPVFNPNGSQNPDYRNHAYKEDRYPIARNLLRKEVRDILTCQQKWYPCLSADAQDKIMHIIFDQRAFEFGPGDVDDKMRKYTGYLDQLGECQYYHEPRGFRYTLLADIYALINVLSQYRFTVNATNEPILLAETAQELVSFAVENGSMAIKDVQRIAKAHGQTVNTKPSEGKIEPITQCMKYCRVIKPLLEAEGFDWSSISMQSILSDDDNSLLYRIGETISKYQTPRLRIEQLKIIPGVSDSLAKAIGSKKTSGTVKVCPRYMKDAIEAFLRGDIYGNFQARIIKEQDTQTYDRNNTLYTLPTFKNDAEFANNPVVFRSINKTRKVINAIIRKYGSPAAINIEVASDVGRSYAERGEILKAQAENEKATLNAKKAVAELLSCDLDDVNARMIECYKLGESQAWICPYCGRPIEKHIALRPDDRAYEIDHIVPFSLILDNTLHNKCLVCHACNQRKGQRTPLMYMTGDNRDAFLARINTALKNKQISERKYKYLMLDNLYDSILQEWKSRNLNDTRYIAKYLVRYLTETLKFDSDAARPVFAVKGVITSRFRKQWLNSSTWGLEDKDTKRKESHLHHAIDAVVIANCTPAYVELAMDNMRLYQIRKRANGKETDEYREYLANSIKKMQKYYHMSPGKAEEMLRYSRKAPTLVPQLREEVDVRFNTEDEALRRDRVAELYRYDPAFAKAVQKQPPLVSYKPNRKADGMITTSNAVSVRIIDGEKKQIVRKKIEDLTIKDLDKLYTNDSDLRDSLAEILLRVPSGKKLGDLLKDENKTAFKTHLGHTVHKVSLIDDAPSRSITKEISENNHSVLPSNSYYCVEIYEDIDGKTRLRGITFGELKNVGGKLMLTSELPQGYKEHKMYLFKNDYIIIWNKNGIKKFEGFYKSVKALTEKNKLLYCTEGCKPQSNTSIKSISLTDTVEKYDVDILGKIGGKITCGEPLSSVKEKN

SEQ ID NO: 17850 - protein, 1068 aa, unidentified
  REGION 1..1068: note = Cas Enzyme sequence
LFLTEIGFLTNDEIKKAEENFTADIIPLKVRAIKEKISKSELLNCLIHTCNHRGYKDFYEIDEDEIEDEDEDEEQGNIAAASSFDKNFRKSGCTIVSEYLMKNYKVSDGKINFRNKDHKEDERIIIRRKHMEKEIETILEKQSEFYNELTEENRKNIFEIIFRQRAFEDGPGQAGNSYRRYKGFIDSIGRCRFYPEENRGFRNTVIGDLFAGINALSQYRYVNKETGEVGLTPEIAKILIDEILKKGNLNNTEAEKILKKENIEIYGSEDVDKTLTSSFKYIKVIKKITDEAKINWNTLISENQFEYEENKMSLLNKLGCILSCWQTPSKRSGKLKEFIKNHPKGNLFNDEVLEKLMKKKISGTSNASYHYMSEAVQAFLEGKIYGDFQWEREEKLLNKQIENNNIKVPVSALKNNVDIADNPVVYRGINETRKIVNAIIDVYGMPEYINVEFAKDVAKSFDARKKEGERQKENIKKNEKIVKEIAKKLGIEETDVRGTQIERYKLYKEQECKCMYSGEPLDLRKVLSDKDRSYEVDHIIPYSLILDDTLANKALVLGSENQIKKQRVPLMYLTGKKKEDFLKNVEAFSTRKANPISAKKREYLLMPTIYGKEIQEKLKDWKSRNINDTRYITKFMIALLKSTLIKENENGEKLPHVYGIRGHITSRFRKKWLGKNWGNEEKPRESYLNHAADAVVIACLTQDDVRITMEYEKLRQMYRHKKWMNNDNYREALFRVAGQLKMFSKKSKEEIVDILLDRNFSTSIIPNLYKEVDVRFGPVEGDKRTEEEFRIDINNYYSGTEDFIVKPHLSHVSKKQTKRFRGAFADSNPIRLIDEEGKKRKILRKSIKVIKRKDLKNLHTNDTSLIEALNKVFEGKKDGYTVEKYMKENNLKEFCTAGGQKVYKVSVRCPKVSNYYKKQIDGKNFSILGIRKYYCAEVYEDNKGKTRTWGLRYVDMVKRECKLYLKDNVLPKDYVKHVTYLFKGDYIVVYKKDEKIFEGYYKSVEAINNNRFNGFGGNNSKSIGLSIGSNCRVEKYQIDLLGRKCGRIDESRGDYPCFVPLSSKKKKS

SEQ ID NO: 17851 - protein, 1140 aa, unidentified
  REGION 1..1140: note = Cas Enzyme sequence
MEKRQYRFAFDIGIGSCGWAVVSENETGNRRIEDAGSRIFDSGEMKEGKDRKSQKRRGFRGVRRVLRRRSHRKYRLKNYLRYVHFMTDMEIRCVSEASMNQILPVKVRGIDEKLTKAELLQVLIHACNHRGYKDFYEVTETDEAESLEEEDEKINQAAADRLDRLFEESHCRTISEYICRYCTIPGTDRIDYRNRFYKNENRMIIRRKHVENEVCTILKKQREWYPELTDQKIKEIMEVIFSQRDFEDGPGDASDKYRRYTGFLESLGYCRFYPEERRGFRNTALGDVYAAINALSQYRYVHTDTGEAKLTQEAAAKMVSYILKQGRLTRTQAAKLLKPLGIAIYGSKDVDKTLAKSFRFLKEMRKIAEKCQVSWESLLSETDLTEYEEGKTSLLNQLGTVCSMYQTPHRKEEELKKLHAKWEHVHLPPAFWNALKRHKFNGTSSVSYHHMADAIEAFLKGDIYGNFQWNKQKQLDEKQESQRERLLSAKILMQDEDVKDNPVVLRSINETRKVLNCLIRLYGAPAEIHVEVADDVARSYLERKRIQKMQRDHEKTRDAIKKKIAEILHCEESEVKGSQIERYKLYMEQEGKCLYSGRELDLEMVLDTQSHAYEVDHIIPYSLILDNTLANKALVCGNENQAKGQQTPLMYLKGEKKEAFIERVKAEKKRTSHPISNKKYDYLMLATLYGKEAKEILTGWKSRNINDTRYITKYVVGLIKNHLQFAGEKARVFGIRGHITSRFRKEWLGKNTWGSDEKCRANYLNHAADAIVLANLSKMDVEIAMDYEKLRQIRRHYGEMSIQYDHFLNHAAQRIAAFYPITEEAIRKQLVESKRTPSYVPNLGREVDLRLGNPEGETRSEEEYRAETEMYYEGAAFVVRSHLPYVSMKVERKFRGEIADSNPIRLVEENGIQYKISRSKVEELKREQLPKLYTSDGYLIEALEKAFENKDVKTVKDYMEKEHLDVFRTTNGQPVRKVSIKGMPVSNYYKKRINETNYSILGVPKYYCVEVYTNSKGQTKIWGLRFVDMISYEGKLYLKDGVRPADYARHGMYLFPGEYIEVEKRGKIVYEGTYQNVYSINQGVLRIKVKNTNALKPISIGNKAGVFKYAISLNGCKSGAVKEGEAGYPCFAHCLSKKEN

SEQ ID NO: 17852 - protein, 1159 aa, unidentified
  REGION 1..1159: note = Cas Enzyme sequence
MEKRQYRFAFDIGIGSCGWAVVSENETGNRRIEDAGSRIFDSGEMKEGKDRKSQKRRGFRGVRRVLRRRSHRKYRLRNYLRYVHFMTDMEIRCASEASMNQILPVKVRGIDEKLTKAELLQVLIHACNHRGYKDFYEVTETDEAQSQEEEDEKINQAAADRLDRSFEESHCRTISEYICRYCTIPGTDRIDYRNRFYKNENRMIIRRKHVENEVSTILKKQREWYPELTDQKIKEIMEVIFSQRDFEDGPGYASDKAEYRRYTGFLESIGYCRFYPEERRGFRNTVLGDVYAAINALSQYRYVHADTGEAKLTQEAAAKMVSYILKQGSLTRTQASKLLKPLGIAMYGSKDVDKTLVKSFRFLKEMKKIAEKCQVSWESLLSETDLTEYEEGKTSLLNQLGTVCSMYQTPHRKEEELKKLYAKWEHVHLPPAFWNALKRHKFNGTSSVSYHHMADAIEAFLKGDIYGNFQWNKQKQLDEKQESQRERLLSAKVLMQDEDVKDNPVVLRSINETRKVLNCLIRLYGSPAEIHVEVADDVARSYLERKRIQKMQRDHEKTRDAIKKKIAEILHCKESEVKGSQIERYKLYMEQEGKCLYSGRELDLEMVLDTQSHAYEVDHIIPYSLILDNTLANKALVCGNENQAKGQQTPLMYLKGEKKEAFIERVKAEKKRASHPISNKKYDYLMLATLYGKEAKEILTGWKSRNINDTRYITKYVVGLIKNHLQFAGEKARVFGIRGHITSRFRKEWLGKNTWGSDEKCRANYLNHAADAIVLANLSKMDVEVAMDYEKLRQIRRHYGETSIQYDHFLKNAAQRIAAFYPITEEAIRKQLVESKRTPSYVPNLEKEVDLRLGNPEGETRSEEEYRAKTEMYYEGAAFVVKPHLPYVSMKVERKFRGEIAKSNPIRLVEGNGIFYQVSRKPVEELESKDLSELYTSDGYLIEALEKAFTEGEKYLNNEDDKENKKDSQKKPIKKYMEKEHIDVFRTTNGQPVRKVSLKGTPVSNYYKKSINETNYSILGVPKYYCVEVYTNSKGQTQIWGLRFVDMISYEGKLYLKDGVRPADYARHVMYLFPGEYIEVEKKGKIVYEGTYQNVFNINQGKLRIKVKNTNALKTISIGNKAGVFKYAISLNGRKSGVVKEGEAGYPCFAHCLSKKEND

SEQ ID NO: 17853 - protein, 1140 aa, unidentified
  REGION 1..1140: note = Cas Enzyme sequence
MEKRQYRFAFDIGIGSCGWAVVSENETGNRRIEDAGSRNFDSGEMKEGKDRKSQERRGFRSVRRVLRRRSHRKYRLKNYLRYVHFMTDMEIRCASEASMNQILPVKVRGIDEKLTKAELLQVLIHACNHRGYKDFYEVTETDEAESQEEEDEKINQAAADRLDRSFEESHCRTISEYICRYCTIPGTDRIDYRNRFYKNENRMIIRRKHVENEVCMILKKQREWYPELTDQKIEKIMGVIFSQRDFEDGPGDVSDKYRRYTGFLESLGYCRFYPEERRGFRNTALGDVYAAINALSQYRYVHTDTGEAKLSQEVAAKMVSYIMKQGSLTRTQAAKLLKPLGIAIYGSKDVDKTLAKSFRFLKEMKKIAEKSQVSWESLLSETDLTEYEEGKTSLLNQLGTVCSMYQTPHRKEEELKKLHAKWEHVHLPPAFWNALKRHKFNGTSSVSYHHMADAIEAFLKGDIYGNFQWNKQKQLDEKQESQRERLLSAKVLMQDEDVKDNPVVLRSINETRKVLNCLIRLYGSPAEIHVEVADDVARSYLERKRIQKMQRDHEKTRDAIKKKIAEILHCEESEVKGIQIERYKLYMEQEGKCLYSGRELDLEMVLDTQSHAYEVDHIIPYSLILDNTLANKALVCGNENQAKGQQTPLMYLKGEKKEAFIERVKAEKKRASHPISNKKYDYLMLATLYGKEAKEILTGWKSRNINDTRYITKYVVGLIKNHLQFAGEKARVFGIRGHITSRFRKEWLGKNTWGSEEKCRTNYLNHAADAIVLANLSKMDVEIAMDYEKLRQIRRHYGETSIQYDHFLKNAAQRIAAFYPITEEAIRKQLVESKCTPSYVPNLGREVDLRLGNPEGETRSEEEYRAETEMYYEGAAFVVKPHLPYVSMKVERKFRGEIADSNPIRLVEENGIQYKISRSKVEELKREQLSKLYTSDGYLIEALEKAFENKDVKTVKDYMEKEHLDVFRTTNGQPVRKVSIKGTAVSNYYKKSINETNYSILGVPKYYCVEVYTNSKGQTQIWGLRFVDMISYEGKLYLKDGVRPADYARHVMYLFPGEYIEVEKKGKIVYEGTYQNVYNINQGVLSIKVKNTNALKPISIGNKAGVFKYAISLNGCKSGMVKEGEAGYSCFAHCLLKKEN

SEQ ID NO: 17854 - protein, 912 aa, unidentified
  REGION 1..912: note = Cas Enzyme sequence
VTWRKERRTPSNREFLEWLIFRQRDFEDGPGDCDDVMRKYTGFLQALGKCPFYRSENRGPRMTVLGDLYTLVNSLSQYRYLNTKTSELGLPKALAQELLENALKDAALSADKIKELAKKYNIKIDNKSVKTADRAPNCIKFMCRVRPVLEKYNIDWVSALGGTSLEDVLDEGTMLNQIGRVLSLYQTPHRRKEELMKISGVSQDLAERLTAIRLSGTAKVSAHYMQDAVKAFQLGERYGEFQWKKMNELEQALTGQARGVHVKLPPFSADAEFAKNSVVMRSLNETRKVINAIIGKYGSPWAINVEVASELGRSWAERAEWDKKNKQNWAQSEKEKKRICEIMGYDSPDQVKGSMLERFRLAEQQNWQCLYTGKPITDKRAALDPKNYNFEVDHIIPFSLILDNTLQNKALVCADANQTKGQRTPLMYLHDAAQWEQFIGRVNQMAKNHIISDRKRQYLLLDQLENSQLLDEWKSRNLNDTRYIAKYLRGYLERELAPAAEHRTPFVFPVKGGLTSRFRRVWLDKETWGGENKENLRDITTLHHAADAVVIANISPATALIAEDNMRLNRILKNDRGRQTPEYCAQLERSLQTLEQYYHIPRAKAEAYLKRQNRISARIANLNIEVNIRFGKPGEEMDLDTYRSNVLHYYHDDAPFAANLIPPLTSRKQERKIQGCLTTGNALGTMTVDGELYEAERIDVMKLTQKDLPRLCTNDGDLRDSLMELLATAGDKPLKDVLPKQSENEFRTQKGRLIRKVTLKGKQLSQYKIKQIAENNYSVLDTTKYYCTEVYRDTVGKTKVRAIARADLVRRDKKLWLTCPYPADYAEHIMYLFKNDYIRVETPNGLQFEGFYQSLAGIKQAKFSGMEKNASKSRQFSISGIATVTKYDISILGKKGGEIPCGEPLSLLPEKK

SEQ ID NO: 17855 - protein, 1180 aa, unidentified
  REGION 1..1180: note = Cas Enzyme sequence
MMFTLMDIDKLTHQKSKFKIIIAAQKMIVNGKGVQIMRYVLGLDVGIQSVGWAVVRCDEPARIEDFGVRVFDTTENPKSKDNANQNRRAFRSARRVLRRRSHRKEMLKKHLEKIGLLHEGEVEAFFESGRADPLRLRVKGLTEQLAPAELAACLIHISNHRGYQAFYNLTEEELTDLPASEKKEYQQELSGIEQVTSIMEQGGYRSVAEMILNDEAFAPEDAGPMRSYRSHPYKEIRYPISREMLKKEADEILRVQAEFYPCLNEPYQVTWRKERRTPSNREFLEWLIFRQRDFEDGPGDCDDAMRKYTGFLQALGKCPFYRSENRGPRMTVLGDLYTLVNSLSQYRYLNTKTSELGLPKALAQEFLENALKDAALSADKIKELAKKYNIKIDNKSVKTADRAPNCIKFMCRVRPVLEKYNIDWVSALGGTSLEDVLDEGTMLNQIGRVLSLYQTPHRRKEELMKISGVSQDLAERLTAIRLSGTAKVSAHYMQDAVKAFQLGERYGEFQWKKMNELEQALTGQARGVHVKLPPFSADAEFAKNSVVMRSLNETRKVINAIIGQYGSPWAINVEVASELGRSWAERAEWDKKNKQNWAQSKKEKERICEIMGYDSPDQVKGSMLERFRLAEQQNWQCLYTGKPITDKRAALDPKNYNFEVDHIIPFSLILDNTLQNKALVCADANQTKGQRTPLMYLHDAAQREQFIGRVNQMAKNHIISDRKRQYLLLDQLENSQLLDEWKSRNLNDTRYIAKYLRGYLERELAPAAEHRTPFVFPVKGGLTSRFRRVWLDKETWGGENKENLRDITTLHHAADAVVIANISPATALIAEDNMRLNRILKNNRGRQTPEYCAQLERSLQTLEQYYHIPRAKAEAYLKRQNRISARIANLNIEVNIRFGKPGEEMDLDTYRSNVLHYYHDDVSFAANLIPPLTSRKQERKIQGCLTTGNALGTMTVDGELYEAERIDVMKLTQKDLPRLCTNDGDLRDSLTELLATAGDKPLKDVLPKQSENEFRTQKGRLIRKVTLKGKQLSQYKIKQIAENNYSVLDTTKYYCTEVYRDTAGKTKVRAIARADLVRRDKKLWLTCPYPADYAKHIMYLFKNDYIRVETPNGLQFEGFYQSLAGIKQAKFSGMEKNASKSRQFSISGIATVTKYDISILGKKGGEIPCGEPLSLLPEKK

SEQ ID NO: 17856 - protein, 1109 aa, unidentified
  REGION 1..1109: note = Cas Enzyme sequence
MRYTLGLDIGITSVGWSVLDLDREKIEDLGVRLFPGAENPKDGSSLAEARRLARGARRSTRRKQRRMKDIRKLLVSNGVLTQDAMDIVSKTVGEHTPWEYRVEGLDRLLKPDEWTRVLIHMAKRRGFKSNRKEAPEGVQKVDKKDDESKMKAGVAENSLILKTGNNGKGYRTVAEMFVMDPKFGEHKRNKDGQYINTVLRAEIEAEVQELFKRQRSLGNPFAGEDLEKTYLEIFNRQLPFASGDIIEKMVGYCTMEPEELRAPKASWTAERFILLSNIRNMRVVVDGRTGELGPEKSAKLLQYCYDHTKVTYKQIRNLLDPAPKKSKKKGQPEEQQPQQASNWHFAYIPAAKKKVSRKKAADKETENPQAENTQGYDPEEATFAELKAFHEFRKAVTKALGEKYWTDLTANNPRVMDDLAFALTFRKNEEDIRNCMAERNVPKELIEAVIGLNFKGTVNLSLKAMTKLIPFMEEGSDFTEACGQAGYSSFDPRSGSNRSILLPVPDQGRVRNPVVFRAITQTRKVINAIIREYGSPERVQIELAKELAKPIEVRKAIKERNDENYRQKQILRNEFENSFSHRPSDSQLEKYRLWKEQDGYCPYTGKKISLDELFSVKGGTYADIDHIVPYSRSFDNSWTNKVLVMTHANRDKKDMTPYEYFGQDSEQWNTFLKNVEKYIPDKSKARRLMTKDRDFDEIKLRCLNDTRSITKYVADWIESSLVFSDPEIRNPVVRINGQATATIRKQWGIESCKRRDESDLHHALDACVVAAATPAIIDRISQYSADNELGKLREEDPTDSRKRLPEPWKDFAREVRARISEDPAGLIKSYGITSYTEEELQELRPIFVSRMPDRKAHGEVHEATVRSLRYADEGKGTVVKVPLKKIKLKRLENMVGKEKDKILYEALQKRLNEYADEPTKAFAEPFYKPSKKGQPGNLVKSIGLFDPSVSGLKIREGMSANGNGSMVRISIFRKDGKHYVVPYYIEDIARKRTRMHAIVAGKPESEWLEIDNTYEYMFSLFMNDIVKIVDKSGKEVFGYYKGCDRSNGGIKIVRHDSEKDSTRIGVKNAAVIEKYDVNILGKYHKVKHEKSPCGQISRKPGKKKASAAA

SEQ ID NO: 17857 - protein, 1479 aa, unidentified
  REGION 1..1479: note = Cas Enzyme sequence
MKKILGLDLGTNSIGWALIDGENHKIVKIGSRIIPMDAQAMSDFKKGNLKSSASVRTGFRGTRRLYQRAELRRERLLRVLNKLNFLPEHFKNEIDFEKHPGKFKDHSEPLLPYCKSSSGKHEFIFMDSFNEMLSDFKKSHPELVADGKKIPYDWVIYYLRKKALSTAVKREELAWIILNFNAKRGYYQLRGDELDTVSEKNEEYMVLEVVKVEKMDPDKKRRGYDRYLITYENGATQRKHGKIAPRNVGDKVEVIVTTTYDKNGNVALDKDGCPKIKLRSPKEDDWALMKKRTEHDLEQSRQSVGAYVYSWLLVNPAVKVKGKLIRTIERKYYKEELISILNKQKEFIPELNDHSMYIDCVRELYRNNEAHVDSLSNGDFTRLFVDDIIFYQRPLKSKKNTIADCPHEQYHYVNKESGEIVNIPVKVISKSHPLYQEFRLWHFIRDLKIYQREGNINGKLKTDVDVTADYIKDEKDVEALFEFLNELNEVSNDMLLKHFGLSSKSHRWNYVESKIYPCNETRWSINRDGYLDSCKEIALWHILYSVDDPVLLRKALRTFAVNNNIDNAEKFVGKYIHTKPFESDYGRYSEKALKKMLPLMRTGTKWRAEAIDEHTLYRIRQIIDGKDEPYIYESAEKNGFSLKSVNDFKALPLWFAEYVVYGKRDEYIVWKSPEDIDYYLKFCFKQHSLRNPVVEAILGETLRVVRDIWFTYGKIDEVHVELGRDLKQSADKRKGDTERILENERTNQRIRTLLQEFVNPDCGIENVRPYSPSQLELLKIYEADILCNEDVPEELVDVFNNLGNATKHVAHNDVMRYKLWLEQKYRSPYTGDVIPLSKLFTTAYEIEHIIPQSRYFDDSLSNKVICESEINKLKDNSLAYEFIQNKHGQIIGGHKVFDQQQYEDFIKQHYANNRSKMRKLLMEDIPADFINRQLNDSRYIARKTIEILSNIVRQTTADGKVADNDKGDVSINVIASNGAITDRLKKEWGITQVWSHIITPRFERLNQITGTIDFGQWMNVGGKRYFQINIPIELSAGFSKKRIDHRHHAMDAVVIACSTRDHINYLNNSAAAASEKKLRYDLQHKLCFKDKTDGNGNDVRRFNKPWDTFTQDVEAELQRVIVSFKQNLRVINKMTNYSWHYENGRKVLSKQLRGDGWAVRKSLHKASVSGAVRVQRIIKMSLKEALKNWHQIKDKNIRKAIKALIIEYKKFDETVILRYFKDRKYILNGKDISKVEVYVLPLEADLSARRWELDISFDERKIASVSDSGIRSILLNYLKEHDNDPKIAFTPEGIMDMNNNIRKYNGGKDHKPILKVRKTEALGLKFPVGECGNKKSKYVEADKGTNLFFAVYTDKEGERSYTSIPFNEAVECMKKRLPVAPEYDENGNELLFVLSPGDLVYVPSTDGNVDFLQTDRIYKLVSSTGKSGFFVPCNIAAPIIDTIELGANNKAEKSWTGEMIKNVCVRLKVSRLGIVTKYD

SEQ ID NO: 17858 - protein, 1157 aa, unidentified
  REGION 1..1157: note = Cas Enzyme sequence
MNYILGLDVGIGSIGWAVINLDKYRVEDIGVRIFESGENAKSKSSYCQERRMARGIRRLTRRRSHRKDRLKSHLEIIGLTTKNDIKEYYENGNCNIISSRVRAIDEKISPEELAACLIHICNNRGYNDFYSLNDEDATKEEKSEYEALNKIESLMCSNNYRTVAEMILKDDTFNGDGKCRKYHNSEFSDEINLIKRNRLEEEVNLILEKQREYYTCLNDDAIKKIKDIIFSQRDFEDGPGDKDDKFRKYKGFLDTLGKCRFYPEEKRGERFTAIADVYALVNVLSQYRYYDKNGELCFNSDIAKALVSYALENGNMTKKDLKTITKKFGVIFDDSGTEDTPITKCFRYIKGIKPVFDEFGCDWNELISDYTDVENNLLNRIGDKLSKYITPKRRIKKLEEFNFDSKMIEKLSKMKFSGTSNVSYKYMKDAIEAFLGGDIYGNYQASFNKENTYTIKEEDKPYKLPPFKSEDDCEFFKNPVVFRAINETRKIINAVVDKYGYPCAVNIETADEVNKSFADRDKTGRMNKANEAENDRIRTEISNLLKIDENSVRPVQIERYKLWEVQEHKCLYSGKEIADPIPMLEDNDHLYEVDHIIPFSIILDNTINNKALVYVSENQRKGQRTPLMYMTPEQAEGYKSRVNAMMKSKKCSKKKYQYLMLENLDNNNLLSEWKSRNLNDTRYISKYLVNYIRDNLRFNPNNEFADDFSIKTSNRVFAVKSKFTSQFRKQWLNSKTWGRKDKEELKKITYLDHAADAIVIANCRPEFVIIAGEKLKLYNIWKQAGKCITDEYTRSLNNCVDTLVKYYGMNRNFVTKILKNPSYKVSPIIPHIADETDNRLRDFNTHRILFNAPDDTNEQITETFVSHNRHLYADDPEFAESLKMPVISYKPERKYTGEITTENPISVKEIDGEEVQLSRVKITKITPKHLSRIRTDDTDLRYSLESALNGKGDTYTIEKYLKDNKLEYFTTLKGRRINKVTVKNPNPDPKYLKKEISENNYTYLDNTSYYCLEIYKTKDGNNNMLGIAMSDLVKKNKKLYLKSSFKYPKDYGEHIMYLFKGDYLRITDKKGQIKFEGYYLSSNGIKDKSIYVVKDNFDKIFKKDDDNKQKARGKTINLAQRDKCIKLNVDILGKISGYNNGEGISCGEPLSLLKEND

SEQ ID NO: 17859 - protein, 1336 aa, unidentified
  REGION 1..1336: note = Cas Enzyme sequence
MKKFEDYYLGLDLGTSSIGWAVTNEKYDILRFNKKFMWGTHLFDMGNTAAERRIFRTSRRRLKRKKSRIELLQTLFSAEISKKDFGFFQRLKESQYFIEDKTVKNKNTLFMDKNYTDQDYHMEYPTIYHLRKALIDNEESAFEIRKLYLAISHILSHRGHFLFEGELSDNLDFDDIFNEFVKYLNEELNIDFKIKSDVSLQAIKEILTDKMLNRTKKKEKLSELLEEEKNKIYQEIWKLLVGNEAKISTIFDDKEYEEAKIAFSKGNYDEKEEEYESILGEKILFVQKAKAIYDWMLLQNILKEDKYLSYSKVKLYDEHKNDLKILKEVLKRLDKKAYKEIFLENGLYENYVKKNGKEELYKKIKSYFNDENTDEIVKNILNKIELDSFLPKQKIKDNGVIPRQIHQKELETILKNAEKYFTWFAEKDETGLSVSEKIIKIFKFKIPYYVGPLNSKSPFAWIERKEYGKILPWNFENMVDMSKTAEKFIKRMTNKCTYLPEKDVIPKNSLLYTKYMVLNELNNLKIRGEKIKVELKQKIYTELFQKNKKIGMKTLIEFLKSQNIVVTKAEITGIDGTFNTSLGSYIDMKKIFGEEKIVKDSYKKMIEDIILWITLYGEEKKLIKSKIEEKYPEKVTPEEMKLILKLKYRDWSRLSKEFLTEIETMDEETGELISIIEMLWRKNENIMELLSYKYEYLDRIKEYNGINEEEKNITYEDLVKDLQVSPSVKKMIWRALVIVKEIKKVTNKSPKKVFIEMARDTQTEKKRTEKRKDKLLELYKNIKNDDSIKELEKNLKDKTNDDLKSKKLYLYYLQLGRCMYSGEVIRLEDLMNDNLYDIDHIYPQSKIKDDSFDNTVLVKKQINADKTNEYPIDKSIQNKCKAFWTSLKERGLMSNTKYERLTRTEGFSDDELAGFISRQIVETRQATKVLADLLKVIFGSDTRVIYVKAGLTSDFRQKFGIYKFRELNDYHHAHDGYLNIVTGNIYNTLFTDNPYNFIKDRKKDNRTYNLNKVFERENDVWNPDVMLSKIERYIYKIRPLFTRASYERKGKFYNIQYVKKGKNLISKKNNLNTEKYGGYSGVENSYFVIYLYKQKNKDIKKIDTIPVYLREKINSDKDIMDYLKEKNKIEGDIKILENRIKIGSKIRFENEIYYLKGKPDENRLSVGYMKQLILSKSSYEVMRKIIKNIEKLNLENTEEKLSKILKNSKNSKELTTKEINIKINTVYGELYEKISEKEFGKIFSTITIPLKEYLAKSNLEILEDFNKLDIFSKIRVLEEIFKVITKLDNFSLKDIGGHKAITNARISINKILASEDFCIINQSPTGLFEKKVFLDK

SEQ ID NO: 17860 - protein, 1379 aa, unidentified
  REGION 1..1379: note = Cas Enzyme sequence
MREYNLGLDIGTNSVGWAVVDENNQIVKKGGKALWGVRMFDEAQSAMDTRIYRNSRRRINRRNQRLVLLQNEFYDEIIKVDLTFFQRLKDSFFKKEDKLNKNSYTFFDDNITDKEYFKKFPTIYHLRKHLLHNDEKIDIRMLYLALHHIIKYRGHFLHSGNVDLNSFQKIKDTLESFNSKMDEMSLEFEDNEDYFAHIEFDEYLEMNLKNIMLSQTSKKEKKKKLVELFKVGQKSLTNELLIELLVNKKVKLDKLSITKDKKYESCEINFEKEELFEDIEKARTITELFYILDEIINIKGIVDYYYLLKIIGSNEYLSDSMVKIYDKHCEDLHELKNFIKEYCPDKYDECFRKTSDSKLCNYPKYVGMNSVNQKMERFSHCKKEDFYKYLKNLFNTIENEKAKPKIEKFKQAIENDDFLNRQNSSHNSSIPMQLNLKELTVILNKQSKYYPFLKDKNSDGYSVLDRIIAIFEYKIPYYVGPLNKNSKYSWLIKRSDEKITPWNYEKIIDLDASAKEFIQRMQNKCTYLKGENDYCLPKKSILFSEYNCLQYLNRLIINGALIKDELKKEIYENIFLCYKKPTKKNIIEYLKTNHNYDETTLKSNISEVNCDMSSYIQFKEIYGEDFEQNFNIIEEIIKDITIFEDKKILEKRLKEIYHLSDDKVQKIKSLNYKGYATLSKHFLNDFYSVNKQTNERYGPIIQIMRDTNYNLQQVIYDDRYNFIKAIDDYNKENLNIAKKLNVSDFIDEYIYVSPIMKRSLIQSYNIIQELEKILGQPISKYYIECSRVNSGSSKITASRYNQLKELYKNCQSQVNDLSKNYININKLSKQLEECKDKLRADKLYFYFTQFGKCMYTLEDIDLDDVFSGKYDIDHIYPQSLIKDDSLSNRVLTNKEKNGKKDNKFIFDIPGFLSKEAEAFYKKLLECKLITKEKYRRLTMKQIDDNELSVFVNRQLVATNQSIKGLVEVLKIYKGVKPTNIVYSKATNINDFRNNYDLYKSRTANNYHHAHDAYLNVVIGKTLDDYYRYNYLQKSKDILDLKNKKITINPEKILSKNRYIYKNGEKKVIWDLEKNLKMIKTNLYYRFDINETIMTRTSNKMFKKTGISPSGKSENLIPIKTSDSRCDVLKYGGIKSNSYSFYCIVELSDKKEKKSYILEAIPKTHSDKLEEYIEQSIDKKKVSDFKIINRNIKSNIIIEYEKLRYVITGKSGERYLIKNFKDRNFSYNAIKTIKHIEKYNYQKKFEIPVEETKEKIILAPKNKDTKEISLTLNECQALLDEIISLFKKDIYAYDIINKIASNLEENKQNLTLINLIKVLTEVLVLLKTNERGTADLTLINMNKDTGTLRINKTLKPGMKFISESPTGYYRKVIFEVPNGI

SEQ ID NO: 17861 - protein, 1403 aa, unidentified
  REGION 1..1403: note = Cas Enzyme sequence
MAYSKDYYVGLDIGTASVGWAVTDTSYKIIRGKGKDMWGARLFKEAGTAQGRRMQRVARRRRERETERISVLKSLFASEIKQVDPGFYQRLSESKYFLDDRSDGNQQKSAIFCEKNYTDADYFKEYPTIFHLRKELACPDGTHANSPMRKDVRLVYLALLNMFKHRGNFLNDNLDENSSSSFKDSWNELSKEYQDLFSSDEKIEAFPKAENVDELKHILDDKNSSKTAIFENVAKYLGVLKKDKRLYNILGLLCGCSQNLDAIFGKEKFEDAESSALTKISFRDNSFEEKIAELGEVVEEDDMSFVMAMKQVYDSIHDHIMCGKEFISEARVEAYAKHKEDLKLLKKTIRRLSPDEYDGMFREISSGSYSAYIGSTNTKKKYTDDGSGKQRRYVAGKKEDNYKPTAMYDKIKRIFKDFPEDPDVKKILWEIENKTFLKKQLIFENGVIPNQVYVHEMKAILKNAEKYLPFLSERDHSGYTVSEKVVELFQFHIPYYVGPLGKSGDPKKDHGWAVRKSNDKVYPWNFWSVIDRNKTSEAFIENLIGQCTYLSDQKVLPKKSLLYEKFMVLNELNNLKINSKPVSVELKQNIYNDLFMKGRPVKQKKLLDYLQTNGDISKENADQVSGIDGDFKAYLSSVGKFNGIFKSPYFDREHKKMIERIIYLGTVYGDLKDMFKARVKKEFGDRLDEKQIKRIMGFKFAGWGRMSRKFLELQGVFKEDGKEDGVVRSIIQTMWETNDNLMQVLSSKYTYTEEIEKATLKRHKILSEWVPEDFDDMYLSAPVKRMTWQTIKILREIETIMGHAPKRVFVEMTRSDQKKGAQGRKKSRKDFFTKLYENIKDGEKDWNGEIEKLPKDKFRIKKVYLYYSQMGRSMYSGKSISLDDLLNNNDHYDIDHIYPRHFVKDDSLQNNLVLVEKTINSDKRDAPLNSNIQKECKGLWKELKEKGLITKEKYQRLIRTTPFTAEEKAEFVQRQVVETGQSAKVVTQILKESFPNETDVVFSKAGLVSDFRNEFGIYKCRSINDLHHAKDAYLNVVVGNAYFVKFTNNPLQFMRNAEGKENKNFYQYNLGNIGEFFKYSIRSQNETAWNANESGKEDTIQIVKGQVFKNTPIITRRSYMQSGELTGKDTIYPARNAKEKDYFPIKSSDERLCKVSRYGGRKDIKTACYCLIEYKTGRKVQRSLEAIPSFLIKNNEFDEKVVYTYLLDSVTRESKEEITDFSLRKPKILFNSLFKIEGYYYCLAGRTGDYIILHNAVPLLFNNQESLYVKKIDKAVKTQNYDEKDRNKNPILTEEKNIKFYNTIVEKLSKNIFRNKKGKLCELVFSGKEKFANLSLPKQCTSIQEILLGFAANTNPVNLSDIGGSKKAGGAKIKKNITDLKECVLIHQSVTGLVETREDLLTI

SEQ ID NO: 17862 - protein, 1051 aa, unidentified
  REGION 1..1051: note = Cas Enzyme sequence
MTTRLGLDIGTNSIGWCLFDGDSIRDIGVRIFSDGRDPKSGASLAVDRRNARAMRRRRDRYLRRRSALLHALVETGLMPADAKDARALVGCDPYDLRKRGLDEPLGPHEIGRALFHINQRRGFKSNRKAERKSGDDKESDKIATGAKALDLTMEEAGARTYGEFLAGRETKRVRMPLGGEGHDFYPERRHLEHEFDCFWAAQAPHHPALLTDAARDRLRRIIFFQRPLKASKVGGCTFFNEEPRLPKAHPLFQERRLFEEVNQLEINQAGAASRKLTFDQRDAIILKLKSAKTASFHPTLARLLKLADGESFNKASDNRTGLTGDEIFAAFSHKNCFGPRWAHFDAGVQWSIVEAVAEEEDPVRLHEWLMTTHGVTAEQADAIGRIRLPEGHGRLGETATRLIVEKLKTGDIDGRPLTYNQAVEAALGKSHSDFRTGEVLDFLPYYGEMLSREIPPGTLDPNDDDEIRWGKITNPTVHIGLNQLRRLLNTIIRVHGRPDEIVVELARELKLNEKDKAKYNKELGENTRKAQARSGKLVELGQTDHGGNRMLLRLWEELSPTSALNHFCPFCAKPLPIYMLFDGQAEVEHILPYSRTFDDSAANKVIAHRSCNREKGNQTPWEKWGGTPRWEAIAEQVANLDKRKQWRFAPDAMERFEKDGGFIARQLTDTQYLARMARTYLSSLYPDSAGVYVIPGRMTAMLRRLWGLNELLPDHNYVENPHSNAPKNRLDHRHHAIDAAVVGATTRSLLNEIAKAAGRAEEQNLDKLFDGLPAPWNGFRENLRDALARVVVSHKADHGRRRRPTKDRDATAARLHNDTAYGLTGLTSDSGLPIVVHRMPLTSLKPADLIDPDRIPDATLRDALWRATRDLSGKEFEKALLDFSRKDPVFKGIRRVRVREGLKVIPVRDKSGVAYKGYKGDANARFDVWQLPDGKWTAAVVSMFDAHRHDFVPERPHPAAKKIMSLRQNDLIAIEKDGAFREIVRVVKFGANGQITIAAHQEAGPLKERDAKPNDLDPFKYSSPTAGGLKKMRARQVRIDELGRIFDPGPR

SEQ ID NO: 17863 - protein, 1149 aa, unidentified
  REGION 1..1149: note = Cas Enzyme sequence
MDKKEQDKYYKKIKIKTENSIGNKTVGCYIYDHILQNPNEKIKGKLVRTIERKYYKEELKAILEKQVALQPELFTDQLFADCIRELYSKNEAQQRNLAARDFVHLFVEDIIFYQRSLRRQKSTLANCSLESRSYIDKDSHTRKEAPLKVCPKSNPYYQEFRVLQWLQNLKIYEIDTDQEVTHEFIKTLEDKQQLFDFLMNQKEIDCEELLKYFLNQTYPNAREKALKSELKKWKDTYRWNYVYDIGEKSSKKYPMNETRYELKRHLEKVANLPDDFLSSEVEYLLWHLIYSVKDKVAYEKGLKKFAQKHHLDKDSFVESFKKFKPYPSEYGSFSEKAIRKLLPLMRFGAYWDFNHIDKNTQKRIEDLITGVENEEIRTILREKAEKYQLEKETDFQDLPLWLAQYIVYNRHAEASSLEKWTSVNDLETYLNEFKQYSLRNPIVEQVVMETLRVVRDIWQQYGQGQARFFDEIHIELGRELKKTAKEREKLSKQNQKNEDINLSIKEKLKELKKYNTRAYSITHQEKYKLWLEQKHISPYTGQIISPENLFTDNYEIEHIIPQSRFFDDSLSNKVVCESIVNKAPYKDRQLGLEFIKNQGGRIVKELSTENKTIKIFTEEQYRTFIKEHYSNNPEKTKKLLLEEIPEKMVARQMNDTCYISKFISEILSKIVRSDEQDEGVHSKNVILCTGKITSILRQDWGLNDIWDNLILPRFERMNNLLQKEKFTIYSIEKQKKIPVVPINDQFKSFQKKRIDHRHHALDAIIIACVTGEHINYINNQHALEKGKDKKEKQKEHDKLREKLCIKKYNKGSEENYSWIFKKPWDTFTQEVQAALEGIVVSFKQNLRVINKATNYYERWVEENGKYIKKMVKQEGTNWAIRKPLHEETISGKIYLDREEITKNDILTATRKTVDSSFDEKRIKKITDTGIQKILLNYLKYKGSPEIAFSPEGLEELNKNLSIYNDGKPHKPIYKVRIYEKGSGRFALGEKGRKYKKYVQGAPNLYFGIYQGANKRSFATIPLNEVIERQKQGRPYVPEYNEKGDPLLFSLSPNDLVYVPLEGENTEDIDFRNLSNEQKERIYKTVSFTRNECFFIKSSIASLIKNYDAKTKIGELGSQNKLEVTICKGIRIKEVCIKLKVDRLGNISKA

SEQ ID NO: 17864 - protein, 944 aa, unidentified
  REGION 1..944: note = Cas Enzyme sequence
MITLGIDYGASNIGIALVLTTEAGENIPLFAGTLRVDARHLKEKVETRAGIRRLRRTRKTKKRRLRNLQHALESLGLSPDQTSKIIRFSKRRGYKSLFDKDTPDETKDDSELTYRFTREEFFKSLEKELSEWISDEVKRAKALSICEKILNRHGNRDHEIRKLRIDNRGVSRCAWEGCRAVTPRLENALKEALSQQLYTVFQTLVRENTAIRNEIDEAVANLTELAKRLRNASGDDANSEKKILRKKARSVLRHLRDRFFALDEPGLEKDKAWKYIESSLMNTLENRGGRNRYCRFHSNEYINTILQGKPVPFKKTIADSDIISRREQIAYAKIWRYIEARLLPLAPEGIDRIVVERTAFDLLAGSWKSIADATDAFKEDMYQQGPMYGFSSRGEMLREEFGGLCAYCGLPSSVLMDRDHILPRADFFFDSYLNIVPACPKCNSALKGRRPASEIALTIHPDAYNAYDHYLRSKFKKRPMHFFHTIKKGILNLMKDPDRLWEAERYLSLITKQFSQIVQTQRSPRPFARYLSSKIGTLQGKTPEIRFRNGRHTALYRNVAYPEFDKYREKAEGNAINHALDAMLLASELPDLYPVESLNIPLSSLKAWSASVKRKAPKPSADGIPSIQNLNDFVDGFEVVHGDGYVDVALRTMVWNQRDTMTHKQDPYGWSAKDKRPTKRTSALDLYTELKKEKAGKVKNKVELIHHPSLRKAVSDAVTPENPGGTAAEALKLWLCNSVRNTLKTSHFSNHPGDRARKEALEKFASNENETIPAVIGVKMFDLGVQGKIDLERLDRQTGNVGHRYMTQPPNRGVIVAYPKASDGHPDMARPCCLYLRQNGAVIPEGLAIFKPLPDKLSKGRIFGSHNNEVSTLFRDVEDYLKDCGFFGYILLTPGCVAHYADGHSWFVRNFDQSKDFKKFRLRNIVAIRKTPFSQKLIPQKVLT

SEQ ID NO: 17865 - protein, 1104 aa, unidentified
  REGION 1..1104: note = Cas Enzyme sequence
MQYIVALDIGVASVGFAVIDKKTETVIEAGSNIFPEASATDNQMRRGMRQARRLKRRKRTRLDDFTKLWEEYAFAIPQVQENDIVGLKVKALRESISLDELYLILYSYLKYRGISYLEDAEDTSLSGTSAYANGLKLNAKELETNYPCEIQKQRLEQVGKYRGQIQIEDAQGEKVDLSNVFTIGAYTKEIQQVLCTQKNYHSEISDEFCEDYLEIFTRKRKYYEGPGNEKSRTDYGRFTTRLDENGDYITEKNIFEKLIGKCSVYKEELRAASASYTAQEFNLLNDLNNLTINGRKLEEHEKRIIIDKVKTSNTINMRKIIADVMGEKIEEFYGARIDKSEKEIFHKMEVYNKMRKTLAEIHVNIEEFSRENLDEIGYILTINTDKEAMMEAFEHANVKLSEEIKDCLISLRKTNGALFSKWHSFSLKIMKELIPEMYQQPKEQMTLLTEMGVMRGQTDKFEKNKYIPVDAVDEDIFNPVVRRAVRISFKILNALMKKYGTLEEVVIEMPRDRNSEEQKKWEKERQKKNEKELAYIEKKLAAEYNILLSPTDFSNQKQLGLKLKLWNEQDGKCLYSGKTIEPEDLIKHSELFQIDHIIPRSISFDDSRNNKVLVYGEENQKKGNQTPYYYLIHANNQWSFEQYKALVMKLSKKKEYGISKKKVQNLLYSEDITKAEVLRGFINRNINDTGYAARVVLNTVQGYFRAKEINTKVKVIRGSYTYQMRVNMKLDKNREESYAHHAVDAMLIAFSQLGYEAYRKLQGEFIDFETGEILNAEKWNAQMSDEIYEQYLYGKKWSNIRTQITKAEKQVKYWYHVDHKSNRGLCNQTIRGTRTYEGKTYKINKLDIRTKEGAALFKKLAFSEKESDREKLLVYKNDKKTYENLIQIAQEYSDSNNPFVQYEKETGDCVRKYAKNHNGPRIDKLKYTDGEVGSCIDISHKYGYEKGSQKVVLESLVPYRMDVYYKKEEQTYYLVGIKQSDVKCDNGEYVIDEDAYAINLVREKMIQPGQKRGDLEALGFEFQLSFYKNDIIEYEKDGEIVKERFLSRTMPKVKNYIETKPIDRAKYEKQKLVGLSKTKMIRKYRMDILGNYYMCSRENFSKYC

SEQ ID NO: 17866 - protein, 1151 aa, unidentified
  REGION 1..1151: note = Cas Enzyme sequence
  REGION 1137..1140: note = misc_feature - Xaa can be any naturally occurring amino acid
RCYALQNKVTYQELFQCIYNILKYRGNFLRDDIDFENGESLTEELLIQEITNFMIKSLQLDIDNLDKLKESISTMCNQNIDLKEIPYAEISDDKVSQKSIENVFKALKDQKFNPFMIEDDPILIDEEEGKSIIPEAKTKTIYMKSVQKCGDLSNRFEQLLNITDSYRLYKVLNGEKYICTAYKKKLDRVADYYSFKDSPEGCSKYSDIESAKIEEEITYITNNMNATKGKPEKYGYTRKNPRGPIHVIHNVLNRYPNGLLVKEAVDILRTQQNYYGKEVVSDEFIDVIRYILKARIPYYIGPLSETAKNQWCTKTGKFKYSYSYTIEHMDGVDEESSIKDWKDRMRGHCTYLPEAFALPKGSFVAETLLILNELNVLTAIDKNNNTYYLTTNDKIKVFDYLFLDENHYGDVKYKEICDLLDLEYFGPKNHKSQVKTFKQNYTLYKSITSICTTLKLHSIIDLFSTKFQENQLKTIEEIVLNLNLYDEKKHKYQALTKMGISDENSKKLSALNSKKFYGLSEKFVLKTPLNKDGRSLLEILFEDIQPGYTNEMMTAITNACDMNGNPISFIANKYEAAFKELEKNGELELNFNSLLEVMNKTGNGFQIPASRPVLRSINQMMKVIQAVYTYYGVPKRIVLEIPRDMSGKNTNHEMPAKHYKTMEALHQDIMKQCKDKDHPRKTCIDQKWNDLKDFEVNSKNRVKLELYLRQNGMDMITGEKISLNELENYEIDHILPRGFGDDSMDDKILIRFAPNALKKDRTPLMWITDPTDPVINKSGKEITADQYINRVNELFDMKLISENKKRRLLLKDTEDLDRFINQNLVDTRYITREMIGILKAYNHVNGYPTKVIALKPAFTKNYSNAFDIYKNRDLGLQHHALDAAVLGITDIMLNKLFPNYESGRISTSFAKHHQMLADVGNDKKLRDSTKYIIRKMYEKVFGDSPLDYGSLVYTCKNTMPLYSQKSNRNWKGEKFPASRRVPYQKYDIKNGNIVGVYDDKSEENIGKQNSEVLRLFEINNKNHAFDSVNCVAYDIYRIPEKKNNKVIWNNKGIHIPKCIVNEDGTIQKDKYIKLIKEYYGLGDSLIDENGDLVMAYFKIRLYKNDLVGNTEKHEIKDLILGSIADGRIELNKIDCFXXXXSKNCTEKSKFN

SEQ ID NO: 17867 - protein, 1104 aa, unidentified
  REGION 1..1104: note = Cas Enzyme sequence
MKYILALDIGVASVGWAVLDKESESVLEAGSNIFPEASAAENQVRREMRQSRRIKRRQRTRLNDFNKLWEKYNFSIPQIKSNEIVDLKVKALREEISLDELYLILYSYLKHRGISYLEDAQDDSVSGTSAYANGLKVNAKALEKNYPCEIQKDRLQTVGKYRGQTQVTDDNGEIIDLSNVFTIGAYRKEIQKVLETQKGYHDKVTDEFCDEYIRIFNRKRKYYEGPGNEKSRTDYGRFTTKLDENGNHITEDNIFEKLIGKCSVYPEELRAAAASYTAQEFNLLNDLNNLTINGRKLEENEKHAIIEQVKTSNTVNMRKIIAGCMGESIEDFSGARIDKSGKELFHKFEVYNKMRKALAEIDIDINDFSREELDEIGYIMTINTDKEAMIEAFGKSWIDLTEDAMECLISLRKANGSLFGKWQSFSLKIMNELIPEMYIQPKEQMTLLTEMGVTKGTAEEFAGLNYIPVDAVSEEIFNPVVRRSVRISFKILNAVLKKYKVLDAVVIEMPRDRNSDEQKKRITDSQKMNEKEMEFIEKKLAVTYGIELSPADFSSQKQLTLKLKLWNEQDGMCLYSGKTIDPNDILNNPDLFEIDHIIPRSVSFDDARSNKVLVYRTENQKKGNQTPYFYLTHSNGTWTYEQFKATVINLSRKKEYSVSRKKVQNLLYSEDITKIEVLKGFINRNINDTSYASRVVLNTVQNFFKAKKADTKIKVIKGSYTHQMRCNMKLDKNRDESYSHHAVDAMLIGFSELGYEAYRKLQGEFIDFETGEILKRDMWDANMSDDVYADYLYGRKWANIRSEIVRAEKNVKFWYYVLRKSNRGLCNQTIRGTREYDGKQYKINKLDIRTKEGAAVFKKLALSKKESDRERLLVYLNDRKTFDHLVQICEDYRDAQNPFVQYEKETGDMVRKYARKHNGPRIDKLKYKDGEVGACIDISHKYGFEKGSRKVILESLVPYRMDVYYKEAEQSYYLVGVKQSDIKVENGRNVIDEEAYARTLINEKMIQPGQSREDLEDLGYAFKLSFYKNDIIEYEKNGEIFIERLVSRTMPKSRNYIETKPIDRAKFEKQNLVGLSKTRRIRKYRMDILGNWYPCEEEEFTKYC

SEQ ID NO: 17868 - protein, 1209 aa, unidentified
  REGION 1..1209: note = Cas Enzyme sequence
MKKDYILGLDIGISSVGWGLLELDDNNNPYKIIDVGSRIFTPGEVEKTGDSRAKERREKRGARRIARRREFRLDRVKNLLYENGYLKGNINSNIVSEKNEELSIIFNNMINNYYNGKNTNPYILKVEALDRKLTDEELSIILVHYAKKRGYKSNREEASDKESGKVLTTIKENEKIMKDNNYRTISEMYIKDDKFKNKIKNSPNDYKISVTNEMYLEEINKVLDSQIKFGLITDDFKNQYLEIYNSRRSYAKGPGGNSPYGGDLIERMTGKCNFDGNPRAPKRAFSSEIYVALTKLVNLKYKVNDGEYIKLSEKEIKNIIEKAKEKKSISYKDLTKMIGNNIDFKDLTLSKKEYIKLIEELKKKLNIKKDTKININELSSEDKELYNKLCNDKLLSKTLIELKGYHILKDSVIKAYSKDIWDEVKDNMYLLDDLALYCTNYKVNEDILNKIKESENIDNIFNDIHFVELLPNFKDHLMLSTELIRKLIPIMYGGNTYDKAMNILGYNHSDINGDKEKKDLLVPICVDDNITNQRVIRSLTQTRKVINSIIKKYGMPKIINIETARELAKSRQERNEIAKNNVEKQAENEKIKNQLVELGLFVNTDKISSTDLLKYKLWKEQNEFCGYSMKKISIEDLFGNNIVQIDHILPYSRTYNDNYLNKTLVYTKENQEKGNRTPYEWFGKTDKWDEYETYINNLTISQKKKDNYLLKKLDFDTEREMRSQNLNDTKYISKELSSLIKAYLNVEKVNMYPGAITAKLRARWGFNRLTHSYLSKNYILPKNIKEDINKDRDNHLHHAMDALVIASITPSLQQKITLYEKFSRYIDGLTELQIKNISYIKIEDSEGQYYNDDTGEVETIDIREYIKQQLAENNIYYNRHNISKLEFPLPYENFDKEAKLRVYEQDLDTLKWNLKSYNTYTQKDIDNVHTLIPSIAKTKVSGKMHEETYYGIKEIGKDEDKKIYKTLRTPIEKVKRKDLDNIPDRLSGSKDVYESLVEWFGDYEVGEEVLKANGNKYPVSKSDKEHKEIKKLKLYSEYKNTGHMINKSNVEKGGIYRIDVFKSKDKEDDKLYFAAYDILEIKKINTLKEKNRVDDNFNIKLDYGQGKNSKIMSYTDIINNYDLYISLNKNDLIKITTNDGKESVAYVVGCSSGMLEVKSKLGDGYDIIKTDLNENNIFSKQRAQYQITVSTIKEIKKLSISVLGEISGL

SEQ ID NO: 17869 - protein, 1209 aa, unidentified
  REGION 1..1209: note = Cas Enzyme sequence
MKKDYILGLDIGISSVGWGLLELDDNNNPYKIIDVGSRIFTPGEVEKTGDSRAKERREKRGARRIARRREFRLDRVKNLLYENGYLKGNINSNIVSEKNEELSIIFNNMINNYYNGKNTNPYILKVEALDRKLTDEELSIILVHYAKKRGYKSNREEASDKESGKVLTAIKENEKIMKDNNYRTISEMYIKDDKFKNKIKNSPNDYKISVTNEMYLEEINKVLDSQIKFGLITDDFKNQYLEIYNSRRSYAKGPGGNSPYGGDLIERMTGKCNFDGNPRAPKRAFSSEIYVALTKLVNLKYKVNDGEYIKLSEKEIKNIIEKAKEKKSISYKDLTKMIGNNIDFKDLTLSKKEYIKLIEELKKKLNIKKDTKININELSSEDKELYNKLCNDKLLSKTLIELKGYHILKDSVIKAYSKDIWDEVKDNMYLLDDLALYCTNYKVNEDILNKIKESENIDNIFNDIHFVELLPNFKDHLMLSTELIRKLIPIMYGGNTYDKAMNILGYNHSDINGDKEKKDLLVPICVDDNITNQRVIRSLTQTRKVINSIIKKYGMPKIINIETARELAKSRQERNEIAKNNVEKQAENEKIKNQLVELGLFVNTDKISSTDLLKYKLWKEQNEFCGYSMKKISIEDLFGNNIVQIDHILPYSRTYNDNYLNKTLVYTKENQEKGNRTPYEWFGKTDKWDEYETYINNLTISQKKKDNYLLKKLDFDTEREMRSQNLNDTKYISKELSSLIKAYLNVEKVNMYPGAITAKLRARWGFNRLTHSYLSKNYILPKNIKEDINKDRDNHLHHAMDALVIASITPSLQQKITLYEKFSRYIDGLTELQIKNISYIKIEDSEGQYYNDDTGEVETIDIREYIKQQLAENNIYYNRHNISKLEFPLPYENFDKEAKLRVYEQDLDTLKWNLKSYNTYTQKDIDNVHTLIPSIAKTKVSGKMHEETYYGIKEIGKDEDKKIYKTLRTPIEKVKRKDLDNIPDRLSGSKDVYESLVEWFGDYEVGEEVLKANGNKYPVSKSDKEHKEIKKLKLYSEYKNTGHMINKSNVEKGGIYRIDVFKSKDKEDDKLYFAAYDILEIKKINTLKEKNRVDDNFNIKLDYGQGKNSKIMSYTDIINNYDLYISLNKNDLIKITTNDGKESVAYVVGCSSGMLEVKSKLGDGYDIIKTDLNENNIFSKQRAQYQITVSTIKEIKKLSISVLGEISGL

SEQ ID NO: 17870 - protein, 1209 aa, unidentified
  REGION 1..1209: note = Cas Enzyme sequence
MKKDYILGLDIGISSVGWGLLELDDNNNPYKIIDVGSRIFTPGEVEKTGDSRAKERREKRGARRIARRREFRLDRVKNLLYENGYLKGNINSNIVSEKNEELSIIFNNMINNYYNGKNTNPYILKVEALDRKLTDEELSIILVHYAKKRGYKSNREEASDKESGKVLTAIKENEKIMKDNNYRTISEMYIKDDKFKNKIKNSPNDYKISVTNEMYLEEINKVLDSQIKFGLITDDFKNQYLEIYNSRRSYAKGPGGNSPYGGDLIERMTGKCNFDGNPRAPKRAFSSEIYVALTKLVNLKYKVNDGEYIKLSEKEIKNIIEKAKEKKSISYKDLTKMIGNNIDFKDLTLSKKEYIKLIEELKKKLNIKKDTKININELSSEDKELYNKLCNDKLLSKTLIELKGYHILKDSVIKAYSKDIWDEVKDNMYLLDDLALYCTNYKVNEDILNKIKESENIDNIFNDIHFVELLPNFKDHLMLSTELIRKLIPIMYGGNTYDKAMNILGYNHSDINGDKEKKDLLVPICVDDNITNQRVIRSLTQTRKVINSIIKKYGMPKIINIETARELAKSRQERNEIAKNNVEKQAENEKIKNQLVELGLFVSTDKISSTDLLKYKLWKEQNEFCGYSMKKISIEDLFGNNIVQIDHILPYSRTYNDNYLNKTLVYTKENQEKGNRTPYEWFGKTDKWDEYETYINNLTISQKKKDNYLLKKLDFDTEREMRSQNLNDTKYISKELSSLIKAYLNVEKVNMYPGAITAKLRARWGFNRLTHSYLSKNYILPKNIKEDINKDRDNHLHHAMDALVIASITPSLQQKITLYEKFSRYIDGLTELQIKNISYIKIEDSEGQYYNDDTGEVETIDIREYIKQQLAENNIYYNRHNISKLEFPLPYENFDKEAKLRVYEQDLDTLKWNLKSYNTYTQKDIDNVHTLIPSIAKTKVSGKMHEETYYGIKEIGKDEDKKIYKTLRTPIEKVKRKDLDNIPDRLGGSKDVYESLVEWFGDYEVGEEVLKANGNKYPVSKSDKEHKEIKKLKLYSEYKNTGHMINKSNVEKGGIYRIDVFKSKDKEDDKLYFAAYDILEIKKINTLKEKNRVDDNFNIKLDYGQGKNSKIMSYTDIINNYDLYISLNKNDLIKITTNDGKESVAYVVGCSSGMLEVKSKLGDGYDIIKTDLNENNIFNKKLDRYQITVSTIKEIKKLSISVLGEISGL

SEQ ID NO: 17871 - protein, 1209 aa, unidentified
  REGION 1..1209: note = Cas Enzyme sequence
MKKDYILGLDIGISSVGWGLLELDDNNNPYKIIDVGSRIFTPGEVEKTGDSRAKERREKRGARRIARRREFRLDRVKNLLYENGYLKGNINSNIVSEKNEELSIIFNNMINNYYNGKNINPYILKVEALDRKLTDEELSIILVHYAKKRGYKSNREEASDKESGKVLTAIKENEKIMKDNNYRTISEMYIKDDKFKNKIKNSPNDYKISVTNEMYLEEINKVLDSQIKFGLITDNFKNQYLEIYNSRRSYAKGPGGNSPYGGDLIERMTGKCNFDGNPRAPKRAFSSEIYVALTKLVNLKYKVNDGEYIKLSEKEIKNIIEKAKEKKSISYKDLTKMIGNNIDFKDLTLSKKEYIKLIEELKKKLNIKKDTKININELSSEDKELYNKLYNDKLLSKTLIELKGYHTLKDSIIKAYSKDIWDEVKDNMYLLDDLALYCTNYKVNEDILNKIKESENIDNIFNDIHFVELLPNFKDHLMLSTELIKKLIPIMYEGNTYDKAMNILGYNHSDINGDKEKKDLLVPICVDDNITNQRVIRSLTQTRKVINSIIKKYGMPKIINIETARELAKSRQERNEIAKNNVEKQAENEKIKNQLVELGLFVSTDKISSTDLLKYKLWKEQNEFCGYSMKKISIEDLFENNIVQIDHILPYSRTYNDNYLNKTLVYTKENQEKGNRTPYEWFGKTDKWDEYETYINNLTISQKKKDNYLLKKLDFDTEREMRSQNLNDTKYISKELSSLIKAYLNVEKVNMYPGAITAKLRARWGFNRLTHSYISSNYILPKNMKVDINKDRDNHLHHAMDALVIASITPSLQQKITLYEKFSRYIDGLTELQIKNIPYIKIEDSEGQYYNDETGVVETIDIREYIKQQLTENNIYYNRHNISKLEFPLPYENFDKEAKLRVYEQDLDTLKWNLKSYNTYTQKDIDNVHILIPSIAKAKVSGKMHEETYYGIKEIGKGEDKKVYKTLRTPIEKVKRKDLENIPDRLGGSKDIYETLVEWFGDYEVGEEVLKANGNKYPVSKNDKEHKEIKKLKLYSEYKNTGHMINKSNVEKGGIYRIDVFKSEDKEDDKLYFAAYDILEIKKINTLKEKNRVDDKFNIKLDYGRGKNNKIISYTDIINNYELYITLNKNDLIKITANDGKESIAYVVGFTSGKLEVKSKLGDGYDIIKTDLNENNIFNKQLLQYQITVSTIKEIKKLSISVLGEISGL

SEQ ID NO: 17872 - protein, 1209 aa, unidentified; identical to SEQ ID NO: 17868
  REGION 1..1209: note = Cas Enzyme sequence

SEQ ID NO: 17873 - protein, 1209 aa, unidentified
  REGION 1..1209: note = Cas Enzyme sequence
MEKNYILGLDIGISSVGWGLLELDANNNPYKIIDVGSRIFTPGEVEKTGDSRAKERREKRGARRISRRREFRLDRVRNLLYENGYLKGNINSNIVSVKNEELSIIFDNMINNYYKEKNSNPYILKVEALDRKLTNDELSIILVHYAKKRGYKSNREEASDNDSGKVLSAIKENEKIMKENNYRTISEMYIKDEKFKNKIKNSPGDYKISVTNEMYLKEINKVLDSQIKFGLITDDFKNQYLEIYNSRRSYAKGPGGNSPYGGDLIERMTGKCNFDGNPRAPKRAFSSEIYVALTKLVNLKYKVNDGEYIKLSEKEIKNIIEKAKDKKIITYKDLAKELDGNIEFKDLSLSKKEYGKVIEELKKKLNINKEESINISSLNSNDRELFNTLYNEKLLSKTLIELKGYHALKDSIIKAYSNDIWEEYKNNIDFLDEIALYCTNYKVNEDILNKIKESKNIDNIFEDIHFVELLPNFKDHLMLSTDLIKKLIPLMLEGNTYDKAMNILGYNHSDINSDKEKKDLLVPIYVDDTITNQRVIRSLTQTRKVINSIIKKYGMPKIINIETARELAKSRKERNEIAKNNVEKQTENEKIKNQLVELGLFVSTDKISSTDLLKYKLWKEQNEFCGYSMKKISIEDLFGNNIVQIDHILPYSRTYNDNYLNKTLVYTKENQEKGNRTPYEWFGKTQKWDEYEAYINNLTISQKKKDNYLLKKLDFDTEREMRDQNLNDTKYISKELSSLIKAYLNVEKVNMYPGAITSKLRARWGFNRLTHSYISKTYRLPEDMKKDINKDRDNHLHHAMDALVIASITQSLQQKITLYEKFSRYIDGLTKKTIENLNIENGKEILGEYYDDTTGEIKDINIIEYIKKQLEEEHIYYNKHNISRLEFPLPYENFDKEAKLRVYEQDLDTLKWNLKSYNTYTKKDIKSLHTLVPSIAKTKVSGKMHEETYYGIKEIGKDEDKKIYKTLRTPIEKVKRKDLKNIPDRLGGSKDIYESLVEWFGDYEVGEEVLKANGNKYPVSKNDKEHKEIKKIKLYSEYKNTGHMINKSNVEKGGIYKIDVFKSKDEEDDKLYFAAYDILEIKKINTLRKNNIIDNNFNIKLDYGQGKNNKIVPYTDIVNNYNLYCTLNKNDLIKITTKDGKESIAYVVGCSSGMLEVKSKLGDGYDIIVNEYNENNIFSKQRAQYQITVSTIKEIKKLSISVLGEISGV

SEQ ID NO: 17874 - protein, 1209 aa, unidentified
  REGION 1..1209: note = Cas Enzyme sequence
MKKDYILGLDIGISSVGWGLLELDDNNNPYKIIDVGSRIFTPGEVEKTGDSRAKERREKRGARRIARRREFRLDRVKNLLYENGYLKGNINSNIVSEKNEELSIIFNNMINNYYNGKNTNPYILKVEALDRKLTDEELSIILVHYAKKRGYKSNREEASDKESGKVLTAIKENEKIMKDNNYRTISEMYIKDDKFKNKIKNSPNDYKISVTNEMYLEEINKVLDSQIKFGLITDDFKNQYLEIYNSRRSYAKGPGGNSPYGGDLIERMTGKCNFDGNPRAPKRAFSSEIYVALTKLVNLKYKVNDGEYIKLSEKEIKNIIEKAKEKKSISYKDLTKMIGNNIDFKDLTLSKKEYIKLIEELKKKLNIKKDTKININELSSEDKELYNKLCNDKLLSKTLIELKGYHILKDSVIKAYSKDIWDEVKDNMYLLDDLALYCTNYKVNEDILNKIKESENIDNIFNDIHFVELLPNFKDHLMLSTELIRKLIPIMYGGNTYDKAMNILGYNHSDINGDKEKKDLLVPICVDDNITNQRVIRSLTQTRKVINSIIKKYGMPKIINIETARELAKSRQERNEIAKNNVEKQAENEKIKNQLVELGLFVSTDKISSTDLLKYKLWKEQNEFCGYSMKKISIEDLFGNNIVQIDHILPYSRTYNDNYLNKTLVYTKENQEKGNRTPYEWFGKTDKWDEYETYINNLTISQKKKDNYLLKKLDFDTEREMRSQNLNDTKYISKELSSLIKAYLNVEKVNMYPGAITAKLRARWGFNRLTHSYLSKNYILPKNIKEDINKDRDNHLHHAMDALVIASITPSLQQKITLYEKFSRYIDGLTELQIKNISYIKIEDSEGQYYNDDTGEVETIDIREYIKQQLAENNIYYNRHNISKLEFPLPYENFDKEAKLRVYEQDLDTLKWNLKSYNTYTQKDIDNVHTLIPSIAKTKVSGKMHEETYYGIKEIGKDEDKKIYKTLRTPIEKVKRKDLDNIPDRLSGSKDVYESLVEWFGDYEVGEEVLKANGNKYPVSKSDKEHKEIKKLKLYSEYKNTGHMINKSNVEKGGIYRIDVFKSKDKEDDKLYFAAYDILEIKKINTLKEKNRVDDNFNIKLDYGQGKNSKIMSYTDIINNYDLYISLNKNDLIKITTNDGKESVAYVVGCSSGMLEVKSKLGDGYDIIKTDLNENNIFSKQRAQYQITVSTIKEIKKLSISVLGEISGL

SEQ ID NO: 17875 - protein, 1209 aa, unidentified
  REGION 1..1209: note = Cas Enzyme sequence
MKKDYILGLDIGISSVGWGLLELDDNNNPYKIIDVGSRIFTPGEVEKTGDSRAKERREKRGARRIARRREFRLDRVKNLLYENGYLKGNINSNIVSEKNEELSIIFNNMINNYYNGKNINPYILKVEALDRKLTDEELSIILVHYAKKRGYKSNREEASDKESGKVLTAIKENEKIMKDNNYRTISEMYIKDDKFKNKIKNSPNDYKISVTNEMYLEEINKVLDSQIKFGLITDDFKNQYLEIYNSRRSYAKGPGGNSPYGGDLIERMTGKCNFDGNPRAPKRAFSSEIYVALTKLVNLKYKVNDGEYIKLSEKEIKNIIEKAKEKKSISYKDLTKMIGNNIDFKDLTLSKKEYIKLIEELKKKLNIKKDTKININELSSEDKELYNKLYNDKLLSKTLIELKGYHTLKDSIIKAYSKDIWDEVKDNMYLLDDLALYCTNYKVNEDILNKIKESENIDNIFNDIHFVELLPNFKDHLMLSTELIKKLIPIMYEGNTYDKAMNILGYNHSDINGDKEKKDLLVPICVDNNITNQRVIRSLTQTRKVINSIIKKYGMPKIINIETARELAKSRQERNEIAKNNVEKQAENEKIKNQLVELGLFVSTDKISSTDLLKYKLWKEQNEFCGYSMKKISIEDLFGNNIVQIDHILPYSRTYNDNYLNKTLVYTKENQEKGNRTPYEWFGKTDKWDEYETYINNLTISQKKKDNYLLKKLDFDTEREMRSQNLNDTKYISKELSSLIKAYLNVEKVNMYPGAITAKLRARWGFNRLTHSYISSNYILPKNMKVDINKDRDNHLHHAMDALVIASITPSLQQKITLYEKFSRYIDGLTELQIKNIPYIKIEDSEGQYYNDETGVVETIDIREYIKQQLTENNIYYNRHNISKLEFPLPYENFGKEAKLRVYEQDLDTLKWNLKSYNTYTQKDIDNVHILIPSIAKAKVSGKMHEETYYGIKEIGKDEDKKVYKTLRTPIEKVKRKDLDNIPDRLGGSKDIYETLVEWFGDYEVGEEVLKANGNKYPVSKSDKEHKEIKKLKLYSEYKNTGHMINKSNVEKGGIYRIDVFKSEDKEDDKLYFAAYDILEIKKINTLKEKNRVDDNFNIKLDYGQGKNNKIMSYTDIINNYVLYITLNKNDLIKITTNDGKESVAYVVGFTSGKLEVKSKLGDGYDIIKTDLNENNIFNKQLLQYQITVSTIKEIKKLSISVLGEISGL

SEQ ID NO: 17876 - protein, 1209 aa, unidentified
  REGION 1..1209: note = Cas Enzyme sequence
MKKDYILGLDIGISSVGWGLLELDDNNNPYKIIDVGSRIFTPGEVEKTGDSRAKERREKRGARRIARRREFRLDRVKNLLYENGYLKGNINSNIVSEKNEELSIIFNNMINNYYNGKNINPYILKVEALDRKLTDEELSIILVHYAKKRGYKSNREEASDKESGKVLTAIKENEKIMKDNNYRTISEMYIKDDKFKNKIKNSPNDYKISVTNEMYLEEINKVLDSQIKFGLITDNFKNQYLEIYNSRRSYAKGPGGNSPYGGDLIERMTGKCNFDGNPRAPKRAFSSEIYVALTKLVNLKYKVNDGEYIKLSEKEIKNIIEKAKEKKSISYKDLTKMIGNNIDFKDLTLSKKEYIKLIEELKKKLNIKKDTKININELSSEDKELYNKLYNDKLLSKTLIELKGYHILKDSVIKAYSKDIWDEVKDNMYLLDDLALYCTNYKVNEDILNKIKESENIDNIFNDIHFVELLPNFKDHLMLSTELIRKLIPIMYGGNTYDKAMNILGYNHSDINGDKEKKDLLVPICVDDNITNQRVIRSLTQTRKVINSIIKKYGMPKIINIETARELAKSRQERNEIAKNNVEKQAENEKIKNQLVELGLFVSTDKISSTDLLKYKLWKEQNEFCGYSMKKISIEDLFENNIVQIDHILPYSRTYNDNYLNKTLVYTKENQEKGNRTPYEWFGKTDKWDEYETYINNLTISQKKKDNYLLKKLDFDTEREMRSQNLNDTKYISKELSSLIKAYLNVEKVNMYPGAITAKLRARWGFNRLTHSYLSKNYILPKNIKEDINKDRDNHLHHAMDALVIASITPSLQQKITLYEKFSRYIDGLTELQIKNISYIKIEDSEGQYYNDDTGEVETIDIREYIKQQLAENNIYYNRHNISKLEFPLPYENFDKEAKLRVYEQDLDTLKWNLKSYNTYTQKDIDNVHTLIPSIAKTKVSGKMHEETYYGIKEIGKDEDKKIYKTLRTPIEKVKRKDLDNIPDRLGGSKDVYESLVEWFGDYEVGEEVLKANGNKYPVSKSDKEHKEIKKLKLYSEYKNTGHMINKSNVEKGGIYRIDVFKSKDKEDDKLYFAAYDILEIKKINTLKEKNRVDDNFNIKLDYGQGKNSKIMSYTDIINNYDLYISLNKNDLIKITTNDGKESVAYVVGCSSGMLEVKSKLGDGYDIIKTDLNENNIFSKQRAQYQITVSTIKEIKKLSISVLGEISGL

SEQ ID NO: 17877 - protein, 1209 aa, unidentified
  REGION 1..1209: note = Cas Enzyme sequence
MKKDYILGLDIGISSVGWGLLELDDNNNPYKIIDVGSRIFTPGEVEKTGDSRAKERREKRGARRIARRREFRLDRVKNLLYENGYLKGNINSNIVSEKNEELSIIFNNMINNYYNGKNTNPYILKVEALDRKLTDEELSIILVHYAKKRGYKSNREEASDKESGKVLTAIKENEKIMKDNNYRTISEMYIKDDKFKNKIKNSPNDYKISVTNEMYLEEINKVLDSQIKFGLITDNFKNQYLEIYNSRRSYAKGPGGNSPYGGDLIERMTGKCNFDGNPRAPKRAFSSEIYVALTKLVNLKYKVNDGEYIKLSEKEIKNIIEKAKEKKSISYKDLTKMIGNNIDFKDLTLSKKEYIKLIEELKKKLNIKKDTKININELSSEDKELYNKLYNDKLLSKTLIELKGYHTLKDSIIKAYSKDIWDEVKDNMYLLDDLALYCTNYKVNEDILNKIKESENIDNIFNDIHFVELLPNFKDHLMLSTELIKKLIPIMYEGNTYDKAMNILGYNHSDINGDKEKKDLLVPICVDNNITNQRVIRSLTQTRKVINSIIKKYGMPKIINIETARELAKSRQERNEIAKNNVEKQAENEKIKNQLVELGLFVSTDKISSTDLLKYKLWKEQNEFCGYSMKKISIEDLFGNNIVQIDHILPYSRTYNDNYLNKTLVYTKENQEKGNRTPYEWFGKTDKWDEYETYINNLTISQKKKDNYLLKKLDFDTEREMRSQNLNDTKYISKELSSLIKAYLNVEKVNMYPGAITAKLRARWGFNRLTHSYISSNYILPKNMKVDINKDRDNHLHHAMDALVIASITPSLQQKITLYEKFSRYIDGLTELQIKNIPYIKIEDSEGQYYNDETGVVETIDIREYIKQQLTENNIYYNRHNISKLEFPLPYENFDKEAKLRVYEQDLDTLKWNLKSYNTYTQKDIDNVHILIPSIAKAKVSGKMHEETYYGIKEIGKDEDKKVYKTLRTPIEKVKRKDLENIPDRLGGSKDIYETLVEWFEDYEVGEEVLKANGNKYPVSKSDKEHKEIKKLKLYSEYKNTGHMINKSNVEKGGIYRIDVFKSKDKEDDKLYFAAYDILEIKKINTLKEKNRVDDNFNIKLDYGQGKNSKIMSYTDIINNYELYITLNKNDLIKITTNDGKESIAYVVGCTSGMFEVKSKLGDGYDIIVNDFNDNNIFRKQRSQYYITVSTIKEIKKLSISVLGEISGL

SEQ ID NO: 17878 - protein, 1209 aa, unidentified
  REGION 1..1209: note = Cas Enzyme sequence
MKKDYIFGLDIGISSVGWGLLELDDNNNPYKIIDVGSRIFTPGEVEKTGDSRAKERREKRGARRIARRREFRLDRVKNLLYENGYLKGNINSNIVSEKNEELSIIFNNMINNYYNGKNINPYILKVEALDRKLTDEELSIILVHYAKKRGYKSNREEASDKESGKVLTAIKENEKIMKDNNYRTISEMYIKDDKFKNKIKNSPNDYKISVTNEMYLEEINKVLDSQIKFGLITDNFKNQYLEIYNSRRSYAKGPGGNSPYGGDLIERMTGKCNFDGNPRAPKRAFSSEIYVALTKLVNLKYKVNDGEYIKLSEKEIKNIIEKAKEKKSISYKDLTKMIGNNIDFKDLTLSKKEYIKLIEELKKKLNIKKDTKININELSSEDKELYNKLYNDKLLSKTLIELKGYHILKDSVIKAYSKDIWDEVKDNMYLLDDLALYCTNYKVNEDILNKIKESENIDNIFNDIHFVELLPNFKDHLMLSTELIRKLIPIMYGGNTYDKAMNILGYNHSDINGDKEKKDLLVPICVDDNITNQRVIRSLTQTRKVINSIIKKYGMPKIINIETARELAKSRQERNEIAKNNVEKQAENEKIKNQLVELGLFVSTDKISSTDLLKYKLWKEQNEFCGYSMKKISIEDLFENNIVQIDHILPYSRTYNDNYLNKTLVYTKENQEKGNRTPYEWFGKTDKWDEYETYINNLTISQKKKDNYLLKKLDFDTEREMRSQNLNDTKYISKELSSLIKAYLNVEKVNMYPGAITAKLRARWGFNRLTHSYLSKNYILPKNIKEDINKDRDNHLHHAMDALVIASITPSLQQKITLYEKFSRYIDGLTELQIKNISYIKIEDSEGQYYNDDTGEVETIDIREYIKQQLTENNIYYNRHNISKLEFPLPYENFDKEAKLRVYEQDLDTLKWNLKSYNTYTQKDIDNVHTLIPSIAKTKVSGKMHEETYYGIKEIGKDEDKKIYKTLRTPIEKVKRKDLDNIPDRLGGSKDVYESLVEWFGDYEVGEEVLKANGNKYPVSKSDKEHKEIKKLKLYSEYKNTGHMINKSNVEKGGIYRIDVFKSKDKEDDKLYFAAYDILEIKKINTLKEKNRVDDNFNIKLDYGQGKNSKIMSYTDIINNYDLYISLNKNDLIKITTNDGKESVAYVVGCSSGMLEVKSKLGDGYDIIKTDLNENNIFSKQRAQYQITVSTIKEIKKLSISVLGEISGL

SEQ ID NO: 17879 - protein, 1209 aa, unidentified
  REGION 1..1209: note = Cas Enzyme sequence
MKKDYIFGLDIGISSVGWGLLELDDNNNPYKIIDVGSRIFTPGEVEKTGDSRAKERREKRGARRIARRREFRLDRVKNLLYENGYLKGNINSNIVSEKNEELSIIFNNMINNYYNGKNINPYILKVEALDRKLTDEELSIILVHYAKKRGYKSNREEASDKESGKVLTAIKENEKIMKDNNYRTISEMYIKDDKFKNKIKNSPNDYKISVTNEMYLEEINKVLDSQIKFGLITDNFKNQYLEIYNSRRSYAKGPGGNSPYGGDLIERMTGKCNFDGNPRAPKRAFSSEIYVALTKLVNLKYKVNDGEYIKLSEKEIKNIIEKAKEKKSISYKDLTKMIGNNIDFKDLTLSKKEYIKLIEELKKKLNIKKDTKININELSSEDKELYNKLYNDKLLSKTLIELKGYHTLKDSVIKAYSKDIWDEVKDNMYLLDDLALYCTNYKVNEDILNKIKESENIDNIFNDIHFVELLPNFKDHLMLSTELIRKLIPIMYGGNTYDKAMNILGYNHSDINGDKEKKDLLVPICVDDNITNQRVIRSLTQTRKVINSIIKKYGMPKIINIETARELAKSRQERNEIAKNNVEKQAENEKIKNQLVELGLFVSTDKISSTDLLKYKLWKEQNEFCGYSMKKISIEDLFENNIVQIDHILPYSRTYNDNYLNKTLVYTKENQEKGNRTPYEWFGKTDKWDEYETYINNLTISQKKKDNYLLKKLDFDTEREMRSQNLNDTKYISKELSSLIKAYLNVEKVNMYPGAITAKLRARWGFNRLTHSYLSKNYILPKNIKEDINKDRDNHLHHAMDALVIASITPSLQQKITLYEKFSRYIDGLTELQIKNISYIKIEDSEGQYYNDDTGEVETIDIREYIKQQLTENNIYYNRHNISKLEFPLPYENFDKEAKLRVYEQDLDTLKWNLKSYNTYTQKDIDNVHTLIPSIAKTKVSGKMHEETYYGIKEIGKDEDKKIYKTLRTPIEKVKRKDLDNIPDRLGGSKDVYESLVEWFGDYEVGEEVLKANGNKYPVSKSDKEHKEIKKLKLYSEYKNTGHMINKSNVEKGGIYRIDVFKSKDKEDDKLYFAAYDILEIKKINTLKEKNRVDDNFNIKLDYGQGKNSKIMSYTDIINNYDLYISLNKNDLIKITTNDGKESVAYVVGCSSGMLEVKSKLGDGYDIIKTDLNENNIFSKQRAQYQITVSTIKEIKKLSISVLGEISGL

SEQ ID NO: 17880 - protein, 1209 aa, unidentified
  REGION 1..1209: note = Cas Enzyme sequence
MKKDYILGLDIGISSVGWGLLELDDNNNPYKIIDVGSRIFTPGEVEKTGDSRAKERREKRGARRIARRREFRLDRVKNLLYENGYLKGNINSNIVSEKNEELSIIFNNMINNYYNGKNTNPYILKVEALDRKLTDEELSIILVHYAKKRGYKSNREEASDKESGKVLTAIKENEKIMKDNNYRTISEMYIKDDKFKNKIKNSPNDYKISVTNEMYLEEINKVLDSQIKFGLITDDFKNQYLEIYNSRRSYAKGPGGNSPYGGDLIERMTGKCNFDGNPRAPKRAFSSEIYVALTKLVNLKYKVNDGEYIKLSEKEIKNIIEKAKEKKSISYKDLTKMIGNNIDFKDLTLSKKEYIKLIEELKKKLNIKKDTKININELSSEDKELYNKLCNDKLLSKTLIELKGYHILKDSVIKAYSKDIWDEVKDNMYLLDDLALYCTNYKVNEDILNKIKESENIDNIFNDIHFVELLPNFKDHLMLSTELIRKLIPIMYGGNTYDKAMNILGYNHSDINGDKEKKDLLVPICVDDNITNQRVIRSLTQTRKVINSIIKKYGMPKIINIETARELAKSRQERNEIAKNNVEKQAENEKIKNQLVELGLFVSTDKISSTDLLKYKLWKEQNEFCGYSMKKISIEDLFGNNIVQIDHILPYSRTYNDNYLNKTLVYTKENQEKGNRTPYEWFGKTDKWDEYETYINNLTISQKKKDNYLLKKLDFDTEREMRSQNLNDTKYISKELSSLIKAYLNVEKVNMYPGAITAKLRARWGFNRLTHSYLSKNYILPKNMKEDINKDRDNHLHHAVDALVIASITPSLQQKITLYEKFSRYIDGLTELQIKNIPYIKIEDSEGQYYNDDTGVVETIDIREYIKQQLAENNIYYNRHNISKLEFPLPYENFDKEAKLRVYEQDLDTLKWNLKSYNTYTQKDIDNVHTLIPSIAKTKVSGKMHEETYYGIKEIGKDEDKKIYKTLRTPIEKVKRKDLDNIPDRLGGSKDVYESLVEWFGDYEVGEEVLKANGNKYPVSKSDKEHKEIKKLKLYSEYKNTGHMINKSNVEKGGIYRIDVFKSKDKEDDKLYFAAYDILEIKKINTLKEKNRVDDNFNIKLDYGQGKNSKIMSYTDIINNYDLYISLNKNDLIKITTNDGKESVAYVVGCSSGMLEVKSKLGDGYDIIKTDLNENNIFNKKLDRYQITVSTIKEIKKLSISVLGEISGL

SEQ ID NO: 17881 - protein, 1041 aa, unidentified
  REGION 1..1041: note = Cas Enzyme sequence
LYEGDAIKDIGVRIFSDGRDPKSGASLAVDRREARAMRRRRDRLIGRRSALLRELIAHGLLPADKTAAKALEVTDPYALRVKALDEPLDPHEIGRALFHLNQRRGFKSNRKANRVAKPGEEGKIASGTKALDAAMQIVGARTLGEFLNGRDVKRARPDSGEEDGSYAFYPDRKHYLAEFEAIWTKQAKLNPTLLSDAAKIAIHRVIFHQRDLKPQVVGKCTFAGWGGVPDDETRLPKAHPLFQQRRLYEEVNQLEIVTAGASSRKLTMDERDTLILKLRDKAKVSFSSLGKAIKLPEGARFNKESENRKELIGDEVRASLGHKDRFAGRWGGFSTEAQCTIIDRLLNEESTEKLLDWLKVSYTLDAETAEAVANVRLPDGHGRFGLTATTNLLEQLKGGQDADGHPLTYAAAADKAGFNHSAFRTGECHDVLPYYGEILAREIAPGKDNYGDALERKWGKITNPTVHIGLNQLRKLVNAIIRQYGRPDYIFVELARELKLNEKQKAEHNRKIKQNTDAAKQRGEKLEALGEHDSGGNRMRLRIWEELNPGNPLDRRCPYSGEIISIEMLMNGTAEVEHIIPYSRCLDDSVANKVMALTTWNRHKGNKTPWEKWGGTPQWDVIQDQVARLHKSKQWRFAPDAMERVERDGGFIARQLTDTQYLSRIAAKYLGALYPEKGERHVYAVTGRMTAMLRRIWRLNELLPDHNYVENPHSNAPKNRLDHRHHAIDAAVVGATTPAMIAEIAKAAGRAEAQALDKLFVDLPEPWNGFRDELRDKLLATTVSHKADHGRKGAAIPGKDVTAGRLHNDTAYGLTGRTNAKGAPIVVVSKPLLSLQPKDLTDPERMPDKDLQARLYSATQGATGKDFETALRKFAQRDGPYKGIRRVRLTEALNVIPIHDKEGKVYKGYLGDANSRFNVWRMPDGKWVASVISTFETHQKGYVEPRPHPAAKKVLSLTQNDLVAIEKEPGVLKIWRVQKFGQNGQIFFIAHNEAGNMPQRDKDGRDPFKFWGPSAGALKKMKARQIRLDELGRIFDPGPRE

SEQ ID NO: 17882 - protein, 1041 aa, unidentified
  REGION 1..1041: note = Cas Enzyme sequence
LYEGDAIKDIGVRIFSDGRDPKSGASLAVDRREARAMRRRRDRFIGRRSALLRELIAHGLLPADKTAAKALEVTDPYALRVKALDEPLDPHEIGRALFHLNQRRGFKSNRKADRVAKPGEEGKIASGTKALDAAMQIVGARTLGEFLNGRDVKRARPDSGEEDGSYAFYPDRKHYLAEFEAIWTKQAKLNPTLLSDAAKIAIHRVIFHQRDLKPQVVGKCTFAGWGGVPDDETRLPKAHPLFQQRRLYEEVNQLEIVTAGASSRKLTMDERDTLILKLRDKAKVSFSSLGKAIKLPEGARFNKESENRKELIGDEVRAPLGHKDRFAGRWGGFSTEVQCTIIDRLLNEESTEKLLDWLKVSYALDTETAEAIANARLPDGHGRFGLTATTKLLEQLKDAQDAEGNPLTYAAAADKAGFHHSDFRTGECHDVLPYYGEILAREIAPGKDDYVDARERQWGKITNPTVHIGLNQLRKLVNAIIRQYGRPDYIFVELARELKLNEKQKAEHNRKIKQNTDAAKQRGEKLEALGERDSGGNRMRLRIWEELNPGNPLDRRCPYSGEIISIEMLMNGTAEVEHIIPYSRCLDDSAANKVMALTKWNRDKGNKTPWEKWGGAPQWDVIQDQVARLHKSKQWRFAPDAMERIERDGGFIARQLTDTQYLSRIAAKYLGALYPEKGERHVYAVTGRMTAMLRRIWGLNELLLDHNYVENPHSNAPKNRLDHRHHAIDAAVVGATTPAMIAEIAKAAGRAEAQELDKLFVDLPEPWNGFRDELRDKLLATTVSHKADHGRKGAAIPGKDVTAGRLHNDTAYGLTGRTNAKGAPIVVVSKPLLSLQPKDLTDPERMPDKDLQARLYSATQGATGKDFETALRKFAQRDGPYKGIRRVRLTEALNVIPIHDKEGKVYKGYLGDANSRFNVWRMPDGKWVASVISTFETHQKGYVEPRPHPAAKKVLSLTQNDLVAIEKEPGVLKIWRVQKFGQNGQIFFIAHNEAGNMPQRDKDGRDPFKFWGPSAGALKKMKARQIRLDELGRIFDPGPRE

SEQ ID NO: 17883 - protein, 1052 aa, unidentified
  REGION 1..1052: note = Cas Enzyme sequence
MRRLGLDIGTNSIGWCLIEDDARIVAIGSRIFSDGRDPQSGTSLAVDRRLARSARRRRDRYIGRRSAFLEALVAHGLMSSDVDEAKLIAARDPYEFRARALSEPLQPYEIGRALFHLNQRRGFKSNRKAERKAADQEDGKIAAAAQDLDRAMADAGADTLGQFLHGLDTKRVRMNSDSQAYDFYPQRRHYEHEFARIWETQAAHNPALLTDTAKTALSRILFFQRPLKAPTVGVCTFITSEERLPKAHPLFQERRLYEEVNQLEITTPGGAPRKLTLDERDTLILKLRSTGKAGFDGLARLLKLKDGQSFNKASQTRTHMTGDEVFAVMSDNKRFGKRWAHCDADRQWQIIHRLMEEEDPEQLKAFLTGECGLDDEQAVAVGRAPLPEGHGRLGETASRRILTALRDGHNEGAPLSYNQAVAGCGWHHSDFRTGECLDRLPYYGELLTREIPPGSQQPNDPPEVRWGKITNPTVHIGLRQLEKLVNGVINVHGRPDEIVVELARELKLNEAEKEEHERRIRRDTTAAIARGQRLAAEGFADTGANRALLRIWEEANPANPLDRRCPYCGQPISPRALFSGEVDVDHILPYSRTLDDGIANKVVAHRSCNRAKGNRTPFERWGSDAARWEAISAEVARMHRSKQWRFGPDAMERFEREGGFIARQLTDTQYLSRLAGRYLSALYPSKDEGSVYVIPGRMTAMLRRLWGLNSLLPDHNFVENEHSAAPKNRLDHRHHAIDAAVVAVTTRGLMQSIARAAGRAEDKDLDRLFEGLPQPWDGFREDLGASLAAITVSHKPDHGRKGRPAANRDMTAGRLHNDTAYGFTGAMAADGKKPIVVHRVPFNSLKPADVANPDRIADQALRERLQAAVGGLTGKDFEAALARFARNDAVFAGIRRVRVREPLNVIPIHDRGGRIYKGHKGDSNARFDVWRLPEGKWVADIVSMFDAHQREERQRPHPAAKKILSLRQNDIVAVERDSGPRELMRVVKFSSNGNLVLAPPNEGGPLKARDAMPIDHDPFKYTNSSASTLKKWKARQVRVDPLGRVFDPGPRE

SEQ ID NO: 17884 - protein, 1022 aa, unidentified
  REGION 1..1022: note = Cas Enzyme sequence
MHIGLDVGINSLGYAAIKEGELLEANSHIFEKAEEPDGSSLALNRRAKRALRRVIRRRGYRLHQIRALFNMPQIQPEQHFDVSPWELRAEGLKRLLSKEEWARVLLHIAKRRGFQSSRKNADEVNDTEGKKLLAGTEKLKESLENSNHTTIGAYFAAKHHQKEKVRNGHGQYDHTPLRTLLSQEVDTLFETQRGLGNPLASPDIQEKYKKTAFYQRPLQSSVKLVGMCTHEPSEKRAPKHSFSGEMFVLYSRLRALKILDAQHGDSRLTLEDEQKILEHVFTHEKTTFGQVRKLLNIPESARFNLVSYRQTKKDTGAWEHLRKTSEEKPLAKLTGVRALYALTQRDPFHDPAVADVFDKIAWLLTTEKDEIKIRAGLEKLGLAHDVVESCLKQADHFTGHIGLSCKAIKKILPGMQAGMGYDDAVKNAGYVFNKSLVRGNMPKLPALRDVANPIVARAVAQARKILNSIITKYPHEPIESIRIELARELAKNYKERKTLEREMKENAERRERQASEIAALFGRQPSGEEMLKYRLWQEQQQRCAYSDTPITVEHLKDARLTQIDHILPYSRSFDDSYMNKVLCFTAENQRKGNNTPHEKWGNSGDHWQKMAIFAERLPKAKRDRFLMENYNTKEGDWKARHLTDTRYIGRILKQHIEQHLAFPPHVKKPVHVTNGRITAHLRRLWGLESFKKREADDKHHALDAIVIACTTDAMVQKMSEWNRFQRSSSGEKLHFEKPWPTFREDVEAKLNSLFISRQPNRKVTGAAHEETIRSDRRALGLGVVETKAITGINLKNLDRMVEKEVRNKRLYAILKQRLQEHNDKPEVAFAEPGFHEYLKAHWSEKAPRITSLKLNTSEASGIPINGGLASNGEMKRVDVFTKPNKKGKLEYYLCPVYVADFVRGQLPNKVMVSGKKEHEWLELDDSFTFLFQLYKNDLVKIVKGDGSIVEGYYNSADRSTGAIHLLHHDGSKLHRGIGVKTLATFEKYAVDYFGQRTLIKREKRHELAHRRHRAKSPLIAET

SEQ ID NO: 17885 - protein, 1038 aa, unidentified
  REGION 1..1038: note = Cas Enzyme sequence
MRLLGLDIGIASCGFGLIDTETNKILLTGVHLFDKAEVPKTGASLALPRRLARGQRRTIRRRAARRRHVKELFINAGLPIDFIDISYCAEKSPWELRKDGLSRKLTPEELARVLYHLAKRRGFKSNRKDQKSESSKENQKMLGAAQALRQQMAEAQYETVGAYLADQPGKKRNGNGEYSKTVSRDLIDKEVSILFEKQRLFGNMLATDVLEEAFKNIAFFQRPLHSVRDLVGWCSLETGEPRAPKFSRSGELFVLWQKINNLRLLFENGEERPLEDGQRRQLFEKAHQLKTVNYTHIREICGPSDSPYTIKGLSYSSDKSNKKKVSTLPEQDDAILSFEAVVKEAEKKAWFKMTGYHALKDILPSQAIDMDLWDTVSEILSFEQDEITIEKALRDAMLSLTEDQIEKLKVITEFKGTVGHSTKAITELLSFLERGETYDKAVVLAGYQKKEKKRSNHLPAFEKTNNPVVDRALAQSRKIINAIYSRCQLMDITIDAIHIELGRDLGKSWDDRQEIKKHQDANKSFNDTLYQEMLDELGMDVGLKKYKLWKEQKGYCPYSFQYIEPEQLKDPLYTQIDHILPHRRTYDDSFFNLCLCLTGENQRKGDQTPWEYFGSDSERWDQFLAMISSVHRNKKRNFKNTNLTESQEDAWKERNLTDTRYIARLLKNYLEEGLDFSNSPVEKKRRIMVVSGRITAHLRYQWGLNKNRAASAKHHAQDALVIAATTQSMVNKITNYKKYASKHHELEVPKPWDTFREDIIEAVNDVFVSRMPRRKMSGQLHKETICSLRRGRDGKSYIVQRIQVDELNLAKLETLVDKERNSRLYHTLKQRLEAFKGDGKKAFKTPVYMPTKDISKQGPPIQNVRIKTNVQSGIQVFRGIDYNGNLTNPGFASNGAQIRIDIFEKDEKFYMSIVYAQDVYKKYLPERIVTKGLPDTDWPMIKDGYSFKFSLYPNDLVRLTKKNGEVIEGYYRSSDSSNAQIYLLKPDEPKSDNSKNYGIQTLQKFEKLITNYFGEVSHVKQEKRLELANPSRRKTRQT

SEQ ID NO: 17886 - protein, 1087 aa, unidentified
  REGION 1..1087: note = Cas Enzyme sequence
VRYKIGLDIGITSVGWAVMNLDIPRIEDLGVRIFERAENPQTGESLALPRRLARSARRRLRRRKHRLERIRRLVIREGILTKEELDKLFEEKHEIDVWQLRVEALDRKLNNDELARVLLHLAKRRGFKSNRKSERSNKENSTMLKHIEENRAILSGYRTVGEMIVKDPKFALHKRNKGENYTNTIARDDLEREIRLIFSKQREFGNMSCTEKFENEYITIWASQRPVASKDDIEKKVGFCTFEPKEKRAPKATYTFQSFIAWEHINKLRLISPSGARGLTDEERRLLYEQAFQKNKITYHDIRTLLHLPDDTYFKGIVYDRGESRKQNENIRFLELDAYHQIRKAVDKVYGKGKSSSFLPIDFDTFGYALTLFKDDADIHSYLRNEYEQNGKRMPNLANKVYDNELIEELLNLSFTKFGHLSLKALRSILPYMEQGEVYSSACERAGYTFTGPKKKQKTMLLPNIPPIANPVVMRALTQARKVVNAIIKKYGSPVSIHIELARDLSQTFDERRKTKKEQDENRKKNETAIRQLMEYGLTLNPTGHDIVKFKLWSEQNGRCAYSLQPIEIERLLEPGYTEVDHVIPYSRSLDDSYTNKVLVLTKENREKGNRIPAEYLGVGTERWQQFETFVLTNKQFSKKKRDRLLRLHYDENEETEFKNRNLNDTRYISRFFANFIREHLKFAESDDKQKVYTVNGRVTAHLRSRWEFNKNREESDLHHAVDAVIVACTTPSDIAKVTAFYQRREQNKELAKKTEPHFPQPWPHFADELRARLSKHPKESIKALNLGNYDDQKLESLQPVFVSRMPKRSVTGAAHQETLRRYVGIDERSGKIQTVVKTKLSEIKLDASGHFPMYGKESDPRTYEAIRQRLLEHNNDPKKAFQEPLYKPKKNGEPGPVIRTVKIIDTKNQVIPLNDGKTVAYNSNIVRVDVFEKDGKYYCVPVYTMDIMKGILPNKAIEPNKPYSEWKEMTEDYTFRFSLYPNDLIRIELPREKIIKTAGGEEIKIKDLFAYYKTIHSGTAGLELVSHDCSFSLSGVGSRTLKRFEKYQVDVLGNIYKVRGEKRVGLASSAHSKTGETVRPLQSTRD

SEQ ID NO: 17887 - protein, 1087 aa, unidentified
  REGION 1..1087: note = Cas Enzyme sequence
VRYKIGLDIGIASVGWSVINLDIPRIEDLGVRIFDKAENPQTGESLALPRRQARSARRRLRRRKHRLERIRRLLIREGILTKKEMDMLYTNKHEIDVWHLRVDALDRKLNNDELARILLHLAKRRGFKSNRKSDRNNKENSTMLKNIEENRTILSGYKTVAEMIVKDPKFALHKRNKGENYTNTIARDDLEKEIRVIFAKQREYGNIKLTETFENEYITIWSSQRPFASKEDIVKKVGSCTFEPKEKRAPKATYTFQSFVAWEHINKLKLVSSKGNRILTNEERRLLFEKAFHKNKITYHDVRTLLHLPEDFHFKGLLYDKNESLSVNEKVRFLELDAYHKLRKAIESVYGKDGTNSFYPVDYDTFGYALTIFKDDNDIRSYLLNQYEQNGKVVKNLADKVYDEELIDELLNLSFSKFGHLSLKALRRIIPFMEEGDVYSLACEKAGYAFTGPKKKQKSVLLPNIPTISNPVVMRALTQARKVVNAIIKKYGSPVSIHIELARDLSQAFDERRKTKKQQDENRKKNETAINQLVEYGLTLNPTGHDIVKFKLWSEQNGRCAYSLQPINIERLLEPGYTEVDHVIPYSRSLDDSYINKVLVLTKENREKGNRTPAEYLGIGTDRWKQFETFVLTNKQYSKKKRDRLLRLHYDENEEIEFKNRNLNDTRYISRFFANFIREHLKFADNDDKQKVFTVNGRITAHLRSRWDFNKNREESDYHHAVDAVIVACTTPSNIAKVTAFYQKREQHKELAKKAEPHFPQPWPHFADELRARLTENPKESIKALNLGNYDVQKLESLQQVFVSRMPRRSVTGAAHQDTLRRYVGLDERSGKIQTVVKTKLSEIKLDKTGHFPMYGRESDPRTYEAIRQRLIEHDNDPKKAFQEPLFKPKKNGEPGPIIRTVKLIDTKNQIIPLNNGKTVAYNSNIVRVDVFEKDGKYYCVPVYTMDIMKGILPNRAIEANKPYNEWKEMTRDYTFRFSLYPNDLIRIELPKEKTIKTVGGKERKIKDVFVYYKTIDSATGGLELINHDQSFTLRGVGSRTLKRFEKYQVDVLGNIYKVRGEKRVELASSGHPSTRKAVRPLQSTRD

SEQ ID NO: 17888 - protein, 1077 aa, unidentified
  REGION 1..1077: note = Cas Enzyme sequence
MNTAYGIGLDIGIASVGWAVVALNEDAEPYGLIRCGSRVFDKAEQPKTGDSLAASRREARSTRRRLRRRSLRKADLYALMEKSGLPGRAAVEEAVLAGHLPDIYALRAQALDGPVTAMDFARILLHLMQRRGFRSNRKADDAQKDGKLLQAIDANTQRMKDNHYRTVGEMMYRDPAFATHKRNKNENYLSTVRRDQIASEAAQLFAAQRQYGAAWASPETEAEYLTILTRQRSFDEGPGGNSPYGGNMIEKMVGTCTLEGTAEPRAAKATWSFEYFTLLQKLNHIRIEEGGNSHPLTHAQRQELLALCYQTDKLDFARIRKVLDLPPQARFNMVRYRADQPADACEKKEKITALPCYHKMRKALNTLRKDYILTVGHDRLDAAATALTLYKSEDLLREKLQQADFEPLEINALLTLPSFSKFGHISVKACRKLIPYLEQGENYNDACRDAGYDFQGSGHGEKSILLPAEAEEFSDITSPVVRRAVAQTIKVVNAIIREQGESPVSIHLELAREMSKSFQERADLENAMKENNADNERLMRDLHELFPGRNISGQDLVKYRLWKEQDGRCAYSLQPLELQSVITVSGYAEVDHIVPYSISFDDRRTNKVLVLAAENRQKGNRLPLQYLQGTRRDNFIVYTKNNVKNYRKRQNLLKENLSAEDSSGFMQRNLQDTQYIASFMLNYIRGHLAFAAHPMAGKKRVVAVNGAVTSFLRKRWGIAKVRADGDLHHAVDAAVIACTTDGMIQRVSRFYQRTELSHARGERFPEPWPRFRDELMQRLSSCPQENLLTINPVYYTTADIAGIKPVFVSRMPRHKATGPAHKETIKGRLDDTYVTQRRSITDLKLNKDGEIDSYFNPSSDTLLYNALKERLVAFGGNGKKAFAEPFFKPRADGTPGAQVRKVKLYSKVTSTVPVHGGNGVADNDTMVRVDVYYIPGDGYYWVPIYVADTVKPVLPNRAVVAYKSCSEWKEMSEENFLFSLCKNDLVCIESNRPIKLKAANKDSTLEKELTVQRVLAYFEGGNIATGAVSVTTHDNAYIAGSLGFKTLQKVEKYQVDVLGNYTRVKKEKRQLFPAQRR

SEQ ID NO: 17889 - protein, 1077 aa, unidentified
  REGION 1..1077: note = Cas Enzyme sequence
MNTAYGIGLDIGIASVGWAVVALNEDAEPYGLIRCGSRVFDKAEQPKTGDSLAASRREARSTRRRLRRRSLRKADLYALMEKSGLPGRAAVEEAVLAGHLPDIYALRAQALDGPVTAMDFARILLHLMQRRGFRSNRKADDAQKDGKLLQAIDANTQRMKDNHYRTVGEMMYRDPAFATHKRNKNENYLSTVRRDQIASEAAQLFAAQRQYGAAWASPETEAEYLTILTRQRSFDEGPGGNSPYGGNMIEKMVGTCTLEGTAEPRAAKATWSFEYFTLLQKLNHIRIEEGGNSHPLTHAQRQELLALCYQTDKLDFARIRKVLDLPPQARFNMVRYRADQPADACEKKEKITALPCYHKMRKALNTLRKDYILTVGHDRLDAAATALTLYKSEDLLREKLQQADFEPLEINALLTLPSFSKFGHISVKACRKLIPYLEQGENYNDACRDAGYDFQGSGHGEKSILLPAEAEKFSDITSPVVRRAVAQTIKVVNAIIREQGESPVSIHLELAREMSKSFQERADLENAMKENNADNERLMRDLHELFPGRNISGQDLVKYRLWKEQDGRCAYSLQPLELQSVITVSGYAEVDHIVPYSISFDDRRTNKVLVLAAENRQKGNRLPLQYLQGTRRDNFIVYTKNNVKNYRKRQNLLKENLSAEDSSGFMQRNLQDTQYIASFMLNYIRGHLAFAAHPMAGKKRVVAVNGAVTSFLRKRWGIAKVRADGDLHHAVDAAVIACTTDGMIQRVSRFYQRTELSHARGERFPEPWPRFRDELMQRLSSCPQENLLTINPVYYTTADIAGIKPVFVSRMPRHKATGPAHKETIKGRLDDTYVTQRRSITDLKLNKDGEIDSYFNPSSDTLLYNALKERLVAFGGNGKKAFAEPFFKPRADGTPGAQVRKVKLYSKVTSTVPVHGGNGVADNDTMVRVDVYYIPGDGYYWVPIYVADTVKPVLPNRAVVAYKSCSEWKEMSEENFLFSLCKNDLVCIESNRPIKLKAANKDSTLEKELTVQRVLAYFEGGNIATGAVSVTTHDNAYIAGSLGFKTLQKVEKYQVDVLGNYTRVKKEKRQLFPAQRR

SEQ ID NO: 17890 - protein, 1077 aa, unidentified
  REGION 1..1077: note = Cas Enzyme sequence
MNTAYGIGLDIGIASVGWAVVALNEDAEPYGLIRCGSRVFDKAEQPKTGDSLAASRREARSTRRRLRRRSLRKADLYALMEKSGLPGRAAVEEAVLAGHLPDIYALRAQALDGPVTAMDFARILLHLMQRRGFRSNRKADDAQKDGKLLQAIDANTQRMKDNHYRTVGEMMYRDPAFATHKRNKTENYLSTVRRDQIASEAAQLFAAQRQYGAAWASPETEAEYLTILTRQRSFDEGPGGNSPYGGNMIEKMVGACTLEGTAEPRAAKATWSFEYFTLLQKLNHIRIEEGGNSHPLTHAQRQELLTLCYQTDKLDFARIRKVLDLPPQARFNMVRYRADQPADACEKKEKITALPCYHKMRKALNTLRKDYILTVGHDRLDAAATALTLYKSEDLLREKLQQADFEPLEINALLTLPSFSKFGHISVKACRKLIPYLEQGENYNDACHDAGYDFQGSGHGEKSILLPAEAEEFSDITSPVVRRAVAQTIKVVNAIIREQGESPVSIHLELAREMSKSFQERADLENAMKENNADNERLMRDLHELFPGRSISGQDLVKYRLWKEQDGRCAYSLQPLELQSVITVSGYAEVDHIVPYSISFDDRRTNKVLVLASENRQKGNRLPLQYLQGTRRDNFIVYTKNNVKNYRKRQNLLKENLSVEDSNGFMQRNLQDTQYIASFMLNYIRGHLAFAAHPMAGKKRVIAVNGAVTSFLRKRWGIAKVRADGDLHHAVDAAVIACTTDGMIQRVSRFYQREELSHARGERFPEPWPRFRDELMQRLSSCPQENLLTINPVYYTTADIAGIKPVFVSRMPRHKATGPAHKETIKGRLDDTYVTQRRSITDLKLNKDGEIDGYFNPSSDTLLYNALKERLIAFGGNGKKAFAEPFFKPRADGTPGAQVRKVKLYSKVTSTVPVHGGNGVADNDTMVRVDVYYIPGDGYYWVPIYVADTVKPILPNCAFVRCKNSIIKKEMSEENFLFSLCKNDLVCIESKHPIKLKASNEDSTLEKELTVQRVLAYFEGGNIATGAVSVTTHDNAYIAGSLGFKTLQKVEKYQVDVLGNYTRVKKEKRQLFPAQRR

SEQ ID NO: 17891 - protein, 1077 aa, unidentified
  REGION 1..1077: note = Cas Enzyme sequence
MKHPYGIGLDIGIASVGWAVVALNENAEPYGLIRCGSRIFDKAEQPKTGESLAAPRREARSTRRRLRRRSLRKADLYELMAQNGLPGRAEIEEAVQAGHLPDIYALRVQALDGPVTAMDFARILLHLMQRRGFRSNRKADDAQKDGKLLQAIDANTRRMEENHYRTVGEMMYRDPVFAEHKRNKSENYLSTVRRDQIVEEAVQLFAAQRQYGAAWASPEMEAEYLTILTRQRSFDEGPGGNSPYGGNIVEKMVGTCTLEGQAEPRAAKATWSFEYFTLLQKINHIRIIESGAARILTAEERQELLSVCYQTDKLDFARIRKALALSEQARFNMVRYRDGQTTEDCEKKEKIVCLPCYHKMRKVLNTLRKDYIRSVSRDRLDAAATALTMYKNEATLRAKLEEAQFEPLEVDALMTLPSFSGFGHISVKACRKLIPYLEQGLNYNDACKEAGYDFQGNYRGEKSQFLPASTEEMEDITSPVVRRAVAQTIKVVNAIIREQGESPVNIHLELAREMSKNFQQRNDLDKAMKDNNAENERLMKDLHELFPGRNITGQDLVKYRLWKEQDGRCAYSLQPLELEKAITVSGYAEVDHIVPYSISFDDRRANKVLVLASENRQKGNRLPLQYLQGKRRDDFIVYTKASVKNYRKRQNLLKEKLSEEDSKGFMQRNLQDTQYIASFMLNYIRSHLAFADFPAAGKKRVVAVNGAVTAFLRKRWGLGKVRADGDLHHAVDAAVIACTTDGMIQRVSRFYTHIETSDTRGERFPEPWPRFRDELMQRLSACPQENLMQINPVYYQNVDIASIRPVFVSRMPRHKMTGAAHKETIKGRLDDAHTVQRRSITDLKLDKEGEIAGYFNPSSDTLLYNALKEQLTAFGGDGKKAFAEPFFKPRADGTPGAQVRKVKVYDKATSMVAVHEGKGVADNDTMVRIDVYFVPDDGYYWVPIYVADTVKPELPNKAVIAHKNYAEWKEMDENDFLFSLCQNDLIYLERKSAIKFKVKNSESTLEKEIVRNKGIVYFEGGDIATAAISVTTPEDAYFSRGLGFKTLQKVQKYQVDVLGNYTLVKKEKRQNFPAQRR

SEQ ID NO: 17892 - protein, 1016 aa, unidentified
  REGION 1..1016: note = Cas Enzyme sequence
PRRARRRRRRRSLRKADLYELMEKNGLPGKAEIEQAVQAGHLPDVYALRVQALDGPVTALDFARILLHLMQRRGFRSNRKADDAQKDGKLLQAIDANTRRMEANRYRTVGEMMYRDPVFAEHKRNKAENYLSTVKRDQIIDEARLVFAAQRQYGATWASPEMEAEYLCILTRQRSFAEGPGKGSPYSGSNRVGTCTLEGKSEQRAAKAAFSFEYFTLLQKINHIRIAENGTRRTLTPAERQVLLSVCSQTDKLDFARVRKALALPEEARFNMVRYRGEQTAEACEKKEKITALPCYHKMRKALNTLRKDHIRNISREQLDAAGAALTNPENEDKLRKALKQAEFEPLEIEALLTLPSFAGYGHISVKACRKLIPYLEQGMNYNDACQAAGYDFQGRQNGEKAQFLPASTEEMEDITSPVVRRAVAQTIKVVNAIIREQGESPVSIHLELAREMNKNFQQRSELDKAMRDNSAENERLMKELNELFPGRTVTGQDLVKYRLWKEQDGHCAYSIQPLELDKVITVSGYAEVDHIVPYSISFDDRRTNKVLVLASENRQKGNRLPLQYLQGKRRDDFIVYTKANVKNFRKRQNLLKERLSEEDGKGYIQRNLQDTQYIAAFMLNYIRNHLAFADCSGAGKRRVVAVNGAVTAFLRKRWGLSKVRADGDLHHAADAAVIACTTQGMIKRVSDFCKRAETTAVRNEHFPEPWPHFRDELTQRLSACPQENLMQINPVYYATVDISSIQPVFVSRMPRHKVTGAAHKETIKSRLDDTHVVQRRNITELKLDKDGEIAGYFNRSSDTLLYNALKARLLAFGGDGKKAFAEPFYKPRADGTPGARVQKVKICDKVTSTVPVHGGKGVADNDTMVRMDVYFVPGDGYYWVPIYVADTVKLELPNKAVVQGKSYAEWKEMDEENFLFSLCQHDLVRIESKRLMKFKVQNRDSTLEKEMPVNKILAYFEGGNISTGAITVTTHDDAYIADGLGFKTLQKVQKYQVDVLGNYTPVKKEKRQTFPAQRR

SEQ ID NO: 17893 - protein, 1078 aa, unidentified
  REGION 1..1078: note = Cas Enzyme sequence
MCKKMKHPYGIGLDIGIASVGWAVVALNENAEPYGLIRCGSRIFDKAEQPKTGDSLAAPRREARSARRRLRRRSLRKADLYELMEKNGLPGKAEIEQAVQAGHLPDVYALRVQALDGPVTALDFARILLHLMQRRGFRSNRKADDAQKDGKLLQAIDANTRRMEANRYRTVGEMMYRDPVFAEHKRNKAENYLSTVKRDQIIDEVRLVFAAQRQYGATWASPEMEAEYLCILTRQRSFAEGPGKGSPYSGSNRVGTCTLEGKSEQRAAKAAFSFEYFTLLQKINHIRIAENGTSRTLTPAERQILLSVCCQTDKMDFARVRKALALPEEARFNMVRYRGEQTAEACEKKEKITALPCYHKMRKALNTLRKDHIRNISREQLDAAGAALTNPENEDKLREALKQAEFEPLEIEALLTLPSFAGYGHISVKACRKLIPYLEQGMNYNDACQAAGYDFQGRQNGEKAQFLPASTEEMDDITSPVVRRAVAQTIKVVNAIIREQGESPVSIHLELAREMNKNFQQRSELDKAMRDNSAENERLMKELNELFPGRTVTGQDLVKYRLWKEQNEICAYSLEKLDLTRVITEAGYAEVDHIVPYSISFDDRRTNKVLVLASENRQKGNRLPLQYLQGKRRDDFIVYTKANVKNFRKRQNLLKERLSEEDGKGYIQRNLQDTQYIAAFMLNYIRNHLAFADCSGAGKRRVVAVNGAVTAFLRKRWGLSKVRTDGDLHHAADAAVIACTTQGMIKRVSDFCKRAETTAVRNEHFPEPWPRFRDELTQRLSACPQEDLMKINPVYYATVDISSIQPVFVSRMPRHKVTGAAHEETIRSQVNEKYTAVRKSITELSLDKDGKIKDYFKPSSDTLLYEALKKRLTEFGGNAKKAFAEPFYKPRADGTPGAQVRKVKVVAKMNNTIPVRSGGGVAKGGDMIRIDVYYVPGDGYYWVPIYVADTVKETLPNKAVVRDKTMEEWKEMKEDDFLFSLYSNDLILVERDKPICFSLMHEDSTLPKKYETKKELVYYKGGDISNGGIRIETHEGAYFLKSLTFGIVQKVQKYQVDVLGNYTPVKKEKRQTFPAQRR

SEQ ID NO: 17894 - protein, 1077 aa, unidentified
  REGION 1..1077: note = Cas Enzyme sequence
MKHPYGIGLDIGIASVGWAVVALNENAEPYGLIRCGSRIFDKAEQPKTGESLAAPRREARSTRRRLRRRSLRKADLYELMAQNGLPGRAEIEEAVQAGHLPDIYALRVQALDGPVTAMDFARILLHLMQRRGFRSNRKADDAQKDGKLLQAIDANTRRMEENHYRTVGEMMYRDPVFAEHKRNKSENYLSTVRRDQIVEEAVQLFAAQRQYGAAWASPEMEAEYLTILTRQRSFDEGPGGNSPYGGNIVEKMVGTCTLEGQAEPRAAKATWSFEYFTLLQKINHIRIIESGAARILTAEERQELLSVCYQTDKLDFARIRKALALSEQARFNMVRYRDGQTTEDCEKKEKIVCLPCYHKMRKVLNTLRKDYIRSVSRDRLDAAATALTMYKNEATLRAKLEEAQFEPLEVDALMTLPSFSGFGHISVKACRKLIPYLEQGLNYNDACKEAGYDFQGNHRGEKSQFLPASTEEMEDITSPVVRRAVAQTIKVVNAIIREQGESPVNIHLELAREMSKNFQQRNDLDKAMKDNNAENERLMKDLHELFPGRNITGQDLVKYRLWKEQDGRCAYSLQPLELEKAITVSGYAEVDHIVPYSISFDDRRANKVLVLASENRQKGNRLPLQYLQGKRRDDFIVYTKASVKNYRKRQNLLKEKLSKEDSKGFMQRNLQDTQYIASFMLNYIRSHLAFADFPAAGKKRVVAVNGAVTAFLRKRWGLGKVRADGDLHHAVDAAVIACTTDGMIQRVSRFYTHIETSDTRGERFPEPWPRFRDELMQRLSACPQENLMQINPVYYQNVDIASIRPVFVSRMPRHKMTGAAHKETIKGRLDDAHTVQRRSITDLKLDKEGEIAGYFNPSSDTLLYNALKEQLTAFGGDGKKAFAEPFFKPRADGTPGAQVRKVKVYDKATSMVAVHEGKGVADNDTMVRIDVYFVPDDGYYWVPIYVADTVKPELPNKAVVQGKSYAEWKEMDEENFLFSLCQNDLIRIESKRTMKFKVQNSDSTLEKEAQMNCGLTYFEGGNISTGAITVTTHDNAYIVGSLGFKTLQKVQKYQVDVLGNYTLVKKEKRQNFPAQRR

SEQ ID NO: 17895 - protein, 1018 aa, unidentified
  REGION 1..1018: note = Cas Enzyme sequence
REARSARRRLRRRSLRKADLYELMEKNGLPGKAEIEQAVQAGHLPDVYALRVQALDGPVTALDFARILLHLMQRRGFRSNRKADDAQKDGKLLQAIDANTRRMEANRYRTVGEMMYRDPVFAEHKRNKAENYLSTVKRDQIIDEARLVFAAQRQYGATWASPEMEAEYLCILTRQRSFAEGPGKGSPYSGSNRVGTCTLEGKSEQRAAKAAFSFEYFTLLQKINHIRIAENGTSRTLTPAERQVLLSVCCQTDKLDFARVRKALALPEEARFNMVRYRGEQTAEACEKKEKITALPCYHKMRKALNTLRKDHIRNISREQLDAAGAALTNPENEDKLREALKQAEFEPLEIEALLTLPSFAGYGHISVKACRKLIPYLEQGMNYNDACQAAGYDFQGRQNGEKAQFLPASTEEMEDITSPVVRRAVAQTIKVVNAIIREQGESPVSIHLELAREMNKNFQQRSELDKAMRDNSAENERLMKELNELFPGRIVTGQDLVKYRLWKEQDGRCAYSIQPLELDKVITVSGYAEVDHIIPYSISFDDRRTNKVLVLASENRQKGNRLPLQYLQGKRRDDFIVYTKANVKNFRKRQNLLKERLSEEDGKGFIQRNLQDTQYIAAFMLNYIRNHLAFANCSGAGKRRVVAVNGAVTAFLRKRWGLSKVRADGDLHHAVDAAVIACTTQGMIKRVSDFCKRAETTAVRNEHFPEPWPHFRDELRQRLSACPQEDLMKINPVYYATVDISSIQPVFVSRMPRHKVTGAAHKETIKSRLDDAHTVQRRSITDLKLDKEGKIAGYFNPSSDTLLYNALKEQLTAFGGDGKKAFAEPFFKPRADGTPGAQVRKVKVYDKATSMVAVHEGKGVADNDTMVRIDVYFVPGDGYYWVPIYVADTVKLKLPNKAVVQGKSYAEWKEMDEENFLFSLCQNDLIRIESKRTMKFKVQNSDSTLEKEVQMNCGLTYFEGGNISTGAITVTTHDNAYIVGSLGFKTLQKVQKYQVDVLGNYTPVKKEKRQTFPAQRR

SEQ ID NO: 17896 - protein, 1077 aa, unidentified
  REGION 1..1077: note = Cas Enzyme sequence
MNTAYGIGLDIGIASVGWAVVALNEDAEPYGLIRCGSRVFDKAEQPKTGDSLAASRREARSTRRRLRRRSLRKADLYALMEKSGLPGRAAVEEAVLAGHLPDIYALRAQALDGPVTAMDFARILLHLMQRRGFRSNRKADDAQKDGKLLQAIDANTQRMKDNHYRTVGEMMYRDPAFAAHKRNKTENYLSTVRRDQIASEAAQLFAAQRQYGAAWASPETEAEYLTILTRQRSFDEGPGGNSPYGGNMIEKMVGTCTLEGTAEPRAAKATWSFEYFTLLQKLNHIRIEEGGNSHPLTHAQRQELLTLCYQTDKLDFARIRKVLDLPPQARFNMVRYRADQPADACEKKEKITALPCYHKMRKALNTLRKDYILTVGHDRLDAAATALTLYKSEDLLREKLQQADFEPLEINALMTLPSFSKFGHISVKACRKLIPYLEQGENYNDACRDAGYDFQGSGHGEKSILLPAEAEEFSDITSPVVRRAVAQTIKVVNAIIREQGESPVSIHLELAREMSKSFQERVDLENAMKENNADNERLMRDLHERFPGRNISGQDLVKYRLWKEQDGRCAYSLQPLELQSVITVSGYAEVDHIVPYSISFDDRRTNKVLVLASENRQKGNRLPLQYLQGTRRDNFIVYTKNNVKNYRKRQNLLKENLSAEDSSGFMQRNLQDTQYIASFMLNYIRGHLAFAAHPMAGKKRVVAVNGAVTSFLRKRWGIAKVRADGDLHHAVDAAVIACTTDGMIQRVSRFYQRTELSHARGERFPEPWPRFRDELMQRLSSCPQENLLTINPVYYNTADIAGIKPVFVSRMPRHKATGPAHKETIKGRLDDTYVTQRRSITDLKLNKDGEIDGYFNPSSDTLLYNALKERLIAFGGNGKKAFAEPFFKPCADGTPGAQVRKVKLYSKVTSTVPVHGGNGVADNDTMVRVDVYYIPGDGYYWVPIYVADTVKPVLPSRAVVAYKSCSEWKEMSEENFLFSLCKNDLVCIESNRPIKLKAANKDSTLEKELTVQRVLAYFEGGNISTGAVSVTTHDNAYIAGSLGFKTLQKVEKYQVDVLGNYTHVKKEKRQLFPAQRR

SEQ ID NO: 17897 - protein, 1074 aa, unidentified
  REGION 1..1074: note = Cas Enzyme sequence
MKHPYGIGLDIGIASVGWAVVALNENAEPYGLIRCGSRIFDKAEQPQKGDSLAAPRREARSARRRLRRRSLRKADLYELMEKNGLPGKAEIEQAVQAGHLPDVYALRVQALDGPVTALDFARILLHLMQRRGFRSNRKADDAQKDGKLLQAIDANTRRMEANRYRTVGEMMYRDPVFAEHKRNKAENYLSTVKRDQIIDEARLVFAAQRQYGATWASPEMEAEYLCILTRQRSFAEGPGKGSPYSGSNRVGTCTLEGKSEQRAAKAAFSFEYFTLLQKINHIRIAENGTSRTLTPAERQVLLSVCSQTDKLDFARIRKALALPEEARFNMVRYRGEQTAEACEKKEKITALPCYHKMRKALNTLRKDHIRNISREQLDAAGAALTNPENEDKLREALRQAEFEPLEIEALLTLPSFAGYGHISVKACRKLIPYLEQGMNYNDACQAAGYDFQGSQNGEKAQFLPASTEEMEDITSPVVRRAVAQTIKVVNAIIREQGESPVSIHLELAREMNKNFQQRSELDKAMRDNSAENERLMKELNELFPGRTVTGQDLVKYRLWKEQDGRCAYSIQPLELDKVITVSGYAEVDHIVPYSISFDDRRTNKVLVLASENRQKGNRLPLQYLQGKRRDDFIVYTKANVKNFRKRQNLLKERLSEEDGKGFIQRNLQDTQYIAAFMLNYIRNHLAFADCSGAGKRRVVAVNGAVTAFLRKRWGLGKVRADGDLHHAVDAAVIACTTQGMIKRVSDFCKRAETTAVRNEHFPEPWPHFRDELTQRLSACPQEDLMKINPVYYATVDISSIQPVFVSRMPRHKVTGAAHKETIKSRLDDTHVVQRRNITELKLDKDGEIAGYFNRSSDTLLYNALKARLLAFGGDGKKAFAEPFYKPRADGTPGARVQKVKICDKVTSTVPVHGGKGVADNDTMVRMDVYFVPGDGYYWVPIYVADTVKLELPNKAVVQGKSYAEWKEMDEENFLFSLCQHDLVRIESKRLMKFKVQNRDSTLEKEMPVNKILAYFEGGNISTGAITVTTHDDAYIADGLGFKTLQKVQKYQVDVLGNYTPVKKEKRQTFPAQRR

SEQ ID NO: 17898 - protein, 1077 aa, unidentified
  REGION 1..1077: note = Cas Enzyme sequence
MDTAYGIGLDIGIASVGWAVVALNEDAEPYGLIRCGSRVFDKAEQPKTGDSLAASRREARSTRRRLRRRSLRKADLYALMEKSGLPGRAAVEEAVLAGHLPDIYALRAQALDGPVTAMDFARILLHLMQRRGFRSNRKADDAQKDGKLLQAIDANTQRMKDNHYRTVGEMMYRDPAFATHKRNKTENYLSTVRRDQIASEAAQLFAAQRQYGAAWASPETEAEYLTILTRQRSFDEGPGGNSPYGGNMIEKMVGTCTLEGTAEPRAAKATWSFEYFTLLQKLNHIRIEEGGNSHPLTHAQRQELLTLCYQTDKLDFARIRKVLDLPPQARFNMVRYRADQPADACEKKEKITALPCYHKMRKALNTLRKDYILTVGHDRLDAAATALTLYKSEDLLREKLQQADFEPLEINALLTLPSFSKFGHISVKACRKLIPYLEQGENYNDACRDAGYDFQGSGHGEKSILLPAEAEKFSDITSPVVRRAVAQTIKVVNAIIREQGESPVSIHLELAREMSKSFQERADLENAMKENNADNERLMRDLHERFPGRNISGQDLVKYRLWKEQDGRCAYSLQPMDLQSVITVSGYAEVDHIVPYSISFDDRRTNKVLVLASENRQKGNRLPLQYLQGTRRDNFIVYTKSNVKNYRKRQNLLKENLSAEDSNGFMQRNLQDTQYIASFMLNYIRGHLAFAAHPMAGKKRVIAVNGAVTSFLRKRWGIAKVRADGDLHHAVDAAVIACTTDGMIQRVSRFYQREELSHARGERFPEPWPRFRDELMQRLSSCPQENLLTINPVYYTTADIAGIKPVFVSRMPRHKATGPAHKETIKGRLDDTYVTQRRSITDLKLNKDGEIDGYFNPSSDTLLYNALKDRLVAFGGNGKKAFAEPFFKPRADGTPGAQVRKVKLYSKVTSTVPVHGGNGVADNDTMVRVDVYYIPGDGYYWVPIYVADTVKPILPNCAFVRCKSIIIKKEMSEENFLFSLCKNDLVCIESKRPIKLKAANEDSTLEKELTVQRVLAYFEGGNISTGAVSVTTHDNAYIAGSLGFKTLQKVEKYQVDVLGNYTRVKKEKRQLFPAQRR

SEQ ID NO: 17899 - protein, 1000 aa, unidentified
  REGION 1..1000: note = Cas Enzyme sequence
DLYELMEKNGLPGKAEIEQAVQAGHLPDVYALRVQALDGPVTALDFARILLHLMQRRGFRSNRKADDAQKDGKLLQAIDANTRRMEANRYRTVGEMMYRDPVFAEHKRNKAENYLSTVKRDQIIDEARLVFAAQRQYGATWASPEMEAEYLCILTRQRSFAEGPGKGSPYSGSNRVGTCTLEGKSEQRAAKAAFSFEYFTLLQKINHIRIVENGTSRTLTPAERQVLLSVCSQTDKLDFARIRKALALPEEARFNMVRYRGEQTAEACEKKEKITALPCYHKMRKALNTLRKDHIRNISREQLDAAGAALTNPENEDKLREALKQAEFEPLEIEALLTLPSFAGYGHISVKACRKLIPYLEQGMNYNDACQAAGYDFQGRENGEKAQFLPASTEEMEDITSPVVRRAVAQTIKVVNAIIREQGESPVSIHLELAREMNKNFQQRSELDKAMRDNSAENERLMKELNELFPGRTVTGQDLVKYRLWKEQDGRCAYSIQPLELDKVITVSGYAEVDHIVPYSISFDDRRTNKVLVLASENRQKGNRLPLQYLQGKRRDDFIVYTKANVKNFRKRQNLLKERLSEEDGKGYIQRNLQDTQYIAAFMLNYIRNHLAFADCSGAGKRRVVAVNGAVTAFLRKRWGLGKVRADGDLHHAADAAVIACTTQGMIKRVSDFCKRAETTAVRNEHFPEPWPRFRDELRQRLSACPQEDLMKINPVYYATVDISSIQPVFVSRMPRHKVTGAAHEETIRSQVDEKYTAVRKSITELSLDKDGKIKDYFKPRSDTLLYEALKKRLTEFGGNAKKAFAEPFYKPRADGTPGAQVRKVKVVAKMSNTIPVRSGGGVAKGGDMIRIDVYYVPGDGYYWVPIYVADTVKETLPNKAVVRDKTMEEWKEMKEDDFLFSLYSNDLILVERDKPICFSLMHEDSTLPKKYETKKELVYYKGGDISNGGIRIETHEGAYFLKSLTFGIVQKVQKYQVDVLGNYTPVKKEKRQTFPAQRR

SEQ ID NO: 17900 - protein, 1077 aa, unidentified
  REGION 1..1077: note = Cas Enzyme sequence
MNTAYGIGLDIGIASVGWAVVALNEDAEPYGLIRCGSRVFDKAEQPKTGDSLAASRREARSTRRRLRRRSLRKADLYALMEKSGLPGRAAVEEAVLVGHLPDIYALRAQALDGPVTAMDFARILLHLMQRRGFRSNRKADDAQKDGKLLQAIDANTQRMKDNHYRTVGEMMYRDPAFATHKRNKTENYLSTVRRDQIASEAAQLFAAQRQYGAAWASPETEAEYLTILTRQRSFDEGPGGNSPYGGNMIEKMVGTCTLEGTAEPRAAKATWSFEYFTLLQKLNHIRIEEGGNSHPLTHAQRQELLALCYQTDKLDFARIRKVLDLPPQARFNMVRYRGDQPADACEKKEKITALPCYHKMRKALNTLRKDYILTVSHDRLDAAATALTLYKSEDLLREKLQQADFEPLEINALLTLPSFSKFGHISVKACRKLIPYLEQGENYNDACRDAGYDFQGSGHGEKSIFLPAEAEEFSDITSPVVRRAVAQTIKVVNAIIREQGESPVSIHLELAREMSKSFQERADLENAMKENNADNERLMRDLHELFPGRNISGQDLVKYRLWKEQDGRCAYSLQPLELQSVITVSGYAEVDHIVPYSISFDDRRTNKVLVLAAENRQKGNRLPLQYLQGTRRDNFIVYTKNNVKNYRKRQNLLKENLSAEDSSGFMQRNLQDTQYIASFMLNYIRGHLAFAAHPMAGKKRVVAVNGAVTSFLRKRWGIAKVRADGDLHHAVDAAVIACTTDGMIQRVSRFYQRTELSHARGERFPEPWPRFRDELMQRLSSCPQENLLTINPVYYTTADIAGIKPVFVSRMPRHKATGPAHKETIKGRLDDTYVTQRRSITDLKLNKDGEIDGYFNPSSDTLLYNALKERLIAFGGNGKKAFAEPFFKPRADGTPGAQVRKVKLYSKVTSTVPVHGGNGVADNDTMVRVDVYYIPGDGYYWVPIYVADTVKPILPNRAVVAYKSCSEWKEMSEENFLFSLCKNDLVCIESNRPIKLKAANKDSTLEKELTVQRVLAYFEGGNISTGAVSVTTHDNAYIAEGLGFKTLQKVEKYQVDVLGNYTRVKKEKRQLFPAQRR

SEQ ID NO: 17901 - protein, 1077 aa, unidentified
  REGION 1..1077: note = Cas Enzyme sequence
MKHPYGIGLDIGIASVGWAVVALNENAEPYGLIRCGSRIFDKAEQPKTGESLAAPRREARSTRRRLRRRSLRKADLYELMAQNGLPGRAKIEEAVQAGHLPDIYALRVQALDGPVTAMDFARILLHLMQRRGFRSNRKADDAQKDGKLLQAIDANTRRMKENHYRTVGEMMYRDPVFAEHKRNKSENYLSTVRRDQIVEEAVQLFAAQRQYGAAWASQEMEAEYLTILTRQRSFDEGPGGNSPYGGNIVEKMVGTCTLEGQAEPRAAKATWSFEYFTLLQKINHIRIIESGAARILTAEERQELLSVCYQTDKLDFARIRKALALSEQARFNMVRYRDGQTTEDCEKKEKIVCLPCYHKMRKVLNTLRKDYIRSVSRDRLDAAATALTMYKNEATLRAKLEEAQFEPLEVDALMTLPSFSGFGHISVKACRKLIPYLEQGLNYSDACKEAGYDFQGNYRGEKSQFLPASTEEMEDITSPVVRRAVAQTIKVVNAIIREQGESPVNIHLELAREMSKNFQQRNDLDKAMKDNNAENERLMKDLHELFPGRNITGQDLVKYRLWKEQDGRCAYSLQPLELEKTITVSGYAEVDHIVPYSISFDDRRANKVLVLASENRQKGNRLPLQYLQGKRRDDFIVYTKASVKNYRKRQNLLKEKLSEEDSKGFMQRNLQDTQYIASFMLNYIRSHLAFADFPAAGKKRVVAVNGAVTAFLRKRWGLGKVRADGDLHHAVDAAVIACTTDGMIQRVSRFYTHIETSDTRGERFPEPWPRFRDELMQRLSACPQENLMQINPVYYQNVDIASIRPVFVSRMPRHKMTGAAHKETIKGRLDDAHTVQRRSITDLKLDKEGEIAGYFNPSSDTLLYNALKEQLTAFGGDGKKAFAEPFFKPRADGTPGAQVRKVKVYDKATSMVAVHEGKGVADNDTMVRIDVYFVPGDGYYWVPIYVADTVKPELPNKAVVAYKNYDEWKEMDEENFLFSLCQNDLIRIESKRTMKFKVQNSDSTLEKETQMNCGLTYFEGGNISTGAITVTTHDNAYIVGSLGFKTLQKVQKYQVDVLGNYTLVKKEKRQNFPAQRR

SEQ ID NO: 17902 - protein, 1077 aa, unidentified
  REGION 1..1077: note = Cas Enzyme sequence
MKHPYGIGLDIGIASVGWAVVALNENAEPYGLIRCGSRIFDAAEQPNTGESLAAPRREARSTRRRLRRRSLRKADLYELMAQNGLPGRAKIEEAVQAGHLPDIYALRVQALDGPVTAMDFARILLHLMQRRGFRSNRKADDAQKDGKLLQAIDANTRRMEENHYRTVGEMMYRDPVFAEHKRNKSENYLSTVRRDQIAEEAVQLFAAQRQYGAAWASPEMEAEYLTILTRQRSFDEGPGGNSPYGGNIVEKMVGTCTLEGQAEPRAAKATWSFEYFTLLQKINHIRIIESGAARILTAEERQELLSVCYQTDKLDFAKIRKALALSEQARFNMVRYRDGQTTEDCEKKEKIVCLPCYHKMRKVLNTLRKDYIRSVSRDRLDAAATALTMYKNETTLRSKLEEAQFEPLEVDALMTLPSFSGFGHISVKACRKLIPYLEQGLNYNDACKEAGYDFQGNYRGEKSQFLPASTEEMEDITSPVVRRAVAQTIKVVNAIIREQGESPVNIHLELAREMSKNFQQRNDLDKAMKDNNAENERLMKDLHELFPGRNITGQDLVKYRLWKEQDGRCAYSLQPLELEKAITVSGYAEVDHIVPYSISFDDRRANKVLVLASENRQKGNRLPLQYLQGKRRDDFIVYTKASVKNYRKRQNLLKEKLSEEDSKGFMQRNLQDTQYIASFMLNYIRSHLAFADFPAAGKKRVVAVNGAVTAFLRKRWGLGKVRADGDLHHAVDAAVIACTTDGMIQRVSRFYTHIETSDTRGERFPEPWPRFRDELMQRLSACPQENLMQINPVYYQNVDIASIRPVFVSRMPRHKMTGAAHKETIKGRLDDAHTVQRRSITDLKLDKEGEIAGYFNPSSDTLLYNALKEQLTAFGGDGKKAFAEPFFKPRADGTPGAQVRKVKVYDKATSMVAVHEGKGVADNDTMVRIDVYFVPGDGYYWVPIYVADTVKPELPNKAVVAYKNYDEWKEMDEGNFLFSLCQNDLIYLERKSAINFKVKNSESTLEKEIVRNKGIVYFEGGDIATAAISVTTPEDAYFSRGLGFKTLQKVQKYQVDVLGNYTLVKKEKRQNFPAQRR

SEQ ID NO: 17903 - protein, 1077 aa, unidentified
  REGION 1..1077: note = Cas Enzyme sequence
MKHPYGIGLDIGIASVGWAVVALNENAEPYGLIRCGSRIFDKAEQPKTGESLAAPRREARSTRRRLRRRSLRKADLYELMAQNGLPGRAEIEEAVQAGHLPDIYALRVQALDDPVTAMDFARILLHLMQRRGFRSNRKADDAQKDGKLLQAIDANTRHMEENHYRTVGEMMYRDPVFAEHKRNKSENYLSTVRRDQIVEEAVQLFAAQRQYGATWTSPEMEAEYLTILTRQRSFDEGPGGNSPYGGNIVEKMVGTCTLEGQAEPRAAKATWSFEYFTLLQKINHIRIIESGAARILTAEERQELLSVCYQTDKLDFARIRKALALSEQARFNMVRYRDGQTTEDCEKKEKIVCLPCYHKMRKVLNTLRKDYIRSVSRDRLDAAATALTMYKNETTLRAKLEEAQFEPLEVDALMTLPSFSGFGHISVKACRKLIPYLEQGLNYNDACKEAGYDFQGNYRGEKSQFLPASTEEMEDITSPVVRRAVAQTIKVVNAIIREQGESPVNIHLELAREMSKNFQQRNDLDKAMKDNNAENERLMKDLHELFPGRNITGQDLVKYRLWKEQDGRCAYSLQPLELEKAITVSGYAEVDHIVPYSISFDDRRANKVLVLASENRQKGNRLPLQYLQGKRRDDFIVYTKASVKNYRKRQNLLKEKLSEEDSKGFMQRNLQDTQYIASFMLNYIRSHLAFADFPAAGKKRVVAVNGAVTAFLRKRWGLGKVRADGDLHHAVDAAVIACTTDGMIQRVSRFYTHIETSDTRGERFPEPWPRFRDELMQRLSACPQENLMQINPVYYQNVDIASIRPVFVSRMPRHKMTGAAHKETIKGRLDDAHTVQRRSITDLKLDKEGEIAGYFNPSSDTLLYNALKEQLTAFGGDGKKAFAEPFFKPRADGTPGAQVRKVKVYDKATSMVAVHEGKGVADNDTMVRIDVYFVPGDGYYWVPIYVADTVKPELPNKAVIAHKNYAEWKEMDEKDFLFSLCPNDLIRVESKRTMKFKVQNKDSTLEKEMQTNGDMVYFEGGNISGGSITVATHDGAYMVESLGLKTLQKVQKYQVDALGNYTLVKKEKRQYFPAQRR

SEQ ID NO: 17904 - protein, 1074 aa, unidentified
  REGION 1..1074: note = Cas Enzyme sequence
MKHPYGIGLDIGIASVGWAVVALNENAEPYGLIRCGSRIFDKAEQPKTGDSLAAPRREARSARRRLRRRSLRKADLYELMEKNSLPGKAEIEQAVQAGHLPDVYALRVQALDGPVTALDFARILLHLMQRRGFRSNRKADDAQKDGKLLQAIDANTRRMEANRYRTVGEMMYRDPVFAEHKRNKEENYLSTVKRDQIIDEARLVFAAQRQYGATWASPEMEAEYLCILTRQRSFAEGPGKGSPYSGSNRVGTCTLEGKSEQRAAKAAFSFEYFTLLQKINHIRIAENGTSRTLTPAERQVLLSVCCQTDKLDFARVRKALALPEEARFNMVRYRGEQTAEACEKKEKITALPCYHKMRKALNTLRKDYIRNISREQLDAAGAALTNPENEDKLREALKQAEFEPLEIEALLTLPSFAGYGHISVKACRKLIPYLEQGMNYNDACQAAGYDFQGRQNGEKAQFLPASTEEMEDITSPVVRRAVAQTIKVVNAIIREQGESPVSIHLELAREMNKNFQQRSELDKAMRDNSAENERLMKELNELFPGRTVTGQDLVKYRLWKEQDGRCAYSIQPLELDKVITVSGYAEVDHIVPYSISFDDRRTNKVLVLASENRQKGNRLPLQYLQGKRRDDFIVYTKANVKNFRKRQNLLKERLSEEDGKGYIQRNLQDTQYIAAFMLNYIRNHLAFADCSGAGKRRVVAVNGAVTAFLRKRWGLSKVRADGDLHHAADAAVIACTTQGMIKRVSDFCKRAETTAMRNEHFPEPWPHFRDELTQRLSVCPQEDLMKINPVYYATVDISSIQPVFVSRMPRHKVTGAAHKETIKSRLDDTHVVQRRNITELKLDKDGEIAGYFNRSSDTLLYNALKARLLAFGGDGKKAFAEPFYKPRADGTPGARVQKVKICDKVTSTVPVHGGKGVADNDTMVRIDVYYVPGDGYYWIPVYVADTVKPELPSKAVVAYKSSAEWKEMKDEDFLFSLCQHDLVRIESKRLMKFKVQHRDSTLEKEMPVNKILAYFEGGDIATGAVTLTTHDDAYIATGLGFKTLQKVQKYQVDVLGNYTPVKKEKRQTFPAQRR

SEQ ID NO: 17905 - protein, 1077 aa, unidentified
  REGION 1..1077: note = Cas Enzyme sequence
MKHPYGIGLDIGIASVGWAVVALNENAEPYGLIRCGSRIFDKAEQPKTGESLAAPRREARSTRRRLRRRSLRKADLYELMAQNGLPGRAKIEEAVQAGHLPDIYALRVQALDGPVTAMDFARILLHLMQRRGFRSNRKADDAQKDGKLLQAIDANTRRMEENHYRTVGEMMYRDPVFAEHKRNKSENYLSTVRRDQIVEEAVQLFAAQRQYGAAWASPEMEAEYLTILTRQRSFDEGPGGNSPYGGNIVEKMVGTCTLEGQAEPRAAKATWSFEYFTLLQKINHIRIIESGAARILTAEERQELLSVCYQTDKLDFARIRKALALSEQARFNMVRYRDGQTTEDCEKKEKIVCLPCYHKMRKVLNTLRKDYIRSVSRDRLDAAATALTMYKNEATLRAKLEEAQFEPLEVDALMTLPSFSGFGHISVKACRKLIPYLEQGLNYNDACKEAGYDFQGNYRGEKSQFLPASTEEMEDITSPVVRRAVAQTIKVVNAIIREQGESPVNIHLELAREMSKNFQQRNDLDKAMKDNNAENERLMKDLHELFPGRNITGQDLVKYRLWKEQDGRCAYSLQPLELEKAITVSGYAEVDHIVPYSISFDDRRANKVLVLASENRQKGNRLPLQYLQGKRRDDFIVYTKASVKNYRKRQNLLKEKLSEEDSKGFMQRNLQDTQYIASFMLNYIRSHLAFADFPAAGKKRVVAVNGAVTAFLRKRWGLGKVRADGDLHHAVDAAVIACTTDGMIQRVSRFYTHIETSDTRGERFPEPWPRFRDELMQRLSACPQENLMQINPVYYQNVDIASIRPVFVSRMPRHKATGKVHEDTIRSYVSKGITAVRTSITDLKLDEKGEIEGYFNKESDLLLYNALKRRLEEFGGNAKKAFAEPFYKPRADGTPGAQVRKVKIVDKTSNVICVRDGGGVSKSNNMVRIDVYYVPGEGYYWVPIYVADTVKSTLPNKAVLRNKGMDDWKEMNEKDFQFSLYNNDLVFIERDSPINFSLTNEKSTLPSKFSTERTFVYYQKGNISNAAIKVETPDGAYVFNGLTLNTVRKIGKYQVDVLGNYTLVKKEKRQNFPAQRR

SEQ ID NO: 17906 - protein, 926 aa, unidentified
  REGION 1..926: note = Cas Enzyme sequence
NHRGFKSNRKKDSALLKSAPEETGAPEETGDSAAKEAKKMLQATRKLSEELEKSDHETLGAMLASRDAQRNKKGVYKHTPLRDLLQEEVNIIFERQKEFGNTRLNTALRDQYSDLAFSQRPLRSTLDMVGYCQFYPQAKRAPKHAYSAEMFIAWSRLHNLRIVQPGDAEGRKLTQAERQEILSEAHKKKSGVTYKAVRKIVLEDDPGYTFNFVRYGKTKDPEGAKFIVLPGFQAIKKALSGADLPEDDQKKILNDADILNHIAYAFTFFNDEAEIHKILRQGGVDEEIIDPLLDGGLDFKGTINLSIRATKELLPRMERGVPYDKACLESGLNHSPKSSGGYKRLPPAPKTKNPVVDRALAQARKVINAIITRYERVPDAIHIEMARDLSKSRSERDKIDKRMNQNRKKREQLEKEAKEKEVHPDTGMLKYDLWKSQGGLCIYSGKYIDIKNLDDAEIDHALPRSRTWDNSYYNKVLCLASENQDKGNNTPYEYLGGGEAWEAFKARIEKLPHPKKKKLLIENLDEAMQNKWKSRNLNDTRYMARALKSHIESSLGTEEGNPPKVLTVNGQMTHMLRNMWGFKKIRSEGHKHHALDATAVAFCSRSMVKKVNEWNRSERRKDSSISFPTPWGATKEQRKDFRQYVSGVIEDIFVSHQPQRKVTGTAHESTALSKRKDKDGNRIFVKRVKLDKGFGPKQLKRLYGVELVDGVPRGSNAKLYNAIKERLERHASEAKGKHANPFSEPLYMPTNTPGKKGPVIRSVTINDGKANNVLRLPNGAYVKSGHLIRTDIYYKENKKGKRRYFMAPIYLGSHAAGEEPKILVPGEPRENWIPIDDSYTFMFSLFKNDYVVLEKSSGVKTEGYFCGIDISVETVALTDHDEIKKKTRMGIKTLKSIKKYDVNVFGEKHEVKREKYRVMAHPSNSK

SEQ ID NO: 17907 - protein, 1074 aa, unidentified
  REGION 1..1074: note = Cas Enzyme sequence
MKHPYGIGLDIGIASVGWAVVALNENAEPYGLVRCGSRIFDKAEQPQKGDSLAAPRREARSTRRRLRRRSLRKADLYELMEKNGLPGKAEIEQAVQAGHLPDVYALRVQALDGPVTALDFARILLHLMQRRGFRSNRKADDAQKDGKLLQAIDANTRRMEANRYRTVGEMMYRDPVFAEHKRNKAENYLSTVKRDQIIDEARLVFAAQRQYGATWASPEMEAEYLCILTRQRSFAEGPGKGSPYSGSNRVGTCTLEGKSEQRAAKAAFSFEYFTLLQKINHIRIAENGTSRTLTPAERQVLLSVCCQTDKLDFARVRKALALPEEARFNMVRYRGEQTAEACEKKEKITALPCYHKMRKALNTLRKDHIRNISREQLDAAGAALTNPENEDKLREALKQAEFEPLEIEALLTLPSFAGYGHISVKACRKLIPYLEQGMNYNDACQAAGYDFQGRQNGEKAQFLPASTEEMEDITSPVVRRAVAQTIKVVNAIIREQGESPVSIHLELAREMNKNFQQRSELDKAMRDNSAENERLMKELNELFPGRTVTGQDLVKYRLWKEQDGRCAYSIQPLELDKVITVSGYAEVDHIIPYSISFDDRRTNKVLVLASENRQKGNRLPLQYLQGKRRDDFIVYTKANVKNFRKRQNLLKERLSEEDGKGYIQRNLQDTQYIAAFMLNYIRNHLAFADCSGAGKRRVVAVNGAVTAFLRKRWGLSKVRADGDLHHAADAAVIACTTQGMIKRVSDFCKRAETTAVRNEHFPEPWPHFRDELTQRLSACPQEDLMKINPVYYATVDISSIQPVFVSRMPRHKVTGAAHEEMIRSQVNEKYTAVRKSITELSLDKDGKIKDYFNPSSDTLLYEALKKRLTEFGGNAKKAFAEPFYKPRADGTPGAQVRKVKVVAKMSNTIPVRSGGGVAKGGDMIRIDVYYVPGDGYYWVPIYVADTVKETLPNKAVVRDKTMEEWKEMKEDDFLFSLYSNDLILVERDKPICFSLMHEDSTLPKKYETKKELVYYKGGDISNGGIRIETHEGAYFLKSLTFGIVQKVQKYQVDVLGNYTPVKKEKRQTFPAQRR

SEQ ID NO: 17908 - protein, 1217 aa, unidentified
  REGION 1..1217: note = Cas Enzyme sequence
MKYNYVLGLDIGISSVGWGLLALDENNNPYKIIDVGSRIFSPGEVEKTGDSKAKERREKRGTRRVIRRREFRLDRVRNLLYEKGYLKGNITSNIVSVKNEELTTLFNNMINNYYKNKDTNPYKLKVEALDRELTNDELSIILVHYAKKRGYKSNREESNDNDNGKVKEAIKENTNLMEEKKYRTISEMYINDEKFKNKIKNGPDDYKLSVTNEMYLEEINKVLDSQIGFGLIDDNFKNEYLEIYNSRRHYSEGPGYYYEKDANGNKIKVRSPYGGDLIKKMTGICSFDKKARAPKYAFSSELFVSISKLVNLRYKIDDDSYKQLTKEQINELIDEAKNKNKVTYKSLIKILGIENIKVKDLNLSKSEYIKVIDELKKKLNISKEEIIDIYSLDEENKKIYNDIYNEKLFSKTIIEFKGYNLLKKAITLSYNSDIWNDVKDNIEFLDELALYCTDYKVNNEIQEHIHNSLIIDSRFDDSNFVENLPNFKDHLMLSTDIIRKLIPIMLEGITYDKAMDKIGYNHSNLYKDTIKEDLLVPVYVSKNITNQRVIRSLTQARKVINAIIKKYGSPKIINIETARELAKTQKERRIIEKNQQDKQYENERIKKHLVELGLFSDESKITGNDLLKYKLWQEQKEFCGYSMKKIKLEDLFSNNIVQIDHILPYSRTYNDNYLNKTLVYTKYNQDKGNKTPYEWFGKTDKWQEYESFINNLSISQNKKDNYLLKNLDQDTEREMREQNLNDTKYISRELSSLIKAYLNVDEVNVFPGAITAKLRARWGFNRLTHSYISKTYIMPEDMKKGINKDRDNHLHHAMDALVIASITKSLQQKITLYEKFSRYVDGITRNELDKISTGNINNDLYNYYDEETGEIKELELREYIKNQVAQNNIYFSKHNVSKLIFPTPYNNFVEEAKLRVYERDLEVLKWNLNNLGTYTSSELNRIHILTPSIAKNKISGRLHEETYYGLKEVGAGDDKVTYKTLKTPISKVKKKDLDNIPDCKGGSKDIYNALVKWFGNCETGEEALKMHDGKYPINSNDKEQKEIRKIKVYTKYNDTGHIVNNSNVEKGGIYRIDIFKSKDKGDNKLYFTAYDIFEIEQIKEYEKGKNINFSIKLEYGQGKNNEIILYEDVTKKYDLIMSIYKNDLIRIKTKTGNESTAYVVGFSGGKLEIKSTIGDGYDIIGNNNIFDKGMERYRVTSSTIENMDKLSISILGEISGL

SEQ ID NO: 17909 - protein, 1098 aa, unidentified
  REGION 1..1098: note = Cas Enzyme sequence
MRKKIRYVLGLDIGIASVGWAVLLLDGEDNVCGIVRAGVHTFDEVTVGKEKITATANRRGYRSGRRLVRRKAHRIQRVKSLLQEMNIVSKKDMDEYYSGAVEDVYFLRWAAIQDEPVYILNNRELAQLLIYFAKHRGYKSTAVHEQEDEDDKKVLSAISENKKYMHEHGYRTAGEMIYKDAKFRQKRCGSSEENELLVARNSEGNYSNSISRDLLVEEVRIIFEKQRELGNTLATKELEERFLSIMQSQRNYDGGPGEGSPYGGNLIEKMVGECTFEKGEKRACKASYISERFVLLEKINHLRICTADGNERPLNEDEKSAVIKLAYKTKVVKYNAIRKELKLDLEERFGGLTYSKVNNGDFKQRILDTEKKSDFISLKYWHEVKDILNLSYKDLTEEQKQLMDSVGKVLTYYKSEEKRREELSDLSLNQAQIEKLLKLNYAKFHNLSFKVMKKLMPELEAGYSYMESCLRVGYDSLSTDGVKTKYISKELLNEAVDKIMNPTVKRAVRRTVRILNEIVKLYGSPVEIHIEMARDLPHSGEVKKKIATAQKNNNKEKKEAIKFISENFGKIESDIRRKDILRYRLWKNQSQMDLYSEKLIPVEDILDYEKYEVDHIIPYSRSFNDSFNNKMLVKKKDNQDKKNHTPHEYIGHDDEAWNKFVKMVNNYVLSPGKRKNALTKSSDSDEWRSRNLNDTRYTTKVVADLIRRHLVVEPYFNGARNKHVYPLNGGVTARLRHEWGLEKDREKSDKHHAQDAIVIACCTEKMIWKMSNIYKQEELGGVVRKGNKLVDRRTGEILETTALPWKWFREEVEMVMADHPEDYIEMAKDRGYMGDIPKPIFVSRLPVKKKTGVISENTIRAVDEASSRTVEKTSLDKLKLIEVNGKKQIKDYYRPEDDVLLYNKLLDRLIRYGNAKDAFAEPFYKPKKDGSDGPIVKKVKLYVGVADDQVKVRGRGEDIDREGVKDRGGMYRCDIFRKDGKYYMVPVYYKDLYLHRMPTKAVVAHKETADWEKMDDKDFLFSLYPDDLIKVQKKNKEIENGYYKTSDRYSAGISYVQHDLGAKSYVRLCIQNLAIFEKLNVDILGNIYSCSKEEREWL

SEQ ID NO: 17910 - protein, 1098 aa, unidentified
  REGION 1..1098: note = Cas Enzyme sequence
MRKKIRYVLGLDIGIASVGWAVLLLDGEDNVCGIVRAGVHTFDEVTVGKEKITATANRRGYRSGRRLVRRKAHRIQRVKSLLQEMNIVSKKDMDEYYSGAVEDVYFLRWAAIQDEPVYILNNRELAQLLIYFAKHRGYKSTAVHEQEDEDDKKVLSAISENKKYMHEHGYRTAGEMIYKDAKFRQKRCGSSEENELLVARNSEGNYSNSISRDLLVEEVRIIFEKQRELGNTLATKELEERFLSIMQSQRNYDEGPGEGSPYGGNLIEKMVGECTFEKGEKRACKASYTSERFVLLEKINHLRICTADGDERPLNEDEKSAVIKLAYKTKVVKYNAIRKELKLDLEERFGGLTYSKVNNGDFKQRILDTEKKSDFISLKYWHEVKDILNLSYKDLTEEQKQLMDSVGKVLTYYKSEEKRREELSDLSVNQAQIEKMLKLNYAKFHNLSFKAMKKLMPELEAGYSYMESCLRVGYDSLSTDGVKTKYISKELLNEAVDKIMNPTVKRAVRRTVRILNEIVKLYGSPVEIHIEMARDLPHSGEVKKKIATAQKNNNKEKKEAIKFISENFGKIESDIRRKDILRYRLWKNQSQMDLYSEKLIPVEDILDYEKYEVDHIIPYSRSFNDSFNNKVLVKKKDNQDKKNHTPHEYIGHDDEAWNKFVKMVNNYVLSPGKRKNALTKSSDSDEWRSRNLNDTRYTTKVVADLIRRHLVFEPYFNGARNKHVYPLNGGITARLRHEWGLEKDREKSDKHHAQDAIVIACCTEKMIWKMSNIYKQEELGGVVRKGNKLVDRRTGEILETTALPWKWFREEVEMVMADHPEDYIERAKDRGYMGDIPKPIFVSRLPVKKKTGVISENTIRAVDEASSRTVEKTSLDKLKLIAVNGKKQIKDYYRPEDDVLLYNKLLDRLIRYGNAKDAFAEPFYKPKKDGSDGPIVKKVKLYVGVADDQVKVRGRGEDIDREGVKDRGGMYRCDIFRKDGKYYMIPVYYKDLYLHRMPTKAVVAHKETADWKKMDDKDFLFSLYPDDLIKVQKKNKEIENGYYKTSDRYSAGISYVQHDLGAKTYVRLCIQNLAIFEKLNVDILGNIYSCSKEEREWL

SEQ ID NO: 17911 - protein, 1098 aa, unidentified
  REGION 1..1098: note = Cas Enzyme sequence
MRKKIRYVLGLDIGIASVGWAVLLLDGEDNVCGIVRAGVHTFDEVTVGKEKITATANRRGYRSGRRLVRRKAHRIQRVKSLLQEMNIVSKKDMDEYYSGAVEDVYFLRWAAIQDEPVYILNNRELAQLLIYFAKHRGYKSTAVHEQEDEDDKKVLSAISENKKYMHEHGYRTAGEMIYKDAKFRQKRCGSSEENELLVARNSEGNYSNSISRDLLVEEVRIIFEKQRELGNTLATKELEDRFLSIMQSQRNYDEGPGEGSPYGGNLIEKMVGECTFEKGEKRACKASYTSERFVLLEKINHLRICTADGNERPLNEDEKSAVIKLAYKTKVVKYNAIRKELKLDLEERFGGLTYSKVNNGDFKQRILDTEKKSDFISLKYWHEVKDILNLSYKDLTEEQKQLMDSVGKVLTYYKSEEKRREELSDLSLNQAQIEKMLKLNYAKFHNLSFKAMKKLMPELEAGYSYMESCLRVGYDSLSTDGVKTKYISKELLNEAVDKIMNPTVKRAVRRTVRILNEIVKLYGSPVEIHIEMARDLPHSGEVKKKIATAQKNNNKEKKEAIKFISENFGKIESDIHRKDILRYRLWKNQSQMDLYSEKLIPVEDILDYEKYEVDHIIPYSRSFNDSFNNKVLVKKKDNQDKKNHTPHEYIGHDDEAWNKFVKMVNNYVLSPGKRKNALTKSSDSDEWRSRNLNDTRYTTKVVADLIRRHLVFEPYFNGARNKHVYPLNGGVTARLRHEWGLEKDREKSDKHHAQDAIVIACCTEKMIWKMSNIYKQEELGGVVRKGNKLVDRRTGEILETTALPWKWFREEVEMVMADHPEDYIERAKDRGYMGDIPKPIFVSRLPVKKKTGVISENTIRGVDEASSRTVEKTSLDKLKLIEVNGKKQIKDYYRPEDDVLLYNKLLDRLIRYGNAKDAFAEPFYKPKKDGSDGPIVKKVKLYVGVADDQVKVRGRGEDIDREGAKDRGGMYRCDIFRKDGKYYMVPVYYKDLYLHRMPTKAVVAHKETADWKEMDDKDFLFSLYPDDLIKVQKKNKEIENGYYKTSDRYSAGISYVQHDLGAKSYVRLCIQNLAIFEKLNVDILGNIYSCSKEEREWL

SEQ ID NO: 17912 - protein, 1098 aa, unidentified
  REGION 1..1098: note = Cas Enzyme sequence
MRKKIRYVLGLDIGIASVGWAVLLLDGEDNVCGIVRAGVHTFDEVTVGKEKITATANRRGYRSGRRLVRRKAHRIQRVKSLLQEMNIVSKKDMDEYYSGAVEDVYFLRWAAIQDEPVYILNNRELAQLLIYFAKHRGYKSTAVHEQEDEDDKKVLSAISENKKYMHEHGYRTAGEMIYKDAKFRQKRCGSSEENELLVARNSEGNYSNSISRDLLVEEVRIIFEKQRELGNTLATKELEERFLSIMQSQRNYDGGPGEGSPYGGNLIEKMVGECTFEKGEKRACKASYISERFVLLEKINHLRICTADGNERPLNEDEKSAVIKLAYKTKVVKYNAIRKELKLDLEERFGGLTYSKVNNGDFKQRILDTEKKSDFISLKYWHEVKDILNLSYKDLTEEQKQLMDSVGKVLTYYKSEEKRREELSDLSLNQAQIEKMLKLNYAKFHNLSFKVMKKLMPELEAGYSYMESCLRVGYDSLSTDGVKTKYISKELLNEAVDKIMNPTVKRAVRRTVRILNEIVKLYGSPVEIHIEMARDLPHSGEVKKKIATAQKNNNKEKKEAIKFISENFGKIESDIRRKDILRYRLWKNQSQMDLYSEKLIPVEDILDYEKYEVDHIIPYSRSFNDSFNNKMLVKKKDNQDKKNHTPHEYIGHDDEAWNKFVKMVNNYVLSPGKRKNALTKSSDSDEWRSRNLNDTRYTTKVVADLIRRHLVVEPYFNGARNKHVYPLNGGVTARLRHEWGLEKDREKSDKHHAQDAIVIACCTEKMIWKMSNIYKQEELGGVVRKGNKLVDRRTGEILETTALPWKWFREEVEMVMADHPEDYIEMAKDRGYMGDIPKPIFVSRLPVKKKTGVISENTIRAVDEASSRTVEKTSLDKLKLIEVNGKKQIKDYYRPEDDVLLYNKLLDRLIRYGNAKDAFAEPFYKPKKDGSDGPIVKKVKLYVGVADDQVKVRGRGEDIDREGVKDRGGMYRCDIFRKDGKYYMVPVYYKDLYLHRMPTKAVVAHKETADWEKMDDKDFLFSLYPDDLIKVQKKNKEIENGYYKTSDRYSAGISYVQHDLGAKSYVRLCIQNLAIFEKLNVDILGNIYSCSKEEREWL

SEQ ID NO: 17913 - protein, 1098 aa, unidentified
  REGION 1..1098: note = Cas Enzyme sequence
MRKKIRYVLRLDIGIASVGWAVLLLDGEDNVCGIVRAGVHTFDEVTVGKEKITATANRRGYRSGRRLVRRKAHRIQRVKSLLQEMNIVSKKDMDEYYSGAVEDVYFLRWAAIQDEPVYILNNRELAQLLIYFAKHRGYKSTAVHEQEDEDDKKVLSAISENKKYMHEHGYRTAGEMIYKDAKFRQKRCGSSEENELLVARNSEGNYSNSISRDLLVEEVRIIFEKQRELGNTLATKELEERFLSIMQSQRNYDEGPGEGSPYGGNLIEKMVGECTFEKGEKRACKASYTSERFVLLEKINHLRICTADGNERPLNEDEKSAVIKLAYKTKVVKYNAIRKELKLDLEERFGGLTYSKVNNGDFKQRILDTEKKSDFISLKYWHEVKDILNLSYKDLTEEQKQLMDSVGKVLTYYKSEEKRREELSDLSLNQAQIEKMLKLNYAKFHNLSFKAMKKLMPELEAGYSYMESCLRVGYDSLSTDGVKTKYISKELLNEAVDKIMNPTVKRAVRRTVRILNEIVKLYGSPVEIHIEMARDLTHSGEVKKKIATAQKNNNKEKKEAIKFISENFGKTESDIRRKDILRYRLWKNQSQMDLYSEKLIPVEDILDYEKYEVDHIIPYSRSFNDSFNNKVLVKKKDNQDKKNHTPHEYIGHDDEAWNKFVKMVNNYVLSPGKRKNALTKSSDSDEWRSRNLNDTRYTTKVVADLIRRHLVFEPYFNGARNKHVYPLNGGVTARLRHEWGLEKDREKSDKHHAQDAIVIACCTEKMIWKMSNIYKQEELGGVVRKGNKLVDRRTGEILETTALPWKWFREEVEMVMADHPEDYIERAKDRGYMGDIPKPIFVSRLPVKKKTGVISENTIRVVDEASSRTVEKTSLDKLKLIEVNGKKQIKDYYRPEDDVLLYNKLLDRLIRYGNAKDAFAEPFYKPKKDGSDGPIVKKVKLYVGVADDQVKVRGRGEDIDREGVKDRGGMYRCDIFRKDGKYYMIPVYYKDLYLHRMPTKAVVAHKETADWKKMDDKDFLFSLYPEDLIKVQKKNKEIENGYYKTSDRYSAGISYVQHDLGAKTYVRLCIQNLAIFEKLNVDILGNIYSCSKEERERL

SEQ ID NO: 17914 - protein, 1098 aa, unidentified
  REGION 1..1098: note = Cas Enzyme sequence
MRKKIRYVLGLDIGIASVGWAVLLLDGEDNVCGIVRAGVHTFDEVTVGKEKITATANRRGYRSGRRLVRRKAHRIQRVKSLLQEMNIVSKKDMDEYYSGAVEDVYFLRWAAIQDEPVYILNNRELAQLLIYFAKHRGYKSTAVHEQEDEDDKKVLSAISENKKYMHEHGYRTAGEMIYKDAKFRQKRCGSSEENELLVARNSEGNYSNSISRDLLVEEVRIIFEKQRELGNTLATKELEERFLSIMQSQRNYDEGPGEGSPYGGNLIEKMVGECTFEKGEKRACKASYTSERFVLLEKINHLRICTADGNERPLNEDEKSAVIKLAYKTKVVKYNAIRKELKLDLEERFGGLTYSKVNNGDFKQRILDTEKKSDFISLKYWHEVKDILNLSYKDLTEEQKQLMDSVGKVLTYYKSEEKRREELSDLSLNQAQIEKMLKLNYAKFHNLSFKAMKKLMPELEAGYSYMESCLRVGYDSLSTDSVKTKYISKELLNEAVDKIMNPTVKRAVRRTVRILNEIVKLYGSPVEIHIEMARDLPHSGEVKKKIATAQKNNNKEKKEAIKFISENFGKTESDIRRKDILRYRLWKNQSQMDLYSEKLIPVEDILDYEKYEVDHIIPYSRSFNDSFNNKVLVKKKDNQDKKNHTPHEYIGHDDEAWNKFVKMVNNYVLSPGKRKNALTKSSDSDEWRSRNLNDTRYTTKVVADLIRRHLVFEPYFNGARNKHVYPLNGGVTARLRHEWGLEKDREKSDKHHAQDAIVIACCTEKMIWKMSNIYKQEELGGVVRKGNKLVDRRTGEILETTALPWKWFREEVEMVMADHPEDYIERAKDIGYMGDIPKPIFVSRLPVKKKTGVISENTIRVVDEASSRTVEKTSLDKLKLIEVNGKKQIKDYYRPEDDVLLYNKLLDRLIRYGNAKDAFAEPFYKPKKDGSDGPIVKKVKLYVGVADDQVKVRGRGEDIDREGVKDRGGMYRCDIFRKDGKYYMVPVYYKDLYLHRMPTKAVVAHKETADWKEMDDKDFLFSLYPDDLIKVQKKNKEIENGYYKTSDRYSAGISYVQHDFGAKSYVRLCIQNLAIFEKLNVDILGNIYSCSKEEREWL

SEQ ID NO: 17915 - protein, 1098 aa, unidentified
  REGION 1..1098: note = Cas Enzyme sequence
MRKKIRYVLGLDIGIASVGWAVLLLDGEDNVCGIVRAGVHTFDEVTVGKEKITATANRRGYRSGRRLVRRKAHRIQRVKSLLQEMNIVSKKDMDEYYSGAVEDVYFLRWAAIQDEPVYILNNRELAQLLIYFAKHRGYKSTAVHEQEDEDDKKVLSAISENKKYMHEHGYRTAGEMIYKDAKFRQKRCGSSEENELLVARNSEGNYSNSISRDLLVEEVRIIFEKQRELGNTLATKELEERFLSIMQSQRNYDEGPGEGSPYGGNLIEKMVGECTFEKGEKRACKASYTSERFVLLEKINHLRICTADGNERPLNEDEKSAVIKLAYKTKVVKYNAIRKELKLDLEERFGGLTYSKVNNGDFKQRILDTEKKSDFISLKYWHEVKDILNLSYKDLTEEQKQLMDSVGKVLTYYKSEEKRREELSDLSLNQAQIEKMLKLNYAKFHNLSFKAMKKLMPELEAGYSYMESCLRVGYDSLSTDSVKTKYISKELLNEAVDKIMNPTVKRAVRRTVRILNEIVKLYGSPVEIHIEMARDLPHSGEVKKKIATAQKNNNKEKKEAIKFISENLGKTESDIRRKDILRYRLWKNQSQMDLYSEKLIPVEDILDYEKYEVDHIIPYSRSFNDSFNNKVLVKKKDNQDKKNHTPHEYIGHDDEAWNKFVKMVNNYVLSPGKRKNALTKSSDSDEWRSRNLNDTRYTTKVVADLIRRHLVFEPYFNGARNKHVYPLNGGVTARLRHEWGLEKDREKSDKHHAQDAIVIACCTEKMIWKMSNIYKQEELGGVVRKGNKLVDRRTGEILETTALPWKWFREEVEMVMADHPEDYIERAKDRGYMGDIPKPIFVSRLPVKKKTGVISENTIRVVDEASSRTVEKTSLDKLKLIEVNGKKQIKDYYRPEDDVLLYNKLLDRLIRYGNAKDAFAEPFYKPKKDGSDGPIVKKVKLYVGVADDQVKVRGRGEDIDREGVKDRGGMYRCDIFRKDGKYYMVPVYYKDLYLHRMPTKAVVAHKETADWKEMDDKDFLFSLYPDDLIKVQKKNKEIENGYYKTSDRYSAGISYVQHDFGAKSYVRLCIQNLAIFEKLNVDILGNIYSCSKEEREWL

SEQ ID NO: 17916 - protein, 1098 aa, unidentified
  REGION 1..1098: note = Cas Enzyme sequence
MRKKIRYVLGLDIGIASVGWAVLLLDGEDNVCGIVRAGVHTFDEVTVGKEKITATANRRGYRSGRRLVRRKAHRIQRVKSLLQEMNIVSKKDMDEYYSGAVEDVYFLRWAAIQDEPVYILNNRELAQLLIYFAKHRGYKSTAVHEQEDEDDKKVLSAISENKKYMHEHGYRTAGEMIYKDAKFRQKRCGSSEENELLVARNSEGNYSNSISRDLLVEEVRIIFEKQRELGNTLATKELEERFLSIMQSQRNYDEGPGEGSPYGGNLIEKMVGECTFEKGEKRACKASYTSERFVLLEKINHLRICTADGNERPLNEDEKSAVIKLAYKTKVVKYNAIRKELKLDLEERFGGLTYSKVNNGDFKQRILDTEKKSDFISLKYWHEVKDILNLSYKDLTEEQKQLMDSVGKVLTYYKSEEKRREELSDLSLNQAQIEKMLKLNYAKFHNLSFKAMKKLMPELEAGYSYMESCLRVGYDSLSTDGVKTKYISKELLNEAVDKIMNPTVKRAVRRTVRILNEIVKLYGSPVEIHIEMARDLPHSGEVKKKIATAQKNNNKEKKEAIKFISENFGKTESDIRRKDILRYRLWKNQSQMDLYSEKLIPVKDILDYEKYEVDHIIPYSRSFNDSFNNKVLVKKKDNQDKKNHTPHEYIGHDDEAWNKFVKMVNNYVLSPGKRKNALTKSSDSDEWRSRNLNDTRYTTKVVADLIRRHLVFEPYFNGARNKHVYPLNGGVTARLRHEWGLEKDREKSDKHHAQDAIVIACCTEKMIWKMSNIYKQEELGGVVRKGNKLVDRRTGEILETTALPWKWFREEVEMVMADHPEDYIERAKDRGYMGDIPKPIFVSRLPVKKKTGVISENTIRVVDEASSRTVEKTSLDKLKLIDVNGKKQIKDYYRPEDDVLLYNKLLDRLIRYGNAKDAFAEPFYKPKKDGSDGPIVKKVKLYVGVADDQVKVRGRGEDIDREGVKDRGGMYRCDIFRKDGKYYMVPVYYKDLYLHRMPTKAVVAHKETADWKEMDDKDFLFSLYPDDLIKVQKKNKEIENGYYKTSDRYSAGISYVQHDFGAKSYVRLCIQNLAIFEKLNVDILGNIYSCSKEEREWL

SEQ ID NO: 17917 - protein, 986 aa, unidentified
  REGION 1..986: note = Cas Enzyme sequence
LFHIVRHRGFKSTRRAEEKLASAEEREKLGEMKKAIQAIHAGWKASGCRTVAEYFETDEWKSKHGERRRNKAGSYEFTIGREDLIEEVKELFSSQRRYGSEYADEEFERQYIAIVDEPPRLLEGEELMKKVGKCFLEPSERRAPKATATAQKFIALQKLANQQLYHPVTGETRRLSPDETRTLMNLALKKGKFTYAAALKALGLEGWLFAVEGKKKKNQSKNKNGYNTGPEDSRKTQEEEQKQAHKETLIELKAHSRLQDLLAKSHPDFWDRLLQDDDLYDKVASILTYYLRPETTIDQLIQAGLSKDIAETLAYNAAFNGHVNLSIKAMRVLIPYLEQGYVYSKACELAGYDHSRRATGQKSNIIPPLDDLDDFNSITNPNVRRALTQARKVVNAIIREYGLPSRIGIELARDAALSPARKKEIQREQLANRQAKEAMFAKITECAPGVNPEKVWKKYFLYEQQGGKCAYSLKELDCQRVLSDPQYAEIDHAVPRSICFDDSMANKVLVLASENRNKGDLLAAVYVRKAHGEKHFQEYKAFVLAMNAPLKKKRLLLKEEITEEDKRDMQERYLKATQYAARYFARIIRETLDVPENRIICVNGRMTNDLRWYLGLGGEKDRSVSDKHHAIDATLCALADHKFVHRMARYFKARETAYETPEGVWITPYGEIVEMPELEPWPSFREDVLNALETMVVSRMPRRRATGRGHKDTIYSLKHVRKTGVELPRRGRISLSGTLGRPTTRVSLDSLSDAQIREILKVPSPILVDEHLNWRLYELIRERLRAVEHGSGGSWAERAFGPTTEPLRMPTNDGRPGPIVRAIRLYTDALSGVAVRGGLAENDSIVRLDIYRKQHPNGKVRHYVVPVYAADIAAGWVPNRAAVGGKPESEWPIIDRTYEFLFSLYPGDCFRVYGDNSDGNKILYVTSFNRNSVRIIANTHDRSNRDNEGAINRIFVSVTTALKIEKLHVDLLGRVFVVRREPRPLS

SEQ ID NO: 17918 - protein, 1101 aa, unidentified
  REGION 1..1101: note = Cas Enzyme sequence
MSKASLSNPWRLGLDIGVGSIGWAVLDLKPTAKGDMEPTRLRDLGVTIFSSGADDDQQTAGMEWRKQRLSRKRYHSVKKRKTELLRRLVAQGCLASDPDARRRERDSMKVLPDMPKSAEIPAIWAFRYIALRQPGRLRKNELGHILMALAASRGQAFSPDSESENLLERSIELQERIRRANCIAFGDYAAEILSRERSATIRARNLIPNLCSRAMVRQEFDEIESKQYALLPEDVWAELRELIFDQNRPIPLAAGRCPLVEGEERLARAHPLAQRLKILQTLRNIILREHNELEQRPLRDDEVRAALAYLDDKRECSPNALMRKIGLGRRETNFHEKSSGTASPIPGNETNANLSKAQVFGPEWYKFSLEKRQEIVDKILCLRGSGKKFRFRELGNEWGVDEGIAENAFRSLPRGRSAFGITATCALVEELEGGKTFYEARLARFPDRIEPETLRFNRLPYYGIALPQHVFVDSNGKSDEERFGRVRNPRVHVVLNQLRSIVNALCDAYGKPDQIVVELAREFRNSEKDRQKIRTLQEEKRKKRERARIAIEGIGIIASEGQVERYLLWEELGPMGERRDVYSGELITDIRSLMSNDVEVEHIIPRSLSGDDSLANKTVTYHSINQDKGNRTPYEYFTSIGKYDEMYERAKNVSEWNKRKLSRFSSGARENFCGKFSSRELNETSFASKLARSYLATLIGSDRVHTTRGSITGRLRKAWALADVLPQSEGVKAKIEERKAAKKEIPKELKRHDHRHHAVDAALVGLIDPQRLEWYFRLSEDVARERPALPWTSFREELQSLIAMTIVRHRPSHKPGHSYAGPAVEATRYRLFEKDGKTYIRTRVSLLALALDRDGVWNLPGNATQGWIDKQFNRLAPGQSEKNLREIFTEENLKKKSRVAYEDLVAATDTSNDGIREDRQRDSQAKARAWRQLCDDFALRTGGTRSIHRFQLEEDPVRLADGKSAMVSAGNAYAEVIKRTSQSRARENDRIKYDLRVIQRGKALRGEVSPSPVDGAIVCRLHRGDMLRLVIDGQQRYVVVKVVDRDGRIGLALHNNAARDGGRLISIDDNIEKSVRQVHRVFGDWRARIVRLNPLGRMKSD

SEQ ID NO: 17919 - protein, 1344 aa, unidentified
  REGION 1..1344: note = Cas Enzyme sequence
MNEQTKKEWYLGLDIGTNSVGFSATDNEYNILTKGKKLQCGARLFEDAKDASERRLFRSSRRRFTRRKVRISRLQQLFDSVISSVDPSFFIRMNKSGIYELDEENKIAETYPLFIDTNYTDKDFYDEFPTIYHLRKHLSQNKTEDARLLYLACHHIIKYRGHFLFEHFNTENVKENKNDIYESLGVSDINEFHNDKAVQNALKGNKVDLSKLFPDDIEIKERIEPFKEDYKNYKFSTEEFDVLHAEISDILSEEENEYVLNLKKLYDCLRLEELLQGELTFSNAMVKRYDEHQSQLRSLKEFIRNYIPEKYDEMFRENGIYSNYIRSNITHGKKSFSYDDKCNTGVTTISHEIFLKKTDEILTKAKDKPGYEELKSLIDNKTLCLKLHTKENAHIPYQLHKAELKMILEKQRDNFPFLGQTDKYGTVEDKIISLLTFRIPYYVGPLKDDFNGEKFAWIAKMSGEENTAVTPWNFKQVVDTALCGERFINRMTSKCTYLTCEDVVPKQSVLYQKYLLLQDLNNLKINGDRIDNKTKLFLFNGICQTEASLTKAKIKKYLVDNGKIKPSDQVGKENDNDTGFHSSLSSLIKFKQILGDIKDEQMCENIIKWHTVFGDEKEPVKQKIKSAYGDVLTQVQAEKLSKMSFSGWGRLSKRFLTEITATDKTTGEAELTIMQVLETTTMNLQEILNSEGFEPKFTDLINDINGNSEKKEVSYETVKDMYCSPTVKCSIWQAILISKELAKINGCAPKKVFIEVTRGPNKAQKGKTTSSRKQQLEALLQKCLKDGQDVEKLLSELNQQEEKNLRSDRIYLYFTQLGRCMYTDKKIELSKLSDENLYDIDHIYPQSKIKDDSLSNRVLVCRLENSKKGNEYPIKQEIQTKMKSYWQMLEKRGLLTKEKYNRLVATRPLTQEQIGGFINRQLVSTNQAVKETAHTLKEMFGAETEIVYSKASNVSEFRHMFELVKCREVNNLHHAHDAYLNIVVGNEWHRKYTQRWFSSQNNSDESLLNRLFNKEWKRQYLEKIEGYLFDNKKYLGKYPVTVRTYEKKGAFYNQTVHPKTMSVKNSKAKFPTDESFGKKDVSKYGGYDYGFNAYNCLIEYDEKKGKTTKRVRGIFSVPVRFIGRYKSERLEKELQKHHGLTNAKILTEKIPMESVLEVDGIRYYMKTGDLQCPAAVEWYPDKNIIQIVHDIFKYRKLIADKKTEEPDKMSKEDIKYASREKSPKYGEGKSIRRDDNLAVFDAVLKQLKKPFYKEYAFTKKVTEGKISREKFMELSTYEQVEQLAGLLNSITMNGKNFNAKMIGGVANETPIYKITDIPSKNIYLITQSVTGLFENRIALNVYED

SEQ ID NO: 17920 - protein, 1344 aa, unidentified; identical to SEQ ID NO: 17919
  REGION 1..1344: note = Cas Enzyme sequence

SEQ ID NO: 17921 - protein, 1003 aa, unidentified
  REGION 1..1003: note = Cas Enzyme sequence
LITYGLLPSDAATRSEVFARNPYEARVKAAGEQVAPEQLGRALWHMSKHRGFKSNRRADKDADEKGKIAIASTALLERLRAERHPTYGAFLHARFARGEVTRIRPTGDGAKLSYEFYPTRAVLEAEFDHIWAIQAGFLPTLTEAIRERLRDTIFFQRPLRPVRPGKCTFFPDQDRLPRWHPAAQEFLILSQLNHLRIVDDHGEQPLDITARDLVARTLMNGSKLSWSALRKALKLPSGTAFNLEKAGLKELARNDIAARLLGDAKKPGPLADLWPTIEPAAQEEVLGKMAVTADPDEFVAWLMERHGLSREVAEKVEKIPLPDGHLRFCKTATQAIVEELRREVIPYDEAVRCAPLLGRAGLDHSDFQAEEGVETLPPYNRLPVLQRMIGNGTGDPNDPDLLRYGRITNPTVHIALGQFRRVMNALIAEFGKPAQVVIEATRDMAKSAEELNKIEKTIRDNEKRNDRWRSELQEAGLLAEGARIGDRFLRMRLWEEMGRGPADRLCPYTGRPIALHQLHSDEIEIDHILPFEDTFDDSPANKTLCFRDANRRKGKLSPAAATDQQPDFFDLAAIIGRTKHLPANKAWRFLPSAMEKWEETRGFADRQLNATGYLARVVRAYSEALFPKTDDEGKRRSHVWVLPGRMTAMLRQRWGLNLGDHNRKSRNDHRHHAIDAAVVGVIDRRMLQVLQTHARNMGVERLDRVLPAPPEPFAGFRDVVLSAVEKINVSHRAQHGSIDPTDPSQTSGRLHEDTVFGLVRNVPENQAERTIGNVVVRKPVSGLTEKEIGQVRDVKLRLSLEDATRSAQDKSLPEAERKKRLPEALAKWVQETGHRKLRILKPEAGVRPIHDRDGKPYKWLVPGEISWLDILEAPDGTWLQHATDIWAANSGGAAPWNVAHPGARFIMRVHKNDTVQVFDWDDKNKCVVDGSNTVKRIVRMEPSANRVRLVGINEAGVFDNRHKNADDPFRWDLATIGKLKLRRARRVRIDELGRVHTIPHGTV

SEQ ID NO: 17922 - protein, 962 aa, unidentified
  REGION 1..962: note = Cas Enzyme sequence
MSKHRGFKSNRRADKDADEKGKIAIASAALLESLKAEGHPTYGAFLHARLARGEGTRIRPTGDGAKLSYEFYPTRAHLEAEFDHIWAIQAGFHPTLTEAMRERLRDTIFFQRPLRPVRPGKCTFFPDQDRLQRWHPAAQEFLILSQLNHLRIVDDHGEQPMDITTRDLVARTLMAGTKLSWSGLKKTLKLPSQVEFNLEKGGLKELARNDVAARLLGDTKKPGPLATIWPTLDNATQEEILWQISEVADPEELICWLMERLGLSREVAERVEKIPLPDGHLRFCKTATQAIVEELRSDVIPYDEAVRRAPLLGGAGLDHSDFQAEEGVDTLPPYNRLPVLQRMIGNGTGDSHDPDLLRYGRITNPTVHIALGQFRRVMNALISEYGKPAQVVIEATRDMAKSAEELNKIEKTIRDNEKRNDRWRAELQQAGLLAEGARIGDRFLRMRLWEEMGKGPADRLCPYTGRPIALHQLHSDEIEIDHILSFDDTFDDSPANKTLCFREANRRKGKLSPSEAADQQPDFFDLAAIVGRTKHLPANKAWRFLPGAMQKWEATRGFEDRQLNATGYLARVVRAYAEALFPKTDEEGKRRSHVWVLPGRMTAMLRHRWGLNLGDHNRKSRNDHRHHAIDAAVVGVIDRRMVQVLQTHARNMGVERLDRVLPAPPEPFEGFRDAVLAAVEKVNVSHRAQHGSIDPNDPSQTSGRLHEDTVFGLVRDVPENQADRTIGNVVVRKPVAGLTEKEIGQVREVKLRLSLEEATRSARDKSLPEAERKKRLPEALAKWVQDTGHRKLRILKPEAGVRPVHDRDGKPYKWLVPGEISWLDILEAPDGTWFQHATDIWAANSGGAAPWNSAHPGARFIMRVHKNDTIQVFDWDEKNKCVVEGSNRIKRIVRMEPSANRVRLVGINEAGVFDDRHKDADDPFRWDLANIGKLKQRRARRVRIDELGRVHTIPHGTVQKVG

SEQ ID NO: 17923 - protein, 1053 aa, unidentified; identical to SEQ ID NO: 17206
  REGION 1..1053: note = Cas Enzyme sequence

SEQ ID NO: 17924 - protein, 1060 aa, unidentified
  REGION 1..1060: note = Cas Enzyme sequence
MNSSASNGLVFGIDLGIASCGWAVLRRPTEADPTGAIEAMGSWMFDVPETDKERTPTNQIRRGNRLLRRVVRRRAQRMAAVRRLFSKHGLLSTDDRDALKRADADPWELRARCLDKPLKSAELAVALGHIAKRRGFKSAAKRKEANTAGDDQKMLKALEATKERLGRYRTIGELFARDPDFQTRKRNRDGIFDRTQSRDDLLHEVRKIFEAQRRLGNELASDALEAAFVNTAFFQRPLQDSERLVGLCLFETTEKRAAKHAPSFEKFRLLTRLVNLRITVDDGERALTPEELAAATGDLGSTAKLSVKTIRKRIGLPDDQRFTAIKPDDEGHDIAARTGEAMHGTKKLRDALGEDIWASLLEQPEMLDRSAHVLSFFETAETIGDELKKLGLPARAVDRLLEVLPSFARFKGTGHLSAKAARALIPHLEAGLRYDQACDAVGYDHAASRWSKREQVVDKKSFNQLVKDTGAEIANPIARKSLTEGLKQLWAMRNRWGLPDAVHIEMARDVGNSLEERNKIKKRLDDTTAQRGRERDEAAEQLGVEPGDVGGDTLLRYRLWKEQGGECPYTGDHIPPSAIAATDNSFQVDHILPWSRFGDDSFNNKVLCIARANQEKRRDTPFEWIMRTKGEEGWELFATRIETNPHYRGFKKRNYTLKNATEAEERFRSRNLNDTRYACRLLAEAVKLFYPEGERQDRDGKRRVFTRPGSLTAALRHAWGIESLKKVDGERVNDARHHALDALVVAAVGEWEVHRLTKSFQEWEQRGLARPLRRVEPPWGDFNSFRREVQDAYDAIFVARPERRRARGEGHAATIRQVKERDGAPVVFERKAVADLKEKDLERIKDPERNKAVIEAIRQWIADGRPVDALPRSPAGDEIRRVRLSTKGKPSVRVRGGTADRGDIVRVDVFSKPNKRGKEEFYLVPIYPHQVMDKKQWSYPPSKAVVAYKDEEDWVQIEEAFQFRTSICPRSFLEVTKPDGEILLGYFQGMNRATGAISLFNDKDTRNRRDDAGNSLDGIGAKRLLTIKKYSVDRFGNRSEVKSEVRTWHGAVCTSPTPPD

SEQ ID NO: 17925 - protein, 1053 aa, unidentified
  REGION 1..1053: note = Cas Enzyme sequence
MNRLIFGIDLGIASCGWAVLCHPTSYDPTGEIVAMGSWMFDVPETDKERTPTNQIRRGNRLLRRVIRRRAQRMAEIRRLFAQHGLLSSQEPDALKRLRLDPWELRARGLDKPLSPAEFAFALGHIAKRRGFKSARKGKEANTAGDDQKMLKALESTRERLGRYRTVGEMFGRDADFRDRKRNRDGLFDRTQSRDDLRHEVGKLFEAQRRLGSDAASADLEVGFTAIAFRQLEMQDSEKLVGICQFEPTEKRAARFAPSFEKFRLLGKLVSLRITRPDGERSLTPEEIRLATADLGKTAKLSVKEVRKRIGLPADQRFAAIKPEDEAQDIAARTGEAMHGTKKLRDALGEALWAELQDKPEELDRIAHVISFHETADKIGAELRKLGLPAGTADALLEDLSAFSRFRGAGHISAKAARALIPHLEAGLRYDQACVAVGYDHAASRWSSRKQVADKAAFNRLVEDMGKEIANPVARKSLTEGLKQLWAMRNRWGLPDAVHIELARDVGNSLEKRNEIKREIDKNTAERERQRDEVRELLGIEDVNGDTLLRYRLCKEQAWRCPYTDKAIPASAIIATDNSHQVDHILPWSRFGDDSYSNKVLCTARANQEKKGQTPFEWIMNVQGEEGWRTFVTRIEGNSAFRGAKKRNYVLKNAKEAEERFRTRNLNDTRYAARLLAEAVKLFYPAGDRQEKGGNRRVFTRPGALTSALRHAWGVESLKKVDGKRVEDARHHALDALVVAAIGEWEVQRLTRSYQEWEQKGLARPLRQVDPPWGDAASFRREVKQAYDQVFVARPERRRARGEGHAATIRQVKERDGVPVVYERKSITDLTEKRLQDIKDPERNQSVIEAISEWIAKGKPAESLPRSPAGDEIRKVRLRTKGKPAVQVRGGTADRGEIVRVDVFSKPNKRGKDEFYLVPIYPHHVMNKRDWPMPPMRAVVAYKDEQDWTLIDASYSFKFSLHPRSYVEVTKPTGELLAGYFQGLNRSTGAINLSNARNSRLLSDDNGNSMQSIGAKTLLNIKKHSVDRFGMRSEVKSEVRTWHGVVCTSRTRPG

SEQ ID NO: 17926 - protein, 1074 aa, unidentified
  REGION 1..1074: note = Cas Enzyme sequence
MDYRLGIDLGTNSLGWAAIQLSEAKPGEFQAGQLLDLGVRIFSDARNPKDKSSNAAQRRGPRGMRRNRDRKLSRGKAMLHALVAAGLMPANKEDRKALEALDPWILRADALDQKLRPYEIGRSLFHLQQRRGFKSNRKTDGDEDGAMYDAIEAARSKMAIQEARTLGELFGRPRKATHGANRVARKGQGTPMPQARVKAQMNGSKMAYDYYPDRAMILDEFDQIWDVQSKYHPDLMTDNARKNIRHVIEYQRPLKPQRAGKCTFLPHLERAPKALPRAQYMRVLQEVNNLKVGAVGEIQRRLRADERKLVVDMLMHPSSKTARRTFKAIRKTLALPESQVFNLESLKRDYLVGDETAGRMMQDHAWGQDWLALERAMQGEIVEKMLDTEDSEILIEWLMANHNLDAVRARAVSKVRLPDQHGRLSLEAMSRLIPLLEQGQRYDEAATALFKDHRGRGDSLTHEDGLPYYGEVLSRHTAFEKAPPQGGKDTRNDEEKHGRVANPTVHVALNELRKVINDLIKRWGPPAEVVLELARDLPLSDRGLRELETVQKKNQDLNDKRRKELEALKVADTYANRMKLRLYEEALECFGGAALCVFTGDTINMTSLFTGEVEIEHILPLSRTWDDSFSNKVLSKRIANRLKKNQTPFEAFGHNPTGFDWEPISRRASDLPKSKSWRFAPDAMAQWEARGGDFIARQLNDTRYISRLGKTFVEALYGGQGEKGERRRVWVVPGRLTADLRYHAGFNTLSGFTDLNQKDRTDHRHHAVDALVIALTDQAMLKRSADLAKREEAAEQSEILQAMAEPLKRYRRSAEDRLSKLVVSHKPDHGFQDGMHNDTAYGVTGDVDEKGQALLVTRKPIDALDQKDIVNIVDPELRRHFAYATEGLTGAPFQDAMHKAANQLLPPVNRLRLTTPMKPSSFVTIRHGEEGEHVKAYKGDGNYCYDIFTGAKGRWNGEVITTFEAYQRARKNKTWWQALHRDDGTPLIMRVRKGDMLEIDGENGKRVTCLVAKFTPGAIALAEHFESNVDQRTRSSYKGNAPLKYIFKAPSSLQKANAVRISVSPSGQVKRHKA

SEQ ID NO: 17927 - protein, 955 aa, unidentified
  REGION 1..955: note = Cas Enzyme sequence
MITLAIDYGASNVGIALVRNTEAGNEPLFAGTVILDARKLKEKVETRAGIRGLRRTRKTKNRRLRELGEALSGLGMEGDKVARIVRFSNRRGYKSLFSDPNETEKVDEAESAYRCTREQFFHQLEQELQEILSDREACDKALSVCERILNRKGDRYAEIRLIRIDNRGASRCAWGDCNKVTPRRDNATDDAIAQQLVTYFQSAIKTEPHKLEMLNQTVCELDSISKNLRGAIANNDDSSKKILRRRARKSLRNLRAELPSTEPEDVSGDAWKYVEKGILNILENSGGRNRYCREHSKSYVEKVLEGKPPEFKSTIADSDIISRREQIAFSKLWRYIEARLLPLAPKGIDRIVVERTAFDLLAGKRKKIRDASSEGVENIYQYGPMYGFPNEKEMLRKEFGGLCAYCGNPSDTLMDRDHILPRRDFFFDSYLNTLPACPTCNSEKSASLPSQVSLRISEDAYSMYKQYLTELASKRPLHFLHTEKKGILNLMRDPARSWEVEKYLSLIANNFASIVQTQRGPRPFARYLYSKLSTRQNKPPKIVFRSGRHTALYRGVAYPLFSKVLEKEQNDLNGKPVNHALDAILLACKLPDSRPLEARGLNLHTLGTWRRAVMAKAPTAGEDGIPTLADQKHYVQGFESTDANGYVTVEMGMMNWNQKDSGTHKQDPYGWSEEKQQPTKRVAAKSLFDELRNDKSKKKPDELIKRIYHPALRAAVEKAFGASQDRLAAAEALKKWLRDSVRNSLSSSSFSRHPSDMRRKQDLEKFAHEDGGDIPIVIGIKCLDKGVEGKIDAERLDKQTGKTGHRYMTDPANRGMILAYPPTPSGEVDKRKPCTAGIRQNYALKTEDTRFASKPPELERGVVWGNNRGSLKDLESKFEKALEKYLGECGFHSYSLLTAGCVVCYEDGTQRFIRNFDKSKDFKKAILKNIDGVRRTPFSKRVLPLKVLTEAPAKE

SEQ ID NO: 17928 - protein, 949 aa, unidentified
  REGION 1..949: note = Cas Enzyme sequence
MITLAIDYGASNIGIALVRNTEEGNEPLFAGTIIIDAKGVKDLAEPRAAIRRLRRTRKTKIRRLRQLSLALKRLGLGEEVSRIVRFARRRGYKSLFDDPDEAKQTKDDVSGYRCTREEFFHELEHELQAIIIDTEQYHRALSVCERVLNRRGERYGEIRPLKIDNRGRSRCAWEGCNRVTPRRHNATDDVVRQQLVTYFQSPLRREPGKLPMLEQAVVKLDIISKNLRGSNEAKCRNALNKRARTILRGLQAALPMHEDEGGSDKESWEYVEKGIVKILENAGGRNRYCREHSKAYCDRVLEGKPSEFKSSIQESDIISRREQIIFNKLWRYIEARLLPLAPEGIDRIVVERTAFDLLAGKQKKIRDASSKSVESIYQYGPRYGFTSEKEMLRKEFGGLCAYCGKPSETLLEREHILPRRLFFFDSYLNILPSCPQCNAAKGTSLPGVSSLRIHEDAYRNYESYINELKSKRPLHFLHTEKKGILNLMRDPERAWDWERYLRLIANNFASIVQTQRGPRPFARYLYSKLSRRQEKPPEIAFRSGRHTALYRSVAYPDFSKAQEKAGEDGNSHPVNHALDALLLASKLPRPEPLEARGLNHASLKAWADQVRGKAAPAGEDGIPVIPAYKCFVPGFEETDAHGYVTVEMAMMNWNKKDTATTKQDPYGWSESRQHPTKRVSARTLFDDLREEKSKKNPSELIKRIYHPALRSAVEKAYQESHNRIQAAEALKNWLRDSVKNSLRSSSFSRHPSDIRRRQDLERFANGKTDEIPVVIGIKCLDTGVAGKIDAARMDRQTGTTGHRYLTDPANRGVVLAYPTTRSGACDRRKPCTAGIRQNYSLKTDETAFRSMPASLERGVVWGKKTHSPRAMESAFSKELEQYLRDRRFHSYCILTAGCVVCYEDGTERFIRNFDKSKGFKKTILRNIVALKRTPLSTRVVPLKVLTALP

SEQ ID NO: 17929 - protein, 954 aa, unidentified
  REGION 1..954: note = Cas Enzyme sequence
MENILQTGRTYTLGIDYGASNVGIALVCNEPTGENLPLFAATLRLDARDLKEKVETRAGIRSLRRTKKTKKHRLHDLADALKSIGLPERQVQSVIRFSKRRGYKSLFDEDLHDETEEQQDTDFVYRFSREVFFQSLSSELENIIADPVLRLNTLAQCERILNKQGNPDHEIRRIRIDNRGASRCAWAGCNRVTPRSDNAIRDVLAQQLYNYFQALLRDNPSQSAKVEDVIQELVVIAKRIRAASGDHIKEEKKALRKRARGALRGLNKLLMPVATGIPEDEPWEYVEKGMMNTIERRAGRNRYCREHSAEYVQTILAGKAVPFKKTITDADIISRREQMAYSKLWRYIEARILPLAPQGIDRIVVERTAFDLLAGSWKTIQGATDKYKEEMYQQGPMFGFSSKREMLNEEFGGLCAYCGKPSADLMDHDHIMPRADFFFDGYLNILPACPTCNTNLKGKRALSDQALTIVPEAYEAYKKYLATKFRTRPMHFLHTVKKGILNLMKDPDRIWEAEKYLSIVARQYAQIVQTQRSPRPFARLLCRKIKESQGSEPSIAFRSGRHSALYRQIAYPEFEKYADKEQGNVINHGLDAILLASSLPDLYPVESLNIPIARLKGWTASVRKRAPRPGSDGIPAISVKGMVDGFEKIHAPGYIEVEVRAMVWNKKNSRTHKQDPYGWSESHHMPTKRKAAADLYADMTKENSPTRLKAMVERIYHPALKHFILGRMDTDKPGQSAAAALKEWLQASIRNSLPDSQFSNHPGDQARKADLEMFAEVPAAPIPAIIGVKMIDTGVQGKIDLERMDHKTGRIVHRYMTDPPNKAVYVAYPKKRDGGSDMTKPCLLFLRQNDAIIVESLAAFRPLPEELARGRVLGSTQSKIFDAALLEKYLEECGFHCYIRLTSGCVINYEDGKRWFVRNFDQSKDFKKARLRNIKGVQKTPFSRRIEPLVYLGK

SEQ ID NO: 17930 - protein, 942 aa, unidentified
  REGION 1..942: note = Cas Enzyme sequence
MITLGIDYGSSNIGIALVRNTGEGNEPLFAGTIKIDARRLRDKVETRAGIRRLRRTRKTKRHRLRNLRNRFLSLGIKEEDVNLIVGFCKRRGYKSLFDDGETVESEKGDNQLTYRFTREEFFRNLTDELKTILPDSSQFQDALNACEKILNRRGDPFQEIRLIRIDNRGASRCAWEGCDKVTPRRDNALGDPIAQSLLNAVQENLKGEPARMGTIETDISELDTLGRRIRAASGEGAKEEKKALRKNARKVLREIKADFFKPDVDEEERDRAWKYIEAGILNIMENSGGRNRYCREHSKAYIQTVLSGKAAPFKRTISDSDIISRREQIVYQKIWRYLEARVFPLAPEGIDRIVVERTAFDLLAGSRKNIQNASDQFVEEMYQHGPMHGFSSTAEMLKEEFAGMCAYCGCESAALIDRDHILPRADFFFDSYLNIVPACPKCNSDLKGKRPISTSLLRIDDKAYEAYSHYLQKISKSRPMHLFHTIKKGVLNLMRDPERSWEVERYLSLIAKQFSEIVQTQRSPRPFARYLTSKLIKRQEKMPEILFRSGRHINLYRTISYPAFSKVEEKEEGNTANHAIDAMLLASDLPSPSPLEALSIPVSLVKRWSLSVQESAPKTGRNGIPEIPCHGSYVDGFEKVDGNGYVEIELDKMSWNQKDRMTHKQDPYGWSQKAQMPTKRTAAVDLYNSLKKESNVQKVKNIIERIHHPALKRVMAASANSENPGGSVAETMKKWLRQSVQNSINNSSFSNHPGDQARKGDLEKFTSEETAIPAVIGIKMFDTGVRGKIDLSRIDKQTGKVGHRYMTQPANRGVILAYPKKPSGEPDTDRPYLAFIKQDSSLKPEGAMFKPLPEGILNGKILGTGYSPGEWMGQVENYLSECGFHSYVSLTPGCVVCYKNGKKWFVRNFDQSADFKKARLKDVAGIQRTPFITRISPLKMLT

SEQ ID NO: 17931 - protein, 943 aa, unidentified
  REGION 1..943: note = Cas Enzyme sequence
MITLGIDYGASYIGVALVENTGTGNRPLFAGTIAINARDLKDMVETRAGIRRLRRTRKTKIRRLMRLRESLLACGIGTDQVTLIVRFCRKRGYKSLFDEGESETREKESDLAYRFSRETFFESLERELGLILPDNHLKPQALSVCERVLNRKGDPFQEIRLIRIDNRGASRCAWEGCSRVTPRRENALTDPIAQQVYTTCQEKIREGGEQAREKVDDTVSQLATLGKRIRNASGEGANKEKKVLRKKARMLLREIKELYYQPARETLDGEKAWKYIETGVLNIMEKSQGRNRYCREHSAAYVKTVLANEAIPFKQTISESDIISRREQITYQKLWRYIEARVLPLAPCGIDRIVVERTAIDLLAGSRKKILDASDQTKEEMYQHGPMHRFESVSEMLRKEFNGLCAYCGKQSDSLMETEHILPRAEFFFDSYLNIVPACPRCNQSKGARTPSAASLKINGEAYEAYTSYLQSNFRTRPLHLFHTIKKGVLNLMRDPERQWEAERYLSLIASQFAQVVQSQRGPRPFARYLFSRLSLRQVRKPEIVFKSGRHTALYRNIAYPDFSKYAEREEGGVVNHAVDAILLASDLPDPKPLEALGFSPADMRRFCRAVRQKAPVAGDSGVPEPPARDFFVEGFESVKSGFVEVRLDAMCWNKRDSMTHKQDPYGLSEKVNLPTKRVSAFGLCSELEKMKDEKGVKKKVDLIHHPALRRTLGDAINPENPGKSAAEALRAWLSESVRKSIQTSAFSNNPGDQQRKKELEQFSSSDESLIPAVIGVKMFDMGVRGKIDLQRIDPQTGKTGHRYMTQPANRAVILAYPKKKTGMTDMSKPCIARVRQNYSLLPEGKGIFKELPERLKEGIILGKENTILDGWNSEVEHYLSVCGFSSYGMLTAGCVVCYGDGKKWFLKNFDESKEFRKARLRNVVGILRSPFSGRMTPLKPLT

SEQ ID NO: 17932 - protein, 1426 aa, unidentified
  REGION 1..1426: note = Cas Enzyme sequence
MEQKTLGLDLGTNSIGISLRNPALGENLKEQLEYFSSDIFEAGVGTDKSGEFSYAAQRTTFRSARRLKLHRRRRLQATLRLLMDHKLCPLSEDSYKQWSVYDKTQNLKREYPIGDEGFNRWIKLDFNADGKPDYTSPYQLRCELATTQLDFSSPENKFKLGRALYHIAQRRGFKSSKGETIAEQEKNEKFSANSDDLEQEMKKSEMKRSKGLRELLETQGLKTIGQAFAYLESQGTRIRNNEDIQATRDLYEKEITYIFNFQKELSIESELYKRLVSTKKGEGTIFYKNPLRSQKGLVEKCTLEPKKGRCPIGHPEFEKFRAWAFINNIRYRRTIDSEWQEPTIEMKERLYRDVFTARVKADFLFSEIRKWLEKELEVQLLWDNNKSLRTINYADKQNVAGCPVTARLVKLLGTDWERFQQEGRKEHKTHSKQHPTKHTVCYSALDIWHVCFQADELEDVQSFAKDSLQWDDEKCKLLLRVWTSIPQGYAMLSLKAIRNINRMLCRGLKYSDAVMLAKVPEIAGMNESDIDTLIETFSKDLKTEVDRTKDIYIITNSLIADYKSLSFEDRFAEHDTSYCLQESDKEDIVQHIIKHFGEVTWGLMDAEEQEVLMSEVERLYQDFFSKTKRNFYDIPTYASTLRAFLCEKFPHVDEQAWAKLYHPSQIASYHPERDKNCPDSWRLGTPNIGAIRNPVALRTLNILRRKINALLDANMIDPLETRVVVETTRTLNDANMRWAIDRFQKKREEQNKIIRSILEKEYTTRAISETDINTARYILEQREEHIYQTEKTGELQHDFSFNIDTKRYKLWLEQGGICFYTGKVINLTNIFNDNAFDIEHTLPRSKSFDNSDANLTICDAHYNRYIKKNILPAHLPNFEHDQTINGTLYTAIKPRLEMWRKRVERLKVNVDFWKNRTRRAQDKDTRDKCIRQRHLWQMELNYWHEKLSHFEMEEIKEGFRNSQLVDTGIITRHAALFLKSLFKNVEVQKGSVTADFRKILGIQSVDEAKNRDKHSHHAIDATILTTIPIAAKRDRMLEIFLRIKELKKILCFSKDTNKQQEIISLNQKLQYEINSCHLGNDIASLPSYIENNIIIRHLRKEQTQQNSRRTIRIRGKKIYVTDHHGNKHKKWSSGDSIRGELSGQSFYGAITQWKEKTNRNETTNHKEQNIIDPTIYYVIRKPLVFKNNTSAPGFSSWEDLEKQIVNKALIPMMKSQFCEGTSFKEACGQPIYMLNRKGEKINVLRHIRCYVRIKNPIAVKKHTFLSSKPYKQNVYAGVGGLYAAAEYTNGNKRQFVIYSLKDIAQNKKKNNEIIPSKILNGTKTLTLQRLLHAKDSILIYEESPEELKKLSMTELSKRLYVIKGFEAAKTRIKAVNHLYNIDEIGETITDYQNLPITIRLSLNKLKFLLHGYDFKFTTSGLEFLDK

SEQ ID NO: 17933 - protein, 1426 aa, unidentified
  REGION 1..1426: note = Cas Enzyme sequence
MEQKTLGLDLGTNSIGISLRNPALGENLKEQLEYFSSDIFEAGVGTDKSGEFSYAAQRTTFRSARRLKLHRRRRLQATLRLLMDHKLCPLSEDSYKQWSVYDKTQNLKREYPIGDEGFNRWIKLDFNADGKPDYTSPYQLRCELATTQLDFSSPENKFKLGRALYHIAQRRGFKSSKGETIAEQEKNEKFSANSDDLEQEMKKSEMKRSKGLRELLETQGLKTIGQAFAYLESQGTRIRNNEDIQATRDLYEKEITYIFNFQKELSIESELYKRLVSTKKGEGTIFYKNPLRSQKGLVGKCTLEPKKGRCPIGHPEFEKFRAWAFINNIRYRRTIDSEWQEPTIEMKERLYREVFTARVKADFLFSEIRKWLEKELEVQLHWDNNKSLRTINYADKQNVAGCPVTARLVKLLGTDWERFQQEGRKEHKTHSKQHPTKHTVCYSALDIWHVCFQADELEDVQSFAKDSLQWDDEKCKLLLRVWTSIPQGYAMLSLKAIRNINRMLCRGLKYSDAVMLAKVPEIAGMNESDIDTLIETFSKDLKTEVDRTKDIYIITNSLIADYKSLSFEDRFAEHDTSYCLQESDKEDIVQHIIKHFGEITWGLMDAEEQETLMNEVEQLYQNFFSKTKRNFYDIPTYASTLRAFLCEKFPHVDEQAWAKLYHPSQIASYHPERDKNCPDSWRLGTPNIGAIRNPVALRTLNILRRKINALLDANMIDPQETRVVVETTRTLNDANMRWAINRFQKEREEQNKTIRSILEKEYTTRAISETDIDTARYILEQREEHIYRTEKTGELQHGFSFNIDAKRYKLWLEQGGICFYTGKVINLTNLFDDNAFDIEHTLPRSKSFDNSDANLTICDAHYNRYIKKNILPAHLPNFEHDQTINGTLYTAIKPRLEMWRKRVERLKVNVDFWKNRTRRAQDKDTRDYCIRQRHLWQMELNYWHEKLSHFEMEEIKEGFRNSQLVDTGIITRHAALFLKSLFKNVEVQKGSVTADFRKILGIQSVDEAKNRDKHSHHAIDATILTTIPIAAKRDHMLEIFLRIKELKKILCFSKDTNKQQEIISLNQKLQYEINSCHLGNDIASLPSYIENNIIIRHLRKEQTQQNSRRTIRIRGKKIYVTDHHGNKHKKWSSGDSIRGELSGQSFYGAITQWKEKTNRNETTNHKEQNIIDPTIYYVIRKPLVFKNNTSAPGFSSWEDLEKQIVNKALIPMMKSQFCEGTSFKEACGQPIYMLNRKGEKINVLRHIRCYVRIKNPIAVKQHTFLSNKPYKQNVYASVGSLYAAAEYTNGNKRQFVIYSLKDIAQNKKKNNEIIPSKILNGTKTLTLQRLLHAKDSILIYEESPEELKKLSMTELSKRLYVIKGFEAAITRIKAVNHLYNIDETGETITDYQNLPITIRLSLNKLKFLLHGYDFKFTTSGLEFLDK

SEQ ID NO: 17934 - protein, 1234 aa, unidentified
  REGION 1..1234: note = Cas Enzyme sequence
MSGKKILGLDLGTNSIGWALIEVANNERKIIAMGTRIIPLSTDEKDEFDSGNSISKNQKRRQRRVQRRGYDRYQLRRKALTEVLMQNKMFDPQLFNLDKLTLWGIRAKACTEKIELTELGRILYHLNQKRGYKSVSKNENKKETEYVSEVKNRYQLLKESNLTIGQKFYQELSANPFYRIKEQVFPREAYMEEYDKIMACQKQFYPEILTDELITKIRDEIIYYQRGLKSQKDLVSVCDFEGKWIKHNNKEIFIGPKVAPRTSPLFQVAKIWETINNLEIKNKKGDKLFLTIEQKQKIFEYLDNNEKLTQTELFKILGIKKEEGWYGSRQLTNGLQGNITKTKILKILNNHKEYAHLIGFALNIDENEQKTYLYDRKTGEVLDERPQKVINASFEKEPFYQLWHTIYSIKDEKECAEALVKRFAIDENTAFELAAIDFVSPGFGNKSARAIRKILPYLMEGYKYSDACQLAGYNHSFSLTNSEIYQKQLKDKLELLPKNSLRQPVVEKILNQLINLINAIIDEKQGWVTREERLNNQFEIRIELARELKQSKDERYETYIRQRRRERENAEIVKELETSYGLRPTRNNIIKWRLFHEINNEDKKINAVCLYCGKTFGINDALSGEMVDVDHIIPRTLFFDDSQNNKILVHRACNASKGNLTAYDFMKLKGEQAFKEYTDRVEFLHNQKIISKVKRDRLLTPGNEIPDDFIERQLRETQYISRKSREILNQICYNVWSTSGGVTEKLRKLWGWDDILMQLQLPKYRELGLTEEIVIENSDGTLQKKEVIKGWTKRNDQRHHAIDALTIACTEQGFIQRINTLSSEKTRNELYNEVKDIKFNEKLTLLEKYLIAQRSFTTEYVKDKVSQILVSYKSGKRVATKGRRIIQINDRKIVAQDNILVPRGPLSEESVYGRIKIIEKDKPISYLFENPHLIVDLRIKELVETRLQQYQNDVKQALKSVKKEPIFIDDEKSKVLEKAHCYVEKYVIKYPVESIKQKEVDDIVDEKIRQIIRQRFLSVSKESDAFKEPVYFDEQKKIPIRSVRMFTGLTSVEPIRWDENNNPIAFVKPGNNHHIAIYMDENGNYQEHACTFWHAVERKKYGFPVIIENTAEIWNRILANPDKYPTSFVEKLPADKLQLVYSMQQNEMFIMGMQSDDFHMALQKKDYRLLSNHLYRVQKLSASYYVFRHHLETEIDDSKEALTSKRYIRIQSLKAYFEYNPYKVRINYLGQIVI

SEQ ID NO: 17935 - protein, 1112 aa, unidentified
  REGION 1..1112: note = Cas Enzyme sequence
MSRSLTFSFDIGYASIGWAVIASASHDDADPSVCGCGTVLFPKDDCQAFKRREYRRLRRNIRSRRVRIDRIGRLLVQAQIITPEMKETSGHPAPFYLASEALKGHRTLAPIELWHVLRWYAHNRGYDNNVSWSNSLSEDGGNGEDTERVKHAQDLMDKHGTATMAETICRELKLEEGKADAPMEVSTPAYKNLNTAFPRLIVEKEVRRILELSAPLIPGLTAEIIELIAQHHPLTTEQRGVLLQYGIKLARRYRGSLLFGQLIPRFDNRIISRCPVTWAQVYEAELKKGNSEQSARERAEKLSKVPTANCPEFYEYRMARILCNIRADGEPLSAEIRRELMNQARQEGKLTKASLEKAISSRLGETETNVSNYFTLHPDSEEALYLNPAVEVLQRSGIGQILSPSVYRIAANRLRRGKSVTPNYLLNLLKSRGESGEALEKKIEKERHQQANRKKAKKTDLDYAATPLKPKYATGRAPYARTVLKKVVEEILDGEDPTRPARREAHPDGELKAHDGCLYCLLDTDSSVNQHQKERRLDTMTNNHLVRHRMLILDRLLKDLIQDFAGGQKDRISRVCVEVGKELTTFSAMDSKKIQRELTLRQKSHTDAVNRLKRELPGKALSANLIRKCRIAMDMNWTCPFTGATYGTHELENLELEHIVPHSFRQSNALSSLVLTWPGVNRMKGQRTGYDFVEQEQENPVPDKPNLHIRSLNKYRELVEKLDDKKGHEDDRRRKKKRKALLMVRGLSHKHQSQNHEAMKEIGMTEGMMTQSSHLMKLACKSIKTSLPDAHIDMIPGAVTAEVRKAWDVFGVFKELCPEAADPVNGRIIKEDLRSLTHLHHALDACVLGLISEIIPADRKNVLRRAIIKRRLDQKMKQDFLELRKKRYYKLREKDGQTGASLVDLPSGIKENIREKLMEQRVIQHVPADMGGALLKETIQRVLSVDGSGEDAMVSLSKKKDGKKEKNQVKASKLVGVFPEGPSKLKALKAAIEIDGNYGVALDPKPVVIRHIKVFKRIMALKEQNGGKPVRILKKGMLIHLTSSKDPKRTGVWRIASIKDNERGIAIDLQIPHSAVPGAKTHEFNWINVKLDTLLTKYRLEIYPTSYTGTPR

SEQ ID NO: 17936 - protein, 1101 aa, unidentified
  REGION 1..1101: note = Cas Enzyme sequence
MSRSLTFSFDIGYASIGWAVIASASHDDADPSVCGCGTVLFPKDDCQAFKRREYRRLRRNIRSRRVRIDRIGRLLVQAQIITPEMKETSGHPAPFYLASEALKGHRTLAPIELWHVLRWYAHNRGYDNNASWSNSLSEDGGNGEDTERVKHAQDLMDKHGTATMAETICRELKLEEGKADAPMEVSTPAYKNLNTAFPRLIVEKEVRRILELSAPLIPGLTAEIIELIAQHHPLTTEQRGVLLQYGIKLARRYRGSLLFGQLIPRFDNRIISRCPVTWAQVYEAELNKGNSEQSARERAEKLSKVPTANCPEFYEYRMARILCNIRADGEPLSAEIRRELMNQARQEGKLTKASLEKAISSRLGKETETNVSNYFTLHPDSEEALYLNPAVEVLQRSGIGQILSPSVYRIAANRLRRGKSVTPNYLLNLLKSRGESGEALEKKIEKESKKKEADYADTPLKPKYATGRAPYARTVLKKVVEEILDGEDPTRPARGEAHPDGELKAHDGCLYCLLDTDSSVNQHQKERRLDTMTNNHLVRHRMLILDRLLKDLIQDFADGQKDRISRVCVEVGKELTTFSAMDSKKIQRELTLRQKSHTDAVNRLKRELPGKALSANLIRKCRIAMDMNWTCPFTGATYGTHELENLELEHIVPHSFRQSNALSSLVLTWPGVNRMKGQRTGYDFVEQEQENPVPDKPNLHICSLNNYRELVEKLDDKKGHEDDHRRKKKRKALLMVRGLSHKHQSQNHEAMKEIGMTEGMMTQSSHLMKLACKSIKTSLPDAHIDMIPGAVTAEVRKAWDVFGVFKELCPEAADPDSGKILKENLRSLTHLHHALDACVLGLIPYIIPAHHNGLLRRVLAMRRIPEKLIPQVRPVANQRHYVLNDDGRMMLRDLSASLKENIREQLMEQRVIQHVPADMGGALLKETMQRVLSVDGSGEDAMVSLSKKKDGKKEKNQVKASKLVGVFPEGPSKLKALKAAIEIDGNYGVALDPKPVVIRHIKVFKRIMALKEQNGGKPVRILKKGMLIHLTSSKDPKHAGVWRIESIQDSKGGVKLDLQRAHCAVPKNKTHECNWREVDLISLLKKYQMKRYPTSYTGTPR

SEQ ID NO: 17937 - protein, 1113 aa, unidentified
  REGION 1..1113: note = Cas Enzyme sequence
MSRSLTFSFDIGYASIGWAVIASASHDDADPSVCGCGTVLFPKDDCQAFKRREYRRLRRNIRSRRVRIDRIGRLLVQAQIITPEMKETSGHPAPFYLASEALKGHRTLAPIELWHVLRWYAHNRGYDNNVSWSNSLSEDGGNGEDTERVKHAQDLMDKHGTATMAETICRELKLEEGKADAPMEVSTPAYKNLNTAFPRLIVEKEVRRILELSAPLIPGLTAEIIELIAQHHPLTTEQRGVLLQYGIKLARRYRGSLLFGQLIPRFDNRIISRCPVTWAQVYEAELKKGNSEQSARERAEKLSKVPTANCPEFYEYRMARILCNIRADGEPLSAEIRRELMNQARQEGKLTKASLEKAISSRLGKETETNVSNYFTLHPDSEEALYLNPAVEVLQRSGIGQILSPSVYRIAANRLRRGKSVTPNYLLNLLKSRGESGEALEKKIEKERHQQANRKKAKKTDLDYAATPLKPKYATGRAPYARTVLKKVVEEILDGEDPTRPARREAHPDGELKAHDGCLYCLLDTDSSVNQHQKERRLDTMTNNHLVRHRMLILDRLLKDLIQDFAGGQKDRISRVCVEVGKELTTFSAMDSKKIQRELTLRQKSHTDAVNRLKRELPGKALSANLIRKCRIAMDMNWTCPFTGATYGTHELENLELEHIVPHSFRQSNALSSLVLTWPGVNRMKGQRTGYDFVEQEQENPVPDKPNLHIRSLNKYRELVEKLDDKKGHEDDRRRKKKRKALLMVRGLSHKHQSQNHEAMKEIGMTEGMMTQSSHLMKLACKSIKTSLPDAHIDMIPGAVTAEVRKAWDVFGVFKELCPEAADPVNGRIIKEDLRSLTHLHHALDACVLGLISEIIPADRKNVLRRAIIKRRLDQKMKQDFLELRKKRYYKLREKDGQTGASLVDLPSGIKENIREKLMEQRVIQHVPADMGGALLKETIQRVLSVDGSGEDAMVSLSKKKDGKKEKNQVKASKLVGVFPEGPSKLKALKAAIEIDGNYGVALDPKPVVIRHIKVFKRIMALKEQNGGKPVRILKKGMLIHLTSSKDPKRTGVWRIASIKDNERGIAIDLQIPHSAVPGAKTHEFNWINVKLDTLLTKYRLEIYPTSYTGTPR

SEQ ID NO: 17938 - protein, 1025 aa, unidentified
  REGION 1..1025: note = Cas Enzyme sequence
MKETSGHPAPFYLASEALKGHRTLAPIELWHVLRWYAHNRGYDNNASWSNSLSEDGGNGEDTERVKHAQDLMDKHGTATMAETICRELKLEEGKADAPMNVSTPAYKNLNTAFPRLIVEKEVRRILELSAPLIPGLTSEIMELIAQHHPLTTKQRGVLIHYGIKLARCYRGSLLFGQLIPRFDNRIISRCPVSWAQVYEAELKKGNSEQNARERAEKLSKVPTANCPEFYEYRMARILCNIRADGEPLSAEIRRELMNQARQEGKLTKASLEKAISSRLGETETNVANYFTLHPDSEEALYLDPAVEVLKRSGIGETLSPSVYRLAANRLRRGKSVTPNYLLNLLKSRGESVEALEKKIEKERHQQANRKKAKKTDPDYAATPLKPRYATGRAPYARPVLKKVVEETLDGEDPTRPARGEAHPDGELKAHDGCLYCLLDADSSVNQYQKERRLDTMTNNHLVRHRMLILDRLLKDLIQDFADGQKDRISRICVEVGKELTTFSGMGSKKIQTELNLRQKSHTEAVNKLKRDLPGKALSANLIRKCRIAMDMNWTCPFTGERYGTHELENMEMEHIVPYSFRQSNALSSLVLTRKEVNKMKGQRTGYDFVEQEQGKPVTGRTNLHICSFNNYREFVEKLDDKKWHEDDRKRKKKRKALLMVRGLSHRHQLQNHDAMKEIGMTEGMMTQSSHLMKLACKSIKTSLPDAHIDMIPGAVTAEVRKAWDVFGVFKELCPEAADPDSGKILKENLRSLTHLHHALDACVLGLIPYIIPAHHNGLLRRVLAMRRIPEKLIPQVRPVANQRHYVLNDDGRMMLRDLSASLKENIREQLMEQRVIQHVPADMGGALLKETMQRVLSVDGSGEDAMVSLSKKKDGKKKKNQVKASKLVGVFPEGPSKLKALKAAIEIDGNYGVALDPKPVVIRHIKVFKRIMALKEQNGGKPVRILKKGMLIHLTSSKDPKHAGVWRIESIQDSKGGVKLDLQRAHCAVPKNKTHECNWREVDLISLLKKYQMKRYPTSYTGTPR

SEQ ID NO: 17939 - protein, 1200 aa, unidentified
  REGION 1..1200: note = Cas Enzyme sequence
METRGILDELGNLQFAFDVGHSSIGWAVLRRAAPPPALPEILGTGVVIFGADDCLAVKRRQYRQARRHARATRQRIVRMEQLLAHLGVMTTEELAERHDQAGGDSFAWQRAAALLAAARTGQPLPATTWPELWDILRWYAHNRGYFAPPWADRSEEDALDDDEVPDTEKVANAGELMRERHTTTMAETIAAYTAWYDREVARWQQGQRPDKPRHFKGRSAAFDRVSVVWPEVRALLTALKGTLPKLDDTLIRTLLGNDVDPLKDRDAWRTIPCPAIRLPKRYHGGLLFGQSIPRFDNRIIGVCPIQFARLEQQYREAGMAPDDARRRAEKESKLPTKASPEFLRFRWAMQLANVVGAALGVRESHPLPAAARVRLTELAARQGAFTKGEFKKAVREAAGWPEKGGRDNLDALLLHPDAEEALVFDPVQAALRKHPLADALLALPPQCLKRLRGKLARGKEVKPEAVRDWLGEAQAPRLQPTAPPPSASDPLAAFDAAVQRVLDAANTRKGRKQSALTRDQLLDEPLRANYPKGRAPYARPVLRQAYEEVMKGWDPRAEQNDLQPRGCLCQTDELKEAQLHRRLAEQTNNHLIRHRLLILGGEPPKANAKPEQERRRFKGLLHDLVQEFANGDQSRIAGLTIEVNRELRDLSGKDREAQKKELGAKLGDFKRVAAKVEEACRRRGIPCTAGLIRKARVAEDLGWKCPYTGKEFSVDTLLDGVMDKEHIIPHSDRQSDSLDSLVITWKEINLWKGKRTAMEFIRDEGGKAVPGLRGVEIMSLAEFQKHVASLDTRKGHDDDRARKKRRVRRLLTEHYEEKEFTPRDLTVTSHLVRLGAQVLQRAYPPGQRPRVISLPGSVTGEVRKAWKLIGCLGAANPAIFEADGKTPKRKDDIRGITHLHHALDACVLGLASLYFPRHGAVWSAMVKAGGDPEADDDRRLWLAMTKRRPSTAEAALLKATGLYQPDSEGRLHLNDLPDALKQQIRQRLAEKRVVQHIPADMSGVKVEENTRGVVAVKDGRVVLRQRSGRDAKTGLQVVKTTDEAPGKLLGLNPPGGDGKLKRQKGVRVITDNFGVAILDHAPEGEEKFVVIPWHRVWHRLNELKARNGGEAPRVLRNGQVVSITSGTYAGRWRVFSIKAKQAGIKVNLGTLDCLGVEEDYLDPATGKKRTRTVAGCKLDAALPTMVKGGLKVLKPRFCGT

SEQ ID NO: 17940 - protein, 1151 aa, unidentified
  REGION 1..1151: note = Cas Enzyme sequence
MVVPNQSLEGYYDKVVHRKALAPCHCGKALSLFIDIFWWERWKKMSYGIGLDIGIASVGYAVLDLDYEEKPWGIIRLGSRIFDRAEVPKTGASLAQPRREARSARRRLRRHRHRLERIRNLFVDSHLLTREELDHLYDGQLTDIYELRVKALDERVSNAELARILLHLATRRGFKSNRKAELADKEAGALKSAISENEKSIAENHYRSVGEMFLRDPRFKEHKRNKGGTYTTTVARSMVADEAALILDTQQKLGNSVITEDFKDAYLTIMLSQRAFDEGPGGKSPYGGNMIAKMVGICTFEDGSNGDPPEKRAAKACYSFEYFNLLQKINHIRLISDKDTIPLTNDQRTKLIELAKKVEKLNYDRIRKELNIPKEYSFNMVRYETVSKKSTPDEEQQAAEKKEKFEYLPFYHQIRKALDHVKKNRIQDYTVDMLDQVGWYLTIYKGDDKRREALSNAGIPSEDIEELLTITGMRKFGHLSIKALKKINPYLEKGLNYNDACDAAGYNFTGNVGGKTKLLPANAPELEDITNPVARRSISQTIKVINAIIREQGESPLYINVELARELSKDYQERQKIEKENEQNQSRNDKAMEKIRENFGIAKPSGQDLVKYKLWEEQDGISPYSQKPIEYERLFETGYVEVDHIIPYSISFDDTYKNKVLVFSSENRDKGNRIPMAYLRKKGAQAADDFKVWVNANIRDYRKRQKLLKVKITNDDISGFKERNLTDTKYISRFMYNYIADHLQFAPSQTGKKRRVTAVNGMVTSYLRKRWGINKIRGNGDKHHAVDAVVIAAATPSLIREISGYAAYRETGRFKHKYAYEQGESGGYLVHKGTGEIKDEFPYPWEGFRTELIARSSDRPTMGLEKLPYYVNKDLSEIKPIFVSRMPRRKVTGPAHKETITGARHIEDGFTLSKVALTDLKMEDGEIKDYYNPSSDRILYEALKDRLNQYNGDAKAAFAEPFYKPKADGSRGPLVKKVKIMNKTTMPVLVQQKTGAAVNDTMVRVDVFYVKGEGYYLVPIYVADTVKPQLPNLAIVANKPMTEWKVMDDKNFQFSLYPGDLIHFESKQPKTFTRVNDDSNLNKTYDATNEFVYYVKTGIATASITIITHDHSYVLNSFGVKKVPLIEKYEVDVLGNYHKVKREKRRPIIFK

SEQ ID NO: 17941 - protein, 1061 aa, unidentified
  REGION 1..1061: note = Cas Enzyme sequence
MSAECQVRANEKNYVLGIDLGVLSLGWAAVEYAGDKPVGILKTGVRIWEYSDASTLTVQRGQEKPPGQERRQARQQRRQIFRRAQRLRRTCSALQAMGLLDPGRRNSQARKQLWDMVDQQAQEWLKSNIPDLADDPQLDHKFVYHLRAAALDYPLPKILLARVFFHLAQRRGFQSNRRVVGRSEKEGEVKKAISLLEHEISESGCRTLGEYFATLDPYTTRIRGRWTSRKMYQDEFERIWSAQTAINPGILDPSQKSRLFKAIFYQRPLKSQKRLVGRCSLEVIIRRGPDGPREVRPRRAPLASLEAQRIRYMQRINDLEFTSPEGQRRIPTQPEREQLYQLAEKVEEISFIQIRKVLGIPTGKKGAGWECNLERGGEKRIPGNKTAARLRKILGDKLWDGFSEARQKELVDTILSYLSPEALQIHLENVWKFDSDTAKQLSNIELEQGYHSFSRRAIRKLLPLMQQGKRLNEAIKAVYGDTGRVRSVHERLPPVWKVMPELRNPLLVRALTELRKVINNLIRKFGRPQYIRIELARELKLGKKRRQELAKEMRKQEAERERAAKVIEETFHRKARPNEILKYLLAQECGWECPYTGEKISVQTLLGDQPQFDVEHIWPFDRTLDDSFRNKTLCYHEENRQVKGNKTPFEAYSNLPDRWREILERVKRFKGPFAKEKLRRFLAEDIPQDFPMRHLNDTRWITTAAADYLGYLYGGRIDSEGRQRVFTVTGPLTALIRRGWNLDGILGGPDKNRFDYRQHAIDAIVIALINQAIVQQIAVSSSRLWGTHRPTAVQLSEPWLSFYQYAKEAILNIVVSHRISRRLSGALHEQTNYAPPDDNGRTKVRKPLAALSAKEVEHIVDDTIRKYVQHALANAEKKSPKEVFANPENLPVLKGKNNHVAVVKSVRIWVSAKPLPVGKGDRVRYVKPGNNHHIEIYAILDEQGNPVRYDGRCVTLLEAVQRKRRGEPVVCRNHGPKTRFLFSLSKNECIEWTNEKDEKELLRVVGIADNDIEFRLLHDARPSTLVKEAKDRIRGGYSKLFERRARKVLVTPLGEVLPAND

SEQ ID NO: 17942 - protein, 1335 aa, unidentified
  REGION 1..1335: note = Cas Enzyme sequence
MGDQHPTHILGLDIGSNSVGSAWVNRRAKQVYLAASVFPAGVDEKEGQRGAPKNQARRQTRGQRRTIDRRARRKRLLIKTLVDTGFLPRDAKEFDAVIVCDPWQLRVKALTKQITPYEFGRICLHMAQRRGAAGINIVMEDEEGGETKTTAKKPTDDEGKIKAGMKRLDAAMKEANVETVAVFIDKLARERTTEKGGVSWREPIRNRLYRLPEDQQFYAGRDMIRKEFYKIVEAQQGFADSPLAAMLTADFIAQLDQPKGDATWKNSGLLFGQRRIYWDMGTLGRCDLEPTERCVPLADRHASYYRVVETVNNIKIVTGDGQLRPLCRKERDAVIDTLRGPLFKKSKGKLVPKASASVTDIKEALGIKRNDKWTRLNIEADEKREINTDWFHREIAHGAFGEDRWAAMDERQRESVNRAILKFDPEDKKHAPKLRQGGMDWWRLDEAAADRLVAAWLRRPKLEKRLNMSRRAILNLLPIMETFDEKAERWPTQQEARKRFAKTLDDPNRAQRYATGAAGLTSRDRYYMKLDKHRIAENLPALPPAPTLSNPVVRKAIHEVRRHVIEWMRIFGKKPERIVIEMARETKDSEKKRNEALSRNSFRNAIRTKIVEETLPMAFGEEGAHRLTLNQRRKAEDRVLLARMQKHTCPYCGAADITDVEAAKGDGFEIDHIAPYSKTGDNGLNNKVVVHTNCNRGKTNKTPREWWGDSFDERIVVAARLFDIEKPDNKDYFRKEDYKRKWQNFTRDISEDGEWRTSQLTDTAYAAKQVAAYLADALYDGRGLPERGDGSDAQRIFFTQGRFTNRLRKDWQLFETVTASDEIGTPDTTTAEERLKLAQKDRGDHRQHAIDAVVIALTDPGIKNYLAKEAKDQAEFKEFNGKWQRPTPIPVPWGEVADFRLAVLGQVYPHLSNGGNRGEKKFLLVSHRAVKRRLVGAFHKQTQYGPVMDSMGNRVPDRVTIRQPIYDSPRSHIKPKHLRLPSPESDDEAKRRITEDLVLRRHSKGDAQKIANRLVASGEFRRKLVDPTPGKTGIVRDRSLRRLIRSELEARGLNPDQFTAGQLKAAIDANGPLRQKSGIPIKSAVLLWANNDPVVITRKKTSIETGKRTPIDDPRTLRIHDGQNNHHVAIRASGKSGKWGGEIVPTFVVAQRLSKRQQALIEIDRAYRHLRRGLTPHERAGLSIEVRRAEGERRKREWKQAMKELKPRRATVIAAHPLVDRTDNDKSTFVMSLAEGEMIYARRHDRPGAPADYFVVRQLNRNKRGGAKSIELVAHWDARKKLPSKEKKKGGDLSRFQDRWVVSPAQLASCGPEPGTAPQKVRVSPLGKVTILEKD

SEQ ID NO: 17943 - protein, 1245 aa, unidentified
  REGION 1..1245: note = Cas Enzyme sequence
VLGLDIGSNSVGSAWADHDAQQVLVAASVFPAGVDEKDDKRGAPKNQARRQTRQQRRTIDRRARRKRLLQRFLIENHLLPRDADAFEALIGMDPWPLRVEALSRALSPHEFGRICLHMAQRRGASGINITIEDDDEAGGAGADGKQADSDDGKIKAGMKRLELAMKEAKKSTVAQFIVALAAKRSVTRDGVTWREPIRNRQYRMPEDQQYYAGRELIRDEFHKIVAAQRGFKKGPLAKVLTDELVSRFDNPKGNATWKNAGLLFGQRRIYWDMGTLGRCDLEPTERCAPIADRHAGYYRVVAMVNNILLLRDDRPPEPLSDLQRQAVIDLLRGPLFMTRNNQRVPKSSASVTEIKAALGIAKNDKSVRLNIDKDDKQAIVTDWFHREIVHGAIGVARWDAMDERARESVNRAILKFDPEDAEHAQKLRDGARSWWGLDGDACEALVAAWLRRPKLEKRLNLSRKAILNLLPFMEAFNPAADRWPTQQEARKEHAQTLDDEHARRRYETGAPGLTAADRYYMRQDKHRISDDLAALPPAPMLSNPVVRKAIHEVRRHVIAWMRRFGRRPDRVVIEMARETKDSERRRNEVLARNRWRNAIREKIIEEVLPMAFGQGKAAQLTLNQRRAAVDRVLLARQQDQTCPYCHRRGLTDVAAAKGDGVEIDHIAPYSRTGDNGLNNKVVVHTECNRGKTNKTPREWWGATFDEKIVVAERLFKDAKPDKGDYFRYRDYARKWDNFTREIAAEGEWRTSQLTDTAYAAKQVAAYLADALYDGRGLPERGDGGDQQRIFFTMGRFTSTLRKDWQLFETLLASESLGTVDTTPADERLAQAAKDRGDHRQHAIDAAVIALTDPAIKNVLASEAKRNAEYHDRHGKWPKRTPIGVPWGKIDAFRLDVLGQVYPHLAKGRARDGAAALVVSHRPVKRRLVGAFHEETHYGPVVGPLPSHRREKIGTLFTNRISAGRLTPNHLRVPDGWDALSAKLHDPKTPDGARCDLRRQLAALADCPPAKSGIVRDRALRDRIRKCLRGGGMNPDKFTANEINKFVAEGKLTMASGVPIKGVVLLRVNSDPVVIPRGRRDAVTGQRTRIVDPRDAGAAIQRTDRVYIGGNNHHLAIRADRKSGKWGGGIVPTYAAARRVRIEKRDAVDRSDTETATFVMSLAEGEMIYARRRDRPEQPPGFYVVCKLDKPATVHFAPHWDARKASEQDRWTASAAQLAGCGPESGAPPQKARVGPLGEVTFLEKD

SEQ ID NO: 17944 - protein, 1138 aa, unidentified
  REGION 1..1138: note = Cas Enzyme sequence
MSMISTNDDRVEGMHMARYGERKYRVGIDVGDRSVGLAFIEFDEQDMPSELLRMFTVRHDGGIDPTTNKTPKSRKETAGVARRVRKMRKRRTKRLQELDALLMASGFPIVDVSVGETYECWQARAAAVEGFITDEQTRLETVSRAIRHMARHRGWRNPWLTWQGFRELEVPTANHRKNIESANSKLHLDLEDTSTLGQIAASASASNWMLRPRNGQKRKEASNPVLVAQVQQADQLAELYKILEVQRIDSTITEKIARAVFDQVRPYVPKGNIGLDELPGMGAYYRASKASLAFQEFRVRAAVANLRVKNSPRGQERLRLDPQDAQAVAEYLLTWREDQPPQWGDVANALSIDENLLVIPVFEDAFLKLAPYDRTSSDLEQRLSSSANKKKLAGVREWWDSADTQMRELFIEFITSPNESVYEEADESGFSDVFNGWSDEAKEVLLGMQFESGRSAYSVESLRRLNLRLRTGEVDLHEARRLEFGVDDTWRPSLPSIDERTGQPAVDRVLTIVRRAIMGAVDKWGVPEAVVVEHARSGFMGASARNDYLNEVSRRTATRAKLREIVKQQGVERPSDGDIHKWECINRQRCTCAYCGNEITFTTAEMDHIVPRAGGGSNVRENLVAVCRRCNSEKRNIPFAIFAESDAHPYTSLNETLTRVRNWDWSRDRSEQRLKNRMLQRLKRRESDPEIDERSLASTAYAAVEVRQRIAEYLGRITGEDELNRVQVYTGGATREARRAGKIDARIRIRGKDEKDRFDVRHHAIDAAVMATLNHSVAFTLRERAEMKRSATMNRYLDPNEEWKDYSGRTSSAQKRFTVWRQQAHRLADLIVDAVEADSVPVAQQLRLSASRGSVHKDTVSALVRKQLGAPWTAQEILQIVDPEIYVHLRDLAAQNKGVLELDPSRRIQLLSGVWISGSELVEVFPKAAASMKVSSGSVEIGEQIHHARVYAWRGTKGEFQYGILRVFTAELPWLQRQAQSKDLFTMNIDDRSMSYRDLLQTVRKKIESDEARCIGWLTQNDELVLNVEVLRQGSDKIAHFLSTYPESRWKLDGFPENRRFRIRPLYLSREGSDHLDPICAEILEKGAIVGTSNLLSNVHQIIRRDSLGFERWRSQGGLPASWSVPDSTADTVETGLK

SEQ ID NO: 17945 - protein, 1100 aa, unidentified
  REGION 1..1100: note = Cas Enzyme sequence
MSEFHYALGLDIGIGSVGWAVLRNQPNGEPDRIQDLGVRIFDKAEQPKTGASLAAPRRDARSARRRLRRHRHRLERIHYLMEQRGIMPVADIQAMYAAGGFQKSPYQLRAEALDRPLIKEEAVRVLIHLAQRRGYKSNSTAEAAKDEKETGKVKTAIEENRRCMAEHGYRTVGEMMYRDERFWQKHPDGTRYHQTRNKAEDYRFTVERAAIVDEVRQIFAAQRRLGVVWMDEDMETAYLSVLESQRSFDEGPGGDSPFSGGIGERVGACTFEPDEKRAAKATYTFEYFKLLQDLNRMRLTGMGMPPEPLDDEQREVLKSAALRSASLSYGQIRKKLNLDDDVFFNDLYYGEKTKEEAEKRKWPQMQSYHKLRMALDKVGKGAIGTLTEEQLNAIATILTECKSDAKRIAALREAGIPPQFDEALLPLSFSKYGSLSVRAMQKLIPLLEEGLRYDEACTRVYGDHRGLRSEQRTNRLSLNDMEEITNPVVRRAVSQTIKVINAVVRTYGPPDVVRIELAREMSRTFDERRKMEKRQDDNRAANEQAKDQIAEYKGDHATGLDIVKFKLYREQDGVCLYSGQNLDIARLFEPGYADVDHIIPYSRCFDDSYQNKVLVLASENRQKGNRLPYEYFGQDEARWHGYEVRVENLIHNYRKRQKLLKRRLTEEESSGFIDRNLKDTQYITRAVYNLIRDHLAFAESNYRKKPVQAVNGAVTSMLRGRWGVQKIREDGDLHHCLDAAVIATTTPGLVQRLTAYNKHRETWERPPAGYVDPATGELIELPQEARHDPFPKPWERFRQELEARLDPIDPRHQIDLLKLETYESDEEIKPVFVSRMPNHKVTGAAHAETIRSSKGGDGFTVTKTPLTNLKLNKFGEIEGYYNPASDTLLYDALLARLKDFGGDGAKAFAQPFYKPKKDGSPGPRVDKVKIREKATVGLPVRDGIAANGSMVRIDIFYVEDDGYYFVPIYVADTKKDRLPSKAPVAHKAYSAWKEMRNENFIFSLYPGDLVRIQSRAGIKLSLAKDGTGEKEIVRQNGLYYYRSADIEGGKIDIEVHDRRYSKHGLGLKTLQSIEKYQVDVLGNYYKVDLPEKRMTFSKED

SEQ ID NO: 17946 - protein, 1100 aa, unidentified
  REGION 1..1100: note = Cas Enzyme sequence
MSEFHYALGLDIGIGSVGWAVLRNQPNGEPDRIQDLGVRIFDKAEQPKTGASLAAPRRDARSARRRLRRHRHRLERIRYLMEQRGIMPVADIQAMYAAGGFPKSPYQLRAEALDRPLTKEEAVRVLIHLAQRRGYKSNSTAEAAKDEKETGKVKTAIEENRRCMAEYGYRTVGEMMYRDERFWQKHPDGTHYHQTRNKAEDYRFTVERAAIVDEVRQIFAAQRRLGTVWMDEDMETAYLSILESQRSFDEGPGGDSPFSGGIGERVGACTFEPDEKRAAKATYTFEYFKLLQDLSRMRLTGMGMPPEPLDAAQREALKSAALRSASLSYGQIRKKLNLDDDVFFHGLYYGEKTKEEAEKRKWPQMQSYHKMRTALDKVGKGAIGTLTEEQLNAVATILTECKSDAKRIAALREAGIPPQFDEALLPLSFSKYGSLSVQAMQKLIPLLEEGLRYDEACTRVYGDHRGLHPEQRKNRLSLTDMDEITNPVVRRAVSQTIKVINAVVRTYGPPDVVRIELAREMSRTFDERRKMEKRQDDNRAANERAKDQIAEYKGDHATGLDIVKFKLYQEQDGVCLYSGQNLDIARLFEPGYADVDHIIPYSRCFDDSYQNKVLVLASENRQKGNRLPYEYFGQDEARWHGYEVRVENLIHNYRKRQKLLKRRLTEEESSGFIDRNLKDTQYITRAVYNLIRDHLAFAESNYRKKPVQAVNGAVTAMLRGRWGVQKIREDGDLHHCLDAAVIAATTPGLVQRLTAYNKHRETWERSPAGYVDPATGEMLELPQEARRDPFPKPWERFRQELEARLDPIDPRHQIDLLKLETYESDEEIKPVFVSRMPNHKVTGAAHAETIRSSKGGYGFTVTKTPLTNLKLNKFGEIEGYYNPASDTLLYDALLARLKDFGGDGAKAFAQPFYKPKKDGSPGPRVDKVKICEKATVGLPVRDGIAANGSMVRIDVFYVEGDGYYFVPIYVADTKKESLPNKAAVAMKPYNLWKKMKDENFVFSLYPGDLVRIQSRKGIKLNLAKGGTGEKEIVRQEGMYYYRSAGIAVAQISVETHDRRYLQPSLGIKTLQSIEKYQVDVLGNYYKVDLPEKRMTFSKEG

SEQ ID NO: 17947 - protein, 1100 aa, unidentified
  REGION 1..1100: note = Cas Enzyme sequence
MSEFHYALGLDIGIGSVGWAVLRNQPNGEPDRIQDLGVRIFDKAEQPKTGASLAAPRRDARSARRRLRRHRHRLERIRYLMEQRGIMPVADIQAMYAAGGFQKSPYQLRAEALDRPLTKEEAVRVLIHLAQRRGYKSNSTAEAAKDEKETGKVKTAIEENRRCMAEHGYRTVGEMMYRDERFWQKHPDGTRYHQTRNKAEDYRFTVERAAIVDEVRQIFAAQRRLGTAWMDEYMETAYLSILESQRSFDEGPGGDSPFSGGIGERVGACTFEPDEKRAAKATYTFEYFKLLQDLSRMRLTGMGMPPEPLDAAQREVLKSAALRSASLSYGQIRKKLNLDDDVFFHGLYYGEKTKEEAEKRKWPQMQSYHKMRTALDKVGKGAIGTLTEEQLNAVATILTECKSDAKRIAALREAGIPPQFDEALLPLSFSKYGSLSVQAMQKLIPLLEEGLRYDEACTRVYGDHRGLHPEQRKNRLSLTDMDEITNPVVRRAVSQTIKVINAVVRTYGPPDVVRIELAREMSRTFDERRKMEKRQDDNRAANERAKDQIAEYKGDHATGLDIVKFKLYREQDGVCLYSGQNLDIARLFEPGYADVDHIIPYSRCFDDSYQNKVLVLASENRQKGNRLPYEYFGQDEARWHGYEVRVENLIHNYRKRQKLLKRRLTEEESSGFIDRNLKDTQYITRAVYNLIRDHLAFAESNYRKKPVQAVNGAVTAMLRGRWGVQKIREDGDLHHCLDAAVIAATTPGLVQRLTAYNKHRETWERSPAGYVDPATGEMIELPQEARRDPFPKPWERFRQELEARLDPIDPRHQIDLLKLETYESDEEIKPVFVSRMPNHKVTGAAHAETIRSSKGGDGFTVTKTPLTNLKLNKFGEIEGYYNPASDTLLYDALLARLKDFGGDGAKAFAQPFYKPKKDGSPGPRVDKVKICEKATVGLPVRDGIAANGSMVRIDVFYVEGDGYYFVPIYVADTKKESLPNKAAVAMKPYNLWKKMKDENFVFSLYPGDLVRIQSRKGIKLNLAKGGTGEKEIVRQEGMYYYRSAGIAVAQISVETHDRRYLQPSLGIKTLQSIEKYQVDVLGNYYKVDLPEKRMTFSKEG

SEQ ID NO: 17948 - protein, 1100 aa, unidentified; identical to SEQ ID NO: 17947
  REGION 1..1100: note = Cas Enzyme sequence

SEQ ID NO: 17949 - protein, 1100 aa, unidentified
  REGION 1..1100: note = Cas Enzyme sequence
MSEFHYALGLDIGIGSVGWAVLRNQPNGEPDRIQDLGVRIFDKAEQPKTGASLAAPRRDARSARRRLRRHRHRLERIRYLMEQRGIMPVADIQAMYAAGGFPKSPYQLRAEALDRPLTKEEAVRVLIHLAQRRGYKSNSTAEAAKDEKETGKVKTAIEENRRCMAEYGYRTVGEMMYRDERFWQKHPDGTHYHQTRNKAEDYRFTVERAAIVDEVRQIFAAQRRLGTVWMDEDMETAYLSILESQRSFDEGPGGDSPFSGGIGERVGACTFEPDEKRAAKATYTFEYFKLLQDLSRMRLTGMGMPPEPLDAAQREALKSAALRSASLSYGQIRKKLNLDDDVFFHGLYYGEKTKEETEKRKWPQMQSYHKMRTALDKVGKGAIGTLTEEQLNAVATILTECKSDAKRIAALREAGIPPQFDEALLPLSFSKYGSLSVQAMQKLIPLLEEGLRYDEACTRVYGDHRGLHPEQRKNRLSLTDMDEITNPVVRRAVSQTIKVINAVVRTYGPPDVVRIELAREMSRTFDERRKMEKRQDDNRAANERAKDQIAEYKGDHATGLDIVKFKLYQEQDGVCLYSGQNLDIARLFEPGYADVDHIIPYSRCFDDSYQNKVLVLASENRQKGNRLPYEYFGQDEARWHGYEVRVENLIHNYRKRQKLLKRRLTEEESSGFIDRNLKDTQYITRAVYNLIRDHLAFAESNYRKKPVQAVNGAVTAMLRGRWGVQKIREDGDLHHCLDAAVIAATTPGLVQRLTAYNKHRETWERSPAGYVDPATGEMLELPQEARRDPFPKPWERFRQELEARLDPIDPRHQIDLLKLETYESDEEIKPVFVSRMPNHKVTGAAHAETIRSSKGGYGFTVTKTPLTNLKLNKFGEIEGYYNPASDTLLYDALLARLKDFGGDGAKAFAQPFYKPKKDGSPGPRVDKVKICEKATVGLPVRDGIAANGSMVRIDVFYVEGDGYYFVPIYVADTKKESLPNKAAVAMKPYNLWKKMKDENFVFSLYPGDLVRIQSRKGIKLNLAKGGTGEKEIVRQEGMYYYRSAGIAVAQISVETHDRRYLQPSLGIKTLQSIEKYQVDVLGNYYKVDLPEKRMTFSKEG

SEQ ID NO: 17950 - protein, 1100 aa, unidentified
  REGION 1..1100: note = Cas Enzyme sequence
MSEFHYALGLDIGIGSVGWAVLRNQPNGEPDRIQDLGVRIFDKAEQPKTGASLAAPRRDARSARRRLRRHRHRLERIRYLMEQRGIMPVADIQAMYAAGGFPKSPYQLRAEALDRPLTKEEAVRVLIHLAQRRGYKSNSTAEAAKDEKETGKVKTAIEENRRCMAEYGYRTVGEMMYRDERFWQKHPDGTHYHQTRNKAEDYRFTVERAAIVDEVRQIFAAQRRLGTVWMDEDMETAYLSILESQRSFDEGPGGDSPFSGGIGERVGACTFEPDEKRAAKATYTFEYFKLLQDLSRMRLTAMGMPPEPLDAAQREALKSAALRSASLSYGQIRKKLNLDDDVFFHGLYYGEKTKEEAEKRKWPQMQSYHKMRTALDKVGKGAIGTLTEEQLNAVATILTECKSDAKRIAALREAGIPPQFDEALLPLSFSKYGSLSVQAMQKLIPLLEEGLRYDEACTRVYGDHRGLHPEQRKNRLSLTDMDEITNPVVRRAVSQTIKVINAVVRTYGPPDVVRIELAREMSRTFDERRKMEKRQDDNRAANERAKDQIAEYKGDHATGLDIVKFKLYQEQDGVCLYSGQNLDIARLFEPGYADVDHIIPYSRCFDDSYQNKVLVLASENRQKGNRLPYEYFGQDEARWHGYEVRVENLIHNYRKRQKLLKRRLTEEESSGFIDRNLKDTQYITRAVYNLIRDHLAFAESNYRKKPVQAVNGAVTAMLRGRWGVQKIREDGDLHHCLDAAVIAATTPGLVQRLTAYNKHRETWERSPAGYVDPATGEMLELPQEARRDPFPKPWERFRQELEARLDPIDPRHQIDLLKLETYESDEEIKPVFVSRMPNHKVTGAAHAETIRSSKGGYGFTVTKTPLTNLKLNKFGEIEGYYNPASDTLLYDALLARLKDFGGDGAKAFAQPFYKPKKDGSPGPRVDKVKICEKATVGLPVRDGIAANGSMVRIDVFYVEGDGYYFVPIYVADTKKESLPNKAAVAMKPYNLWKKMKDENFVFSLYPGDLVRIQSRKGIKLNLAKGGTGEKEIVRQEGMYYYRSAGIAVAQISVETHDRRYLQPSLGIKTLQSIEKYQVDVLGNYYKVDLPEKRMTFSKEG

SEQ ID NO: 17951 - protein, 1100 aa, unidentified
  REGION 1..1100: note = Cas Enzyme sequence
MSEFHYALGLDIGIGSVGWAVLRNQPNGEPDRIQDLGVRIFDKAEQPKTGASLAAPRRDARSARRRLRRHRHRLERIRYLMEQRGIMPVADIQAMYAAGGFQKSPYQLRAEALDRPLIKEEAVRVLIHLAQRRGYKSNSTAEAAKDEKETGKVKTAIEENRRCMAEYGYRTVGEMMYRDERFWQKHPDGTRYHQTRNKAEDYRFTVERAAIVDEVRQIFAAQRRLGVVWMDEDMETAYLSVLESQRSFDEGPGGDSPFSGGIGERVGACTFEPDEKRAAKATYTFEYFKLLQDLNRMRLTGMGMPPEPLDDEQREVLKSAALRSASLSYGQIRKKLNLDDDVFFNDLYYGEKTKEEAEKRKWPQMQSYHKLRMALDKVGKGAIGTLTEEQLNAIATILTECKSDAKRIAALREAGIPPQFDEALLPLSFSKYGSLSVRAMQKLIPLLEEGLRYDEACTRVYGDHRGLRSEQRTNRLSLNDMEEITNPVVRRAVSQTIKVINAVVRTYGPPDVVRIELAREMSRTFDERRKMEKRQDDNRAANEQAKDQIAEYKGDHATGLDIVKFKLYREQDGVCLYSGQNLDIARLFEPGYADVDHIIPYSRCFDDSYQNKVLVLASENRQKGNRLPYEYFGQDEARWHGYEVRVENLIHNYRKRQKLLKRRLTEEESTGFIDRNLKDTQYITRAVYNLIRDHLAFAESNYRKKPVQAVNGAVTAMLRGRWGVQKIREDGDLHHCLDAAVIAATTPGLVQRLTAYNKHRETWERPPAGYVDPATGELIELPQEARHDQFPKPWERFRQELEARLDPIDPRHQIDLLKLETYESDEEIQPVFVSRMPNHKVTGAAHAETIRSSKGGDGFTVTKTPLTNLKLNKFGEIEGYYNPESDKLLYDALLARLKAFGGDGAKAFDQPFYKPKKDGTPGPRVDKVKICEKATVGLPVRDGIAANGSMVRIDVFYVEDDGYYFVPIYVADTKKESLPNKAVVAYKAYSEWKEMKDENFIFSLYPGDLVRIQSRKGIKLNLAKGGTGEKEIVRQEGMYYYRAAGITVGAIQIETHDRRYLQPSLGIKTLQSIEKYQVDVLGNYYKVDLPEKRMTFSKEG

SEQ ID NO: 17952 - protein, 1100 aa, unidentified
  REGION 1..1100: note = Cas Enzyme sequence
MSEFHYALGLDIGIGSVGWAVLRNQPNGEPDRIQDLGVRIFDKAEQPKTGASLAAPRRDARSARRRLRRHRHRLERIRYLMEQRGIMPVADIQAMYAAGGFQKSPYQLRAEALDRPLTKEEAVRVLIHLAQRRGYKSNSTAEAAKDEKETGKVKTAIEENRRCMAEHGYRTVGEMMYRDERFWQKHPDGTRYHQTRNKAEDYRFTVERAAIVDEVRQIFAAQRRLGTAWMDEYMETAYLSILESQRSFDEGPGGDSPFSGGIGERVGACTFEPDEKRAAKATYTFEYFKLLQDLSRMRLTGMGMPPEPLDAAQREVLKSAALRSASLSYGQIRKKLNLDDDVFFHGLYYGEKTKEEAEKRKWPQMQSYHKMRTALDKVGKGAIGTLTEEQLNAVATILTECKSDAKRIAALREAGIPPQFDEALLPLSFSKYGSLSVQAMQKLIPLLEEGLRYDEACTRVYGDHRGLHPEQRKNRLSLTDMDEITNPVVRRAVSQTIKVINAVVRTYGPPDVVRIELAHEMSRTFDERRKMEKRQDDNRAANERAKDQIAEYKGDHATGLDIVKFKLYREQDGVCLYSGQNLDIARLFEPGYADVDHIIPYSRCFDDSYQNKVLVLASENRQKGNRLPYEYFGQDEARWHGYEVRVENLIHNYRKRQKLLKRRLTEEESSGFIDRNLKDTQYITRAVYNLIRDHLAFAESNYRKKPVQAVNGAVTAMLRGRWGVQKIREDGDLHHCLDAAVIAATTPGLVQRLTAYNKHRETWERSPAGYVDPATGEMIELPQEARRDPFPKPWERFRQELEARLDPIDPRHQIDLLKLETYESDEEIKPVFVSRMPNHKVTGAAHAETIRSSKGGDGFTVTKTPLTNLKLNKFGEIEGYYNPASDTLLYDALLARLKDFGGDGAKAFAQPFYKPKKDGSPGPRVDKVKICEKATVGLPVRDGIAANGSMVRIDVFYVEGDGYYFVPIYVADTKKESLPNKAAVAMKPYNLWKKMKDENFVFSLYPGDLVRIQSRKGIKLNLAKGGTGEKEIVRQEGMYYYRSAGIAVAQISVETHDRRYLQPSLGIKTLQSIEKYQVDVLGNYYKVDLPEKRMTFSKEG

SEQ ID NO: 17953 - protein, 1100 aa, unidentified
  REGION 1..1100: note = Cas Enzyme sequence
MSEFHYALGLDIGIGSVGWAVLRNQPNGEPDRIQDLGVRIFDKAEQPKTGASLAAPRRDARSARRRLRRHRHRLERIRYLMEQRGIMPVADIQAMYAAGGFQKSPYQLRAEALDRPLTKEEAVRVLIHLAQRRGYKSNSTAEAAKDEKETGKVKTAIEENRRCMAEHGYRTVGEMMYRDERFWQKHPDGTRYHQTRNKAEDYRFTVERAAIVDEVRQIFAAQRRLGTAWMDEYMETAYLSILESQRSFDEGPGGDSPFSGGIGERVGACTFEPDEKRAAKATYTFEYFKLLQDLSRMRLTGMGMPPEPLDAAQREVLKSAALRSASLSYGQIRKKLNLDDDVFFHGLYYGEKTKEEAEKRKWPQMQSYHKMRTALDKVGKGAIGTLTEEQLNAVATILTECKSDAKRIAALREAGIPPQFDEALLPLSFSKYGSLSVQAMQKLIPLLEEGLRYDEACTRVYGDHRGLHPEQRKNRLSLTDMDEITNPVVRRAVSQTIKVINAVVRTYGPPDVVRIELAREMSRTFDERRKMEKRQDDNRAANERAKDQIAEYKGDHATGLDIVKFKLYREQDGVCLYSGQNLDIARLFEPGYADVDHIIPYSRCFDDSYQNKVLVLASENRQKGNRLPYEYFGQDEARWHGYEVRVENLIHNYRKRQKLLKRRLTEEESSGFIDRNLKDTQYITRAVYNLIRDHLAFAESNYRKKPVQAVNGAVTAMLRGRWGVQKIREDGDLHHCLDAAVIAATTPGLVQRLTAYNKHRETWERPPAGYVNPATGELIELPQEARRDPFPKPWERFRQELEARLDPIDPRHQIDLLKLETYESDEEIKPVFVSRMPNHKVTGAAHAETIRSSKGGDGFTVTKTPLTNLKLNKFGEIEGYYNPASDTLLYDALLARLKDFGGDGAKAFAQPFYKPKKDGSPGPRVDKVKICEKATVGLPVRDGIAANGSMVRIDVFYVEGDGYYFVPIYVADTKKESLPNKAAVAMKPYNLWKKMKDENFVFSLYPGDLVRIQSRKGIKLNLAKGGTGEKEIVRQEGMYYYRSAGIAVAQISVETHDRRYLQPSLGIKTLQSIEKYQVDVLGNYYKVDLPEKRMTFSKEG

SEQ ID NO: 17954 - protein, 1100 aa, unidentified; identical to SEQ ID NO: 17946
  REGION 1..1100: note = Cas Enzyme sequence

SEQ ID NO: 17955 - protein, 1100 aa, unidentified
  REGION 1..1100: note = Cas Enzyme sequence
MSEFHYALGLDIGIGSVGWAVLRNQPNGEPDRIQDLGVRIFDKAEQPKTGASLAAPRRDARSARRRLRRHRHRLERIRYLMEQRGIMPVADIQAMYAAGGFPKSPYQLRAEALDRPLTKEEAVRVLIHLAQRRGYKSNSTAEAAKDEKETGKVKTAIEENRRCMAEYGYRTVGEMMYRDERFWQKHPDGTHYHQTRNKAEEYRFTVERAAIVDEVRQIFAAQRRLGTVWMDEDMETAYLSILESQRSFDEGPGGDSPFSGGIGERVGACTFEPDEKRAAKATYTFEYFKLLQDLSRMRLTGMGMPPEPLDAAQREALKSAALRSASLSYGQIRKKLNLDDDVFFHGLYYGEKTKEEAEKRKWPQMQSYHKMRTALDKVGKGAIGTLTEEQLNAVATILTECKSDAKRIAALREAGIPPQFDEALLPLSFSKYGSLSVQAMQKLIPLLEEGLRYDEACTRVYGDHRGLHPEQRKNRLSLTDMDEITNPVVRRAVSQTIKVINAVVRTYGPPDVVRIELAREMSRTFDERRKMEKRQDDNRAANERAKDQIAEYKGDHATGLDIVKFKLYQEQDGVCLYSGQNLDIARLFEPGYADVDHIIPYSRCFDDSYQNKVLVLASENRQKGNRLPYEYFGQDEARWHGYEVRVENLIHNYRKRQKLLKRRLTEEESSGFIDRNLKDTQYITRAVYNLIRDHLAFAESNYRKKPVQAVNGAVTAMLRGRWGVQKIREDGDLHHCLDAAVIAATTPGLVQRLTAYNKHRETWERSPAGYVDPATGEMIELPQEARRDPFPKPWERFRQELEARLDPIDPRHQIDLLKLETYESDEEIKPVFVSRMPNHKVTGAAHAETIRSSKGGDGFTVTKTPLTNLKLNKFGEIEGYYNPASDTLLYDALLARLKDFGGDGAKAFAQPFYKPKKDGSPGPRVDKVKICEKATVGLPVRDGIAANGSMVRIDVFYVEGDGYYFVPIYVADTKKESLPNKAAVAMKPYNLWKKMKDENFVFSLYPGDLVRIQSRKGIKLNLAKGGTGEKEIVRQEGMYYYRSAGIAVAQISVETHDRRYLQPSLGIKTLQSIEKYQVDVLGNYYKVDLPEKRMTFSKEG

SEQ ID NO: 17956 - protein, 1013 aa, unidentified
  REGION 1..1013: note = Cas Enzyme sequence
PVADIQAMYAAGGFQKSPYQLRAEALDRPLTKEEAVRVLIHLAQRRGYKSNSTAEAAKDEKETGKVKTAIEENRRCMAEHGYRTVGEMMYRDERFWQKHPDGTRYHQTRNKAEDYRFTVERAAIVDEVRQIFAAQRRLGTAWMDEDMETAYLSILESQRSFDEGPGGDSPFFGGIGERVGACTFEPDEKRAAKATYTFEYFKLLQDLSRMRLTGMGMPPEPLDAAQREVLKSAALRSASLSYGQIRKKLNLDDDVFFHGLYYGEKTKEEAEKRKWPQMQSYHKMRTALDKVGKGAIGTLTEEQLNAVATILTECKSDAKRIAALREAGIPPQFDEALLPLSFSKYGSLSVQAMQKLIPLLEEGLRYDEACTRVYGDHRGLHPEQRKNRLSLTDMDEITNPVVRRAVSQTIKVINAVVRTYGPPDVVRIELAREMSRTFDERRKMEKRQDDNRAANERAKDQIAEYKGDHATGLDIVKFKLYREQDGVCLYSGQNLDIARLFEPGYADVDHIIPYSRCFDDSYQNKVLVLASENRQKGNRLPYEYFGQDEARWHGYEVRVENLIHNYRKRQKLLKRRLTEEESSGFIDRNLKDTQYITRAVYNLIRDHLAFAESNYRKKPVQAVNGAVTAMLRGRWGVQKIREDGDLHHCLDAAVIAATTPGLVQRLTAYNKHRETWERSPAGYVDPATGEMIELPQEARRDPFPKPWERFRQELEARLDPIDPRHQIDLLKLETYESDEEIKPVFVSRMPNHKVTGAAHAETIRSSKGGDGFTVTKTPLTNLKLNKFGEIEGYYNPASDTLLYDALLARLKDFGGDGAKAFAQPFYKPKKDGSPGPRVDKVKICEKATVGLPVRDGIAANGSMVRIDVFYVEGDGYYFVPIYVADTKKESLPNKAAVAMKPYNLWKKMKDENFVFSLYPGDLVRIQSRKGIKLNLAKGGTGEKEIVRQEGMYYYRSAGIAVAQISVETHDRRYLQPSLGIKTLQSIEKYQVDVLGNYYKVDLPEKRMTFSKEG

SEQ ID NO: 17957 - protein, 1100 aa, unidentified
  REGION 1..1100: note = Cas Enzyme sequence
MSEFHYALGLDIGIGSVGWAVLRNQPNGEPDRIQDLGVRIFDKAEQPKTGASLAAPRRDARSARRRLRRHRHRLERIRYLMEQRGIMPVADIQAMYAAGGFPKSPYQLRAEALDRPLTKEEAVRVLIHLAQRRGYKSNSTAEAAKDEKETGKVKTAIEENRRCMAEYGYRTVGEMMYRDERFWQKHPDGTHYHQTRNKAEDYRFTVERAAIVDEVRQIFAAQRRLGTVWMDEGMETAYLSILESQRSFDEGPGGDSPFSGGIGERVGACTFEPDEKRAAKATYTFEYFKLLQDLSRMRLTGMGMPPEPLDAAQREALKSAALRSASLSYGQIRKKLNLDDDVFFHGLYYGEKTKEEAEKRKWPQMQSYHKMRTALDKVGKGAIGTLTEEQLNAVATILTECKSDAKRIAALREAGIPPQFDEALLPLSFSKYGSLSVQAMQKLIPLLEEGLRYDEACTRVYGDHRGLHPEQRKNRLSLTDMDEITNPVVRRAVSQTIKVINAVVRTYGPPDVVRIELAREMSRTFDERRKMEKRQDDNRAANERAKDQIAEYKGDHATGLDIVKFKLYQEQDGVCLYSGQNLDIARLFEPGYADVDHIIPYSRCFDDSYQNKVLVLASENRQKGNRLPYEYFGQDEARWHGYEVRVENLIHNYRKRQKLLKRRLTEEESSGFIDRNLKDTQYITRAVYNLIRDHLAFAESNYRKKPVQAVNGAVTAMLRGRWGVQKIREDGDLHHCLDAAVIAATTPGLVQRLTAYNKHRETWERSPAGYVDPATGEMLELPQEARRDPFPKPWERFRQELEARLDPIDPRHQIDLLKLETYESDEEIKPVFVSRMPNHKVTGAAHAETIRSSKGGYGFTVTKTPLTNLKLNKFGEIEGYYNPASDTLLYDALLARLKDFGGDGAKAFAQPFYKPKKDGSPGPRVDKVKICEKATVGLPVRDGIAANGSMVRIDVFYVEGDGYYFVPIYVADTKKESLPNKAAVAMKPYNLWKKMKDENFVFSLYPGDLVRIQSRKGIKLNLAKGGTGEKEIVRQEGMYYYRSAGIAVAQISVETHDRRYLQPSLGIKTLQSIEKYQVDVLGNYYKVDLPEKRMTFSKEG

SEQ ID NO: 17958 - protein, 1097 aa, unidentified
  REGION 1..1097: note = Cas Enzyme sequence
MDMESKHYTLGLDIGIASIGWAVLGNDVDGTPERIIDLGVRIFESAEIQKTGESLAAPRRNARSARRRLRRHRHRLERIRYLLVQQGVLTQEEMTHLYDKCSMLSPYQLRTEGLDRILNAQEFSRVLIHLGQRRGYLSNSTAEEAKNEKENGVIKSAILENQQRMEHGGYRTIGEMMYRDAAFWETINGIRYHCTRNKAGNYHFTVDRASILSEVHILFEAQRRLGSPWASQETEDTYAAILSSQRSFDEGPGGDSPFRKGISERVGNCTLIPTELRAAKADETFEYFKLLQDLNHMRLVDNNGSHPLTQQQRDLLEAAAFRTANLTYGQLRKKLGISDEVRFAGLYYGQDSIEKAEKRKWAQMQSYHKIRTALDKVSKDAISMLTQDQLDAIGEIVTAYKADAARIEHLQAAGIPKEYHNALLSLSFSKYGKLSCCAMRKLIPFLRQGMRYDEACKAAGMNFHGANGNVEKLSDFLDEITNPVVRRAVSQTIKVVNAVVRTYGNPDAVRIELAREMSHSFDERNKIKKRQEDGRRKNEQIKAQILETKAGNRVTGLDIVKFKLFQEQDGVCPYSGKALDVQRLYEPGYADVDHIIPYSRCFDDSYSNKVLVLASENRQKGNCTPYEYFGADERRWYEFSVRVGASVRDFKKRQKLLNTSFGEEQGKEFIQRNLNDTQHITRVVYNYLRNNLSFADSTYANAPVQAVSGTVTAMLRGRWGIEKMRGDGDLHHCKDAVVIAATSPSMIQRLSNYYKEEERLFMGKTHFVDPETGEVLTRKAFQQRFTPKFPQPWDRFREELEARLDPVNPMDAVMALHLSTYEPDEDITPVFVSHMPKHTVTGAAHEETIRGKTETGTVAKTALTALKLDKHGEIEGYYNPQTDPRLYQALVERLKQFGGDGAKAFVEPFYKPKKDGTPGPRVDKVKIAKKASLSVSTGRGVADNGNMVRIDVFHVPDDGYYFVPIYVADTKKAALPSKAVVAGKSPEAWKQMKPEHFLFSLFKGDLIQVEGRRGISLSLAEKAIGEKTIQVKSGLFYFCGADISTGSISMETHDRRYTKRGLGIKTLTLIEKYQVDVLGNVNKVNLPEKRLEFRGRK

SEQ ID NO: 17959 - protein, 1100 aa, unidentified
  REGION 1..1100: note = Cas Enzyme sequence
MSEFHYALGLDIGIGSVGWAVLRNQPNGEPDRIQDLGVRIFDKAEQPKTGASLAAPRRDARSARRRLRRHRHRLERIRYLMEQRGMMSVSDIQAMYAAGGFQKSPYQLRAEALDRPLSKEEAVRVLIHLAQRRGYKSNSTAEAAKDEKETGKVKTAIEENRRCMAEHDYRTVGEMMYRDERFWQSNPDGTRYQQTRNKTDDYRFTVERSAIVDEAKQIFAAQRKLGADWSSEDLEAAYLSILEGQRSFDEGPGGESPFRGGIGDKVGFCTFEPDQQRAAKATYTFEYFKLLQDLNHMRLAGRGMSPQPLNAQQREILKETALRSASLSYGQLRKKLALADDTFFSGLYYGDKSREEAEKRKWPQMQSYHKIRTALDKVGKGTISSLTEEQLNAIASILTQYKSDAKRIEALRMAGIPVQFDEALLPLSFSKYGSLSVQAMQKLIPLLEQGMRYDEACTQIYGDHRGLHSEQRKNRLSLTDMDEITNPVVRRAVSQTIKVINAIVRTYGPPDVVRIELAREMSRNFDERRKAEKRQDENRAANERAKEQIAEYKGDHATGLDIVKFKLYQEQDGVCLYSGKNLDPSRLFEPGYADVDHIVPYSRCFDDSYQNKVLVLASENRQKGNRLPYEYFGYDEVRWHEYEVRVENLIRNYRKRQKLLKRQLSEEESAEFIGRNLKDTQYITRTVYNLIRDHLAFAESAYRKKPVQAVNGAVTSMLRNRWGVQKIREDGDLHHCLDAAVIAATTPGLVQRLTAYSKHRETWERPPAGYVDPATGELIELPQEARRDPFPKPWERFRQELEARLDPIDPRHQIDLLKLETYESDEEIKPVFVSRMPNHKVTGAAHAETIRSSKGGDGFTVTKTPLTNLKLNKFGEIEGYYNPASDTLLYDALLARLKDFGGDGAKAFAQPFYKPKKDGTPGPRVDKVKICEKATVGLPVRDGIAANGSMVRIDVFYVEDDGYYFVPIYVADTKKESLPNKAVVAYKAYSEWKEMKDENFIFSLYPGDLVCIQSRKGIKLNLAKGGTGEKEIVRQEGMYYYRAAGITVGAIQIETHDRRYLQPSLGIKTLQSIEKYQVDVLGNYQKVDLPEKRMTFSKEG

SEQ ID NO: 17960 - protein, 1100 aa, unidentified
  REGION 1..1100: note = Cas Enzyme sequence
MSEFHYALGLDIGIGSVGWAVLRNQPNGEPDRIQDLGVRIFDKAEQPKTGASLAAPRRDARSARRRLRRHRHRLERIRYLMEQRGMMSVSDIQAMYAAGGFQKSPYQLRAEALDRPLSKEEAVRVLIHLAQRRGYKSNSTAEAAKDEKETGKVKTAIEENRRCMAEHGYRTVGEMMYRDERFWQSNPDGTRYQQTRNKTDDYRFTVERSAIVDEAKQIFAAQRKLGADWSSEDLEAAYLSILEGQRSFDEGPGGESPFRGGIGDKVGFCTFEPDEKRAAKATYTFEYFKLLQDLNRMRLTGMGMPPEPLDDEQREVLKSAALRSASLSYGQIRKKLNLDDDVFFNDLYYGEKTKEEAEKRKWPQMQSYHKMRTALDKVGKDTIGTLTEEQLNAIATILTECKSDAKRIAALRMAGIPVQFDEALLPLSFSKYGSLSVQAMQKLIPLLEQGMRYDEACTQIYGDHRGLHSEQRKNRLSLTDMDEITNPVVRRAVSQTIKVINAIVRTYGPPDVVRIELAREMSRNFDERRKAEKRQDENRAANERAKEQIAEYKGDHATGLDIVKFKLYQEQDGVCLYSGKNLDPSRLFEPGYADVDHIVPYSRCFDDSYQNKVLVLASENRQKGNRLPYEYFGYDEVRWHEYEVRVENLIRNYRKRQKLLKRQLSEEESAGFIDRNLKDTQYITRSIYNLIRNNLVFAESNYKKRPVQTVNGAVTSMLRNRWGVQKIREDGDLHHCLDAAVIAATTPGLVQRLTEHSKRRETLEKAPAGYVDPATGELLELPQEARRDLFPKPWERFRQELEARLDPIDPRHQIDLLKLETYESDEEIKPVFVSRMPNHKVTGAAHAETIRSSKGGDGFTVTKTPLTNLKLNKFGEIEGYYNPASDTLLYDALLARLKDFGGDGAKAFAQPFYKPKKDGMPGPRVDKVKICEKATVGLPVRNGIAANGSMIRIDVFYVEDDGYYFVPIYVADTKREKLPNKAAVAMKPYNLWKEMKDENFVFSLYPGDLVRIQSRKGIKLNLAKGGTGEKEIVRQDGMYYYRSAGIAVAQIFVETHDRRYLQPSLGIKTLQSIEKYQVDVLGNYQKVDLPEKRMTFSKEG

SEQ ID NO: 17961 - protein, 1100 aa, unidentified
  REGION 1..1100: note = Cas Enzyme sequence
MSEFHYALGLDIGIGSVGWAVLRNQPNGEPDRIQDLGVRIFDKAEQPKTGASLAAPRRDARSARRRLRRHRHRLERIRYLVEQRGMMSVSDIQAMYAAGGFQKSPYQLRAEALDRPLSKEEAVRVLIHLAQRRGYKSNSTAEAAKDEKETGKVKTAIEENRRCMAEHGYRTVGEMMYRDERFWQSNPDGTRYQQTRNKTDDYRFTVERSAIVDEAKQIFAAQRKLGADWSSEDLEAAYLSILEGQRSFDEGPGGESPFRGGIGDKVSFCTFEPDQQRAAKATYTFEYFKLLQDLNHMRLAGRGMSPQPLNAQQREILKETALRSASLSYGQLRKKLALADDTFFSGLYYGDKSREEAEKRKWPQMQSYHKIRTALDKVGKGTISSLTEEQLNAIASILTQYKSDAKRIEALRLAGIPMQFDEALLPLSFSKYGSLSVQAMQKLIPLLEQGMRYDEACTQIYGDHRGLHSEQRKNRLSLTDMDEITNPVVRRAVSQTIKVINAIVRTYGPPDVVRIELAREMSRNFDERRKAEKRQDENRAANERAKEQIAEYKGDHATGLDIVKFKLYQEQDGVCLYSGKNLDPSRLFEPGYADVDHIVPYSRCFDDSYQNKVLVLASENRQKGNRLPYEYFGQDEARWHGYEVRVENLIRNYRKRQKLLKRQLSEEESAGFIDRNLKDTQYITRSIYNLIRNNLVFAESNYKKRPVQTVNGAVTSMLRNRWGVQKIREDGDLHHCLDAAVIAATTPGLVQRLTEHSKRRETLEKAPAGYVDPATGELLELPQEARRDLFPKPWERFRQELEARLDPIDPRHQIDLLKLSTYESDEEIKPVFVSRMPNHKVTGAAHAETIRSSKGGDGFTVTKTPLTNLKLNKFGEIEGYYNPASDTLLYDALLARLKDFGGDGAKAFAQPFYKPKKDGTPGPRVDKVKICEKATIGLPVRNGIAANGSMIRIDVFYVEDDGYYFVPIYVVDTKKENLPNKAVVAYKAYSDWKEMRDEDFVFSLYPGDLVCIQSRKGIKLNLAKGGTGEKEIVRQKGMYYYRAAGITVGAIQIETHDRRYLQPSLGIKTLQSIEKYQVDVLGNYHKVDLPEKRMTFSKEG

SEQ ID NO: 17962 - protein, 1101 aa, unidentified
  REGION 1..1101: note = Cas Enzyme sequence
MSEFHYALGLDIGIGSVGWAVLRNQPNGEPDRIQDLGVRIFDKAEQPKTGASLAAPRRDARSARRRLRRHRHRLERIRYLMEQRGMMSVSDIQAMYAAGGFQKSPYQLRAEALDRPLSKEEAVRVLIHLAQRRGYKSNSTAEAAKDEKETGKVKTAIEENRRCMAEHGYRTVGEMMYRDERFWQSNPDGTRYQQTRNKTDDYRFTVERSAIVDEAKQIFAAQRKLDADWSSEDLEAAYLSILEGQRSFDEGPGGESPFRGGIGDKVGFCTFEPDQQRAAKATYTFEYFKLLQDLNRMRLTGMGMPPEPLDDEQREVLKSAALRSASLSYGQIRKKLNLDDDVFFNDLYYGEKTKEEAEKRKWPQMQSYHKMRTALDKVGKDTIGTLTEEQLNAIATILTECKSDAKRIAALRMAGIPVQFDEALLPLSFSKYGSLSVQAMQKLIPLLEQGMRYDEACTQIYGDHRGLHSEQRKNRLSLTDMDEITNPVVRRAVSQTIKVINAIVRTYGPPDVVRIELAREMSRNFDERRKAEKRQDENRAANERAKEQIAEYKGDHATGLDIVKFKLYQEQDGVCLYSGKNLDPSRLFEPGYADVDHIVPYSRCFDDSYQNKVLVLASENRQKGNRLPYEYFGYDEVRWHEYEVRVENLIRNYRKRQKLLKRQLSEEESAGFIDRNLKDTQYITRSIYNLIRNNLVFAESNYKKRPVQTVNGAVTSMLRNRWGVQKIREDGDLHHCLDAAVIAATTPGLVQRLTEHSKRRETLEKAPAGYVDPATGELLELPQEARRDLFPKPWERFRQELEARLDPIDPRHQIDLLKLSTYESDEEIKPVFASRMPNHKVTGAAHAETIRSSKGGDGFTVTKTPLTNLKLNKFGEIEGYYNPASDTLLYNALLSRLKDFGGDGAKAFAQPFYKPKKDGTPGPRVDKVKICEKATIGLPVRNGIAANGSMIRIDVFYVEDDGYYFVPIYVADTKREKLPNKAAVAMKPYNLWKEMKDENFVFSLYPGDLVRIQSRKGIKLNLAKGGGTGEKEIVRQDGMYYYRSAGIAVAQIFVETHDRRYLQPSLGIKTLQSIEKYQVDVLGNYQKVDLPEKRMTFSKEG

SEQ ID NO: 17963 - protein, 1100 aa, unidentified
  REGION 1..1100: note = Cas Enzyme sequence
MSEFHYALGLDIGIGSVGWAVLRNQPNGEPDRIQDLGVRIFDKAEQPKTGASLAAPRRDARSARRRLRRHRHRLERIRYLMEQRGMMSVSDIQAMYAAGGFQKSPYQLRAEALDRPLSKEEAVQVLIHLAQRRGYKSNSTAEAAKDEKETGKVKTAIEENRRCMAEHGYRTVGEMMYRDERFWQSNPDGTRYQQTRNKTDDYRFTVERSAIVDEAKQIFAAQRKLGADWSSEDLEAAYLSILEGQRSFDEGPGGESPFRGGIGDKVGFCTFEPDQQRAAKATYTFEYFKLLQDLNRMRLTGMGMPPEPLDDEQREVLKSAALRSASLSYGQIRKKLNLDDDVFFNDLYYGEKTKEEAEKRKWPQMQSYHKMRTALDKVGKDTIGTLTEEQLNAIATILTECKSDAKRIAALRMAGIPVQFDEALLPLSFSKYGSLSVQAMQKLIPLLEQGMRYDEACTQIYGDHRGLHSEQRKNRLSLTDMDEITNPVVRRAVSQTIKVINAIVRTYGPPDVVRIELAREMSRNFDERRKAEKRQDENRAANERAKEQIAEYKGDHATGLDIVKFKLYQEQDGVCLYSGKNLDPSRLFEPGYADVDHIVPYSRCFDDSYQNKVLVLASENRQKGNLLPYEYFGYDEVRWHEYEVRVENLIRNYRKRQKLLKRQLSEEESAGFIDRNLKDTQYITRSIYNLIRNNLVFAESNYKKRPVQTVNGAVTSMLRNRWGVQKIREDGDLHHCLDAAVIAATTPGLVQRLTEHSKRRETLEKAPASYVDPATGELLELPQEARRDLFPKPWERFRQELEARLNPIDPRHQIDLLKLSTYESDEEIKPVFVSRMPNHKVTGAAHAETIRSRKGGDGFTVTKTPLTNLKLNKFGEIEGYYNPASDTLLYNALLSRLKDFGGDGAKAFAKPFYKPKKDGTPGPRVDKVKICEKATIGLPVRNGIAANGSMIRIDVFYVEDDGYYFVPIYVADTKKERLPNKAVVAYKAYSEWKEMKDENFIFSLYPGDLVRIQSRKGIKLTLTKGGTGEPEIVRQQGMYYYQTANISSGAVTISTHDRRYSQSSLGIKTLQSIEKYQVDVLGNYYKVDLPEKRMTFSKEG

SEQ ID NO: 17964 - protein, 1223 aa, unidentified
  REGION 1..1223: note = Cas Enzyme sequence
MKKKILGLDTGTNSLGWAVVERDENNEYSLIDKGVVIFQEGVKIEKGIESSKASERTGHRANRKHYFRRRLRKIETLKVLVKYKLCPSLTDEQLALWHKKKIYPLDENFMQWQRTNENEEKNPYYYRHICLHEKLDLSKQTDRFILGRALYLLVQRRGFMSNRLDTTSEDETGKVKQSISDLNKEMEEAGFEFLGDFFYHLYSTEGNKVRLRSRYTDREEHYFREFNEICRVQGLDEEMIDNLRKALYFQRPLKSQRAGVGKCTFEPKKPRCAASHPDFEEFRMLSLMNAIKIQTPKDDVMRPLNEEERAEIEPLFYRVSAVNFDFEDIAKKIAGKNNYMYFKDAGDKPYKFNYKMTQGASGSTTIAQLRAIFGEDWKQGIAETYTKMECKNGSKSIDDAVNDIWNALYSFESVDKLKQFAKENLQLDDQLAEKFSKIRLTNGFASLSLKAIRKILPFLRVGMIYSEAVFFANIPTIISEELWERDKDDILANIYDSIHNSDATKPDMHVTIESIIKDHLQNNYDLKPGAADMLYHPSMIETYPDAQKVNGVYQLGSPRTNAIRNPMAMRSLHQVRKLVNALLREKIIDNTTEVHIEYSRDLNDANKRNAIAKYNKEQETKHKEYRNRIKELYKAETGKDIEPTELEIKKFQLWEEQEHRCLYTGRQIGIASFIGANPEFDIEHTIPRSVGGDSTMENLTLCENKFNREIKKAQIPTQLANHAEIMARFEGWKKQIEDLDKQLNARNLRTNSGMEKGMKDFRIQKKHLLRMKKEYLLGKYKRFTMTEVPEGFARRQGAGIGLVSKYAGLYLKSLFHKSADRAKSNVYVVKGPTTAEFRKIWGLQAEYEKKERVNHVHHCIDAITIACIGKAEYDELAWYYHDYEDYETARCNKPTFKKPWPMFTEDVKNIEKELLIVHSTPNNFGKKAKKVIKTANGKVIAKGDSVRGSLHMDTYYGAIERDGEIRYVVRKPLDATFFDSPKKLDLIVDDAVREIVKEAVAGKNFKEAISAPIYMNKEKGILIKKVRCYMNSVKNPLHIRKHRDISVKEYKQQCHVVNDSNYMMAIYEGEVKGKEKREYELVSMLDAAKYYKRSADREEIPILVPERSTNGYKLKWRLYVGSMVILYEKTPNEIDFNDMKDVSKRLYKVVGLAFHSNKRYSVIKLRFHEEARAASDVKYKDGAYKNGEPFRPAPRMLNTQFNALVEGIDFSIDELGKIKLLHR

SEQ ID NO: 17965 - protein, 1071 aa, unidentified
  REGION 1..1071: note = Cas Enzyme sequence
MNLHKNTILGLDIGIGSIGWAMVKQNENGNFTPLTFTDAQGNNLTALGVRAFDVPENPKDKKLKNVNRREKRRQRVTLKRKRKRMAAVRHLLVEYDLLADAKDLTIHGRSVTNESPACPWKLRKEGLSRRLTDLELAIILIHMAKHRGFQSNSKADGVAKKNSDAGKMLTAISQLQTAMQDSGAETAGAYMATLPSQRNRQQSDGVEHYTNTMLRDLLREEAALLCNRQQQFGQSKFSNALLTSYLEIAFQQKPLQSVEHLIGYCTFEPNEKRAPKLSYTSEKFRLAQRLTILRLVYPNGSSKSIAPEKTREISGTIGTKKSFTYKALRKALSLPENVQFEGLPYGSTDTKGKIVDAEKHDIVMRTKGCAEGSSVFYSLFGKAGYGSFTEKRTAEGVRIIDEVARIVSVNDDIDVIQQAIEVLPLTPNEQRILLDAVREGTFAKFSGTVNLSIKAMENILPHMIEARDYAAGCELAGYDHAKAQPVDINAVHNPVVRKVMKEVRKQVQAIMRETGIIPEKVHVELLRDMGKSAAERTSIDIGINRRTKEKKSNRVEFAEQLGRSPETITATELIRYELWKEQGGKCAYWMLRKNAESITGGHIRITDLQDSSTALQIDHILPRSRTFDNSFHNLCLCTADANQAKKNRTPWEWIGCRNEKAWHKYETWIKSLRIKGLKKRNYLLKNLSEDVAGRFHARNLSDSRYATKLVLAWLEEEYERLGVDCHDQLGKEIKRFRARPGQLTAILRKAWGVNGLKYDSDNNRIGDRHHALDALVVACATESTLQKMTSLYKQMENNAARYRLVPNAEKPWGGFVKDTRKLLNDVFVSRAERGSTKGALHKDTLRQIRTEEDGYGNEIKRVYERKAIADLTEKDLCNIKDADRNSRLITILRDWISNGKPLDTPPLSPKGDPISKIRICTGRFSSGICVKRGQGIAQADNGSIVRTDVYTQNGKFYLVPVYTHHVAKGIVPNRAAKALKDEKYWDVVDESYDFCFSLQPNCYVVTEDKKGKVVEGYYGGMNRRTCTITLNKPFDKSTPPLTPGTKTLKSLTKYRVDRFGRLHKVHTEPRP

SEQ ID NO: 17966 - protein, 1087 aa, unidentified
  REGION 1..1087: note = Cas Enzyme sequence
MMKYRLGIDLGTNSLGWAAVRLMEEQHDRLSPGPLLDMGVRIFSDARNPKDKSSNAAQRRGPRGARRNLDRKSGRKRHMLHALVRAGLMPTDEPSQKELEKLDPWILRYRALNEKLTPHEIGRALFHLQQRRGFKSNRKTDGDEAGAMYNAIHQARARMKEHDARTLGELFGRPRHEQKQANEDAPHRGGKPMPQARVKARVEKSKMVYDYYPDRAMILDEFEQIWEAQTPYHPDILTGEAHDSIRHVIEYQRPLKPQKAGRCTFLPEQERAPKALPSAQYARILQEVNNLKVGATGEVSRPLDREQCQTVIDFLIRPSSKTAKRTFKLIRKKLKLPESQRFSHESPKRDHLKGDLTAAGLMQKEAWGPDWFDLGRATQDDIVMKLLDTEQEQDIVDWLVGEYGMDEPRAQHISRLNLPDAHGKLSRAALDRIIPRLEAGERYDEAARQEFRDHRAMGDGEIHEKLPYYGEILNRHTAFEKDDPQNDEEQYGRVANPTVHVALNELRKVINDLIRRWGPPEQVVLELARDLPLSDRGMRELEREQVKNQEANDKRNTWLEEQKLPTNYEHRLKLRLYEEAEEAFGGIAQCVFTGKTISKTALFSADIEIEHILPVSRTLDDSFANKVLCIRDANRVKKNQTPYEAFGHSPPGYDWENIGLRAAELPGSKGWRFAPDAMEQWESRGDFLDRQLTDTRSIATLGKKFVEGLYGGQGSAGQTRQVWVIPGQLTSDIRHFAGFNTLTGLTGSNSKDRTDHRHHAVDALVIALTDQAMVKRAAGLAKREDAAAHHDIMRKMADPLKRYRRSAEDRLSKLTVSHKPDHGFQDAMHNDTAYGLTGETDEKGNALLVTRKPLDSLSKPADLDKIRDEHLRRFLMLKLISPALGSADLDKIPDERLRKEFARATMGLTGKDFTQALIQAGRHMSPPVYSVRVLDPMKPASFVRVEHGDGHSKAYMGSSNYCYDIFMGEKGKWSGEVITTFQAYQMARDNPDWWHNLGGRDGHPLIMRIRKGDMLELETDPGKPIRVVVYKFSTGKIFMHEHFEANASARIAEKELLGYQMAPSSLQRAKAVRLTVSPSGKVTRHRL

SEQ ID NO: 17967 - protein, 1442 aa, unidentified
  REGION 1..1442: note = Cas Enzyme sequence
MKNILGLDLGTNSVGWAYVKQAQNDSEKSEIVELGVRVNPLTVDEKTNFEKGKPISTNADRTLKRGARRNLQRYKLRRQELIELLKEYQVISDKTILAEDGKGTTFETLRLRAKSAKERVSLEELARILLMINKKRGYKSSRKAKSEDEGQLIDGMEIARRLYDENLTTGQLSLQLLKEGKKSLPDYYRSDLQHELDKVWNFQKQFHPDILTDEFYTSIQGKGQKATRESFSSKYRIDTAENKGSREEKRLQAYQWRADATHKELTKEELAFVITEINNNINNSSGYLGAISDRSKELIFANETVGEYLWKQIQSDPHTSLKNQVFYRQDYFDEFERIWETQSEFYPQILTESLKNELRDILIFYQRKLKSQKALVSICEFESKEIPLKDKQGNPISKNRIPVTKLVGPKVAPKSSPLFQEFKIWQNLNNVLVRPKGSRKRKVTTDKQSTLLEGQEPVFELNLEQKELLFEELNLKGNLKTDYCLELIGYSAKEWEMNYPTLEGNKTNKSLYEAYLKIIDSEGYDVKKLLKAKTDKDDINLDDIEVSASEIKTMISDIFNELGINTKTLDFDAELERKQFEAQASYGLWHLLYSYEGDDSKSGNELLYRLLVDKFGFKREHSKTLANVSLLSDYGNLSTKAIRKIYPYIKENKFSTACELAGYRHSKLSITKEENENRTLKDTLDVLKKNSLRQPVVEKILNQMINLINELIEKHSEKDEKGNIVKYFKFDEIHIELARELKKNAEERRELDSKVREGKARNEKIIAILKSEFGLPYPTKNDIIRYRLYEELKDNGYKDLYTNTYIPREKLFSKEIDIEHIIPKSRLFNDSFSNKTICYRQDNLNKGERTAYDYIEGLGKTQLDEYLNRVENLYVNKIITKAKYRNLLKKESEIGDGFIERDLRETQYIAKKAKEMLLQITRHVVSTTGSITDRLRDDWELVNVMRELNLPKYKALGLTEIQERKNGQTVEVITDWTKRNDHRHHAMDALTVAFTKHSHIQYLNFLNARKDEKHKEYSNIMGIQQLETEKTTDKDGKDKRIFKAPIPNFRQVAKEHLESILISHKTKNKVVTRVTNKIAGSKKQQETLSPRGQLHKETVYGKYRRYVQKEEKIGSKFDLQTIERVASPLYKRLLTKRLEENGGDPKKAFTGKNALAKSPIYLDEAQTQQLPEKVKLVWLETYFSIRKDITPDNFKDEKSIDKVLDEGIKRILKDRLKSFDGDAKRAFTDLEQNPIWLNKEKGIAIKRVTISGVSNAEPLHTKKDHLGNEIFDETGKPIPVDYVSTGNNHHIAIYRDENGDLHDEAVSFFEAVTRANQGLPIVDKTYNRHLGWQFLFTMKQNEMFVFPNKETGFDPQEIDLLDPKNKKLISPNLFRVQTISVVKYGNNVVRDFKFRHHLETTVEDKKELQQITYQQIKSLSPLNNIVKVRINHLGDIVHIGEY

SEQ ID NO: 17968 - protein, 954 aa, unidentified
  REGION 1..954: note = Cas Enzyme sequence
METKVTLSIDFGSKNIGLALVRNQEGVNIPLFAGTLLYDPYQLSTKVGPRAELRRGRRTRKTKRHRLTLLKKKLLAINLPNETIQQLITFCRRRGYSSLFDEPQKIDQEAKDSKEEIVFRFSREEFFRALEKQIELLVPQEKSGKVLASCEDVLNRAGDPSKEVRPLRFNNRGASRCAWDGCGNVPPRRDNALRDPLSQFVHTVFAVSLRGDATLQDEVARMLDRIAVLGKRLRHRKGPDPDKERKALKAEISDGLKLLKKLYGLNPDLIEEAATPWAKIRKNITNLIEQTGGRNRFCRYHSSQYVTHFMEGKPIPFKATLTERDLVSRREEILFQKMWRYIEARILPLVPDGIDRVIVERTAIDLLGGSRKQRQGIMNKEALEEMYQHGPRYGFGNDLEMLRAEFDGLCAYCGRPNAELVERDHLLPQSKFFFDSYLNIVPACPSCNRDLKQAASPGGASLRINEQAYDAYSKYVASKFANKPPHLFHNIKKGILNLMREPGRVWEGERILNIIANQFAQVVGTQRGPRPLARYLSGKIYKRFGEKPQIGFINGRHTALWRKAAYPEFDKFREKKEGGVINHALDALLMACHLPDLTSLETRNLQPGLMHWWVDKVRKAAPPKGPDGIPGIPEPRFAVAGFEKVHPGNYVEVDLAKMNWNHKDSHIQRQGDYGWSKRDDLPVQRVTAASIAEELRKTDKAATPESRRTEVEKIVNVIVHPRLYQTLERASIGDSPGASTAEALKIWLRKAIKGNLYKSQFSSHPADQRRAKMFQDFINGQTDVIPAVIGVQRLQRSLKSNIDLNRVDPKSGRLVHRYVADPANVAYIVAYRGSNGNVKRDRPLTLEWRQSGALIPGVKLFGDVPEGPLRGRALGEKAIDQKEWKNALHQYLTRAGIAEYNFVSQGNVVVYEDGSELYIRNFSGSYGFRKSWFKGIKAVRPSPLTERLIPNAKI

SEQ ID NO: 17969 - protein, 954 aa, unidentified
  REGION 1..954: note = Cas Enzyme sequence
MQSRVTLSVDFGYKNIGLALVRNQEGINTPLFAGTILYDPYQLSTKVGPRAALRRGRRTRKTKRRRLTLLKRKLFAINLPEETVQQLITFCRRRGYSSLFDEPQKLGQEAKDSKEEIVFRFSREEFFEALEKQIDKLVPDEKRGLTLSICENILNRAGDPSREIRPLRIENRGASRCAWDGCENVTPRRDNALGDPLSQFVHTVFATTLRGDETLQQGVSQMLDRIAVLGKRLRHRGGPNPDKERKTLKAKISDELKLLKKLYGLNPDLTEETATPWTKIRQNITNLIEQTGGRNRFCRYHSSQYVTHFLEGKPIPFKATLTERDLVSRREEILFQKLWRYIEARVLPLAPDGIDRVIIERTAFDLLGGSRKQRQGIINKEALEEMYQHGPRYGFGNDLEMLRAEFDGLCVYCGKPNTELLERDHLLPQSKFFFDSYLNKVPACPPCNRNLKQAASPGGASLRIHEEAYDAYSKYVASKFRVKPPHLFHTIKKGILNLMREPGRVWEAERYLNLIANQFAQVVGTQRGPRPLARYLSGKIYQKFGEKPKIGFVNGRHTFLWRKAAYPEFDKYREKKEGGVINHALDALLMACDLPDLTTLEAKNLHPGLMHWWVDKVRKAAPPEGADGIPVIPEPRFAIDGFEKVHPGNYVEADLAKMNWNHRDSQVQRQGAYGWSKQRDIPTQRVTAASIADELRKADKKTSPESRKAEVDKIVDGIVHPQLRKILKGANPGDTPGVTTAGALNIWLRKAIKGNLNKSQFSPHPADQSKAKMLQNFITAESDVIPSIIGVQILYPWLKSNMDLNRVAPKNGRLVHRYVADPANVAYIVAYRKSNGVVKREKPLTLEWRQSRAVIPGVKLFGDIPEGPLKGRPFGEKAIDHKEWKNALHRYLSNAGIAEYNFVSQGNVVVYEDGKEYYIRNFSGSYGFRKSLFKRIKAVRPSPLTQRLIPNAIV

SEQ ID NO: 17970 - protein, 954 aa, unidentified
  REGION 1..954: note = Cas Enzyme sequence
MQSRVTLSVDFGYKNIGLALVRNQEGINTPLFAGTILYDPYQLSTKVGPRAALRRGRRTRKTKRRRLTLLKRKLFAINLPEETIQQLITFCRRRGYSSLFDEPQKLGQEAKDSKEEIVFRFSREEFFEALEKQIDKLVPDEKRGLTLSICENILNRAGDPSREIRQIRINNRGASRCAWDGCENVTPRRDNALGDPLSQFVHTVFATTLRGDETLQQGVSQMLDRIAVLGKRLRHRGGPNPDKERKTLKAKISDELKLLKKLYGLNPDLTEETATPWTKIRQNITNLIEQTGGRNRFCRYHSSQYVTHFLEGKPIPFKATLTERDLVSRREEILFQKLWRYIEARVLPLAPDGIDRVIIERTAFDLLGGSRKQRQGIINKEALEEMYQHGPRYGFGNDLEMLRAEFDGLCVYCGKPNTELLERDHLLPQSKFFFDSYLNKVPACPPCNRNLKQAASPGGASLRIHEEAYDAYSKYVASKFRVKPPHLFHTIKKGILNLMREPGRVWEAERYLNLIANQFAQVVGTQRGPRPLARYLSGKIYQKFGEKPKIGFVNGRHTFLWRKAAYPEFDKYREKKEGGVINHALDALLMACDLPDLTTLEAKNLHPGLMHWWVDKVRKAAPPEGADGIPVIPEPRFAIDGFEKVHPGNYVEADLAKMNWNHRDSQVQRQGAYGWSKQRDIPTQRVTAASIADELRKADKKTSPESRKAEVDKIVDGIVHPQLRKILKGANTGDTPGVTTAGALNIWLRKAIKGNLNKSQFSPHPADQSKAKMLQNFITAESDVIPSIIGVQILYPWLKSNMDLNRVAPKNGRLVHRYVADPANVAYIVAYRKSNGVVKREKPLTLEWRQSGAVIPGVKLFGDIPEGPLKGRPFGEKAIDHKEWKNALHRYLSNAGIAEYNFVSQGNVVVYEDGKEYYIRNFSGSYGFRKSLFKRIKAVRPSPLTQRLIPNAIV

SEQ ID NO: 17971 - protein, 960 aa, unidentified
  REGION 1..960: note = Cas Enzyme sequence
MYNSLKDMETKVTLSIDFGSKNIGLALVRNQEGVNIPLFAGTLLYDPYQLSTKVGPRAELRRGRRTRKTKRHRLTLLKKKLLAINLPNETIQQLITFCRRRGYSSLFDEPQKIDQEAKDSKEEIVFRFSREEFFRALEKQIELLVPQEKSGKVLASCEDVLNRAGDPSKEVRPLRFNNRGASRCAWDGCENVPPRRDNALRDPLSQFVHTVFAVSLRGDATLQDEVARMLDRIAVLGKRLRHRKGPDPDKERKALKAEISDGLKLLKKLYGLNPDLTEEAATPWAKIRKNITNLIEQTGGRNRFCRYHSSQYVTHFMEGKPIPFKATLTERDLVSRREEILFQKMWRYIEARILPLVPDGIDRVIVERTAIDLLGGSRKQRQGIMNKEALEEMYQHGPRYGFGNDLEMLRAEFDGLCAYCGRPNAELVERDHLLPQSKFFFDSYLNIVPACPSCNRDLKQAASPGGASLRINEQAYDAYSKYVASKFANKPPHLFHNIKKGILNLMREPGRVWEGERILNIIANQFAQVVGTQRGPRPLARYLSGKIYKRFGEKPQIGFINGRHTALWRKAAYPEFDKFREKKEGGVINHALDALLMACHLPDLTSLETRNLQPGLMHWWVDKVRKAAPPKGPDGIPGIPEPRFAVAGFEKVHPGNYVEVDLAKMNWNHKDSHIQRQGDYGWSKRDDLPVQRVTAASIAEELRKTDKAATPESRRTEVEKIVNVIVHPRLYQTLERASIGDSPGASTAEALKIWLRKAIKGNLYKSQFSSHPADQRRAKMFQDFINGQTDVIPAVIGVQRLQRSLKSNIDLNRVDPKSGRLVHRYVADPANVAYIVAYRGSNGNVKRDRPLTLEWRQSGALIPGVKLFGDVPEGPLRGRALGEKAIDQKEWKNALHQYLTRAGIAEYNFVSQGNVVVYEDGSELYIRNFSGSYGFRKSWFKGIKAVRPSPLTERLIPNAK

SEQ ID NO: 17972 - protein, 954 aa, unidentified
  REGION 1..954: note = Cas Enzyme sequence
METKVTLSIDFGSKNIGLALVRNQEGVNIPLFAGTLLYDPYQLSTKVGPRAELRRGRRTRKTKRHRLTLLKKKLLAINLPNETIQQLITFCRRRGYSSLFDEPQKIDQEAKDSKEEIVFRFSREEFFRALEKQIELLVPQEKSGKVLASCEDVLNRAGDPSKEVRPLRFNNRGASRCAWDGCENVPPRRDNALRDPLSQFVHTVFAVSLRGDATLQDEVARMLDRIAVLGKRLRHRKGPDPDKERKALKAEISDGLKLLKKLYGLNPDLTEEAATPWAKIRKNITNLIEQTGGRNRFCRYHSSQYVTHFMEGKPIPFKATLTERDLVSRREEILFQKMWRYIEARILPLVPDGIDRVIVERTAIDLLGGSRKQRQGIMNKEALEEMYQHGPRYGFGNDLEMLRAEFDGLCAYCGRPNAELVERDHLLPQSKFFFDSYLNIVPACPSCNRDLKQAASPGGASLRINEQAYDAYSKYVASKFANKPPHLFHNIKKGILNLMREPGRVWEGERILNIIANQFAQVVGTQRGPRPLARYLSGKIYKRFGEKPQIGFINGRHTALWRKAAYPEFDKFREKKEGGVINHALDALLMACHLPDLTSLETRNLQPGLMHWWVDKVRKAAPPKGPDGIPGIPEPRFAVAGFEKVHPGNYVEVDLAKMNWNHKDSHIQRQGDYGWSKRDDLPVQRVTAASIAEELRKTDKAATPESRSTEVEKIVNVIVHPRLYQTLERASIGDSPGASTAEALKIWLRKAIKGNLYKSQFSSHPADQRRAKMFQDFINGQTDVIPAVIGVQRLQRSLKSNIDLNRVDPKSGRLVHRYVADPANVAYIVAYRGSNGNVKRDRPLTLEWRQSGALIPGVKLFGDVPEGPLRGRALGEKAIDQKEWKNALHQYLTRAGIAEYNFVSQGNVVVYEDGSELYIRNFSGSYGFRKSWFEGIKAVRPSPLTERLIPNAKI

SEQ ID NO: 17973 - protein, 954 aa, unidentified
  REGION 1..954: note = Cas Enzyme sequence
MQSRVTLSIDFGYKNIGVALVRDQDGINTPLFAGTLLYDPFQLSTKVGPRAELRRGRRTRKTKKHRLNLLKKKLFDTNLPEEVVQGLITFCRRRGYSSLFDVKEPLKTEKVDSKEEIVFRFTREEFFGALEKQIERLVPDEKRGLVLGLCENILNRAGEPSKEIRPLRINNRGASRCAWDGCENVTPRRDNALRDPLSQFIHTVFAASLRSDTALQQEVGRMLDRIAELGKRLRHRGGTNPDKERKALKTEISEELKLLKKLYGLSPDLTEEDATPWARIRRNIINLIEQTGGRNRFCRYHSSQYVTHFMEGKPIPFKATLSERDLVSRREEILFQKIWRYIEARILPLAPDGIDRVIVERIAIDLLGGSRKQRQGIMNKEALEEMYQYGPRYGFSDDLEMLKTEFGGLCVYCGRQNAELIERDHLLPQSKFFFDSYLNIVPACPPCNRNLKQAASPGEAAMRIHEEAYDAYSKYISSKFRDKPPHLFHTIKKGVLNLMREPGRIWEVERYLNLIANQFAQVAGTQRGPRPLARYLSGKIYKRFGQKPQIGFVNGRHTALWRKAAYPEFDKFRDKAEGGVINHALDALLMACDLPDLTRLEARNLQPGLMSWWVDKVRKAAPPEGQDGIPVISEPCFAVAGFEKVLPGNYIEAELAKMNWNHKDTQVQRQGAYGWSKKEDLPVQRVTAAGLADELRKADKKTSPESRRAEVDKIVNVIVHPQLHQTLKMANIGDTPGLSAAEALALWLRKTIRGNLSKARFSSHPADQSRSKMLQDFINGQSNVIPAVIGVQILYPWLKSNMDLNRVDPKSGRLVHRYIADPANVAYIVAYRRDNGKVKRDRPLTLKWRQSGAVIPGVKLFGDVPEGPLKGRSLGEKAIEQTAWKNALHQYLSKAGIAEYNFVSQGNVVVYEDGSQLYIRNFSGSYGFRKSWFKGIKAVRPSPLTQRLIPNAMV

SEQ ID NO: 17974 - protein, 1485 aa, unidentified
  REGION 1..1485: note = Cas Enzyme sequence
MAKESTKERLKKTNYSIGLDIGTNSVGWAVVDDNMNLVKRCKKHLWGSRLFDTRETAEKRRKFRGARRRLLRRRIRIAMLNKIFADFIGDENFFVRMQESFLQKGDRSLRNKDILFDEACECTITKDNGERITISSDSDFYKLYPTIYHLRMDIMAHPNWQFDPKLIYLAVHHILKNRGNFINEDMATQGEKVDLLDLLSQMLNSACDILDIDINEIDEFSECKWIYKLNTNAEQFLAILQDNALSKKEQKTKIESDFDCKKDNKEIVEIFKMLVGYKFGLSNIFPNNCEDKTDYDLSSADADEKIASANDFTEFLTNAKNLYSNIEYDRIMRGKTYISEVMIERYNRYKQQLKDLKSVFLAIYPKQNGRMHPEYRKFFRDLKTVDNYARYTYSANSCEEKNFKEFIEKVIINNKEPIINGGICLDDNQSFAQKAKKILICMGSKLVEEDKETIFTDIELTDFDRQKEAELGFLQRPRVAGNGIFPKQAHEAELNKILKNQGQTWSDFLNGETQNKIKDLFNFKIDYFVGPLGIRKDKNQQNFGWLVRKEGFENEPITPFNYDNAIDFEKTRTEFIERMTGTCSYMIGEKALPKNSMFYSYFNVLNELANISVIINNKPEKLSKLSNQSGMGYFDDVINRLLETNTYKQKDLLNLLSHYYENVSIRGLADSEKLNSNLKPIRDMARIVCGKMELSANTIMEFLCSEKAEMCENIIRDITIFGESKKSLGESLHKYDLTDKQINELCALKYTGWGNLSKKLIYGIKSQDTQHLTILELMDKERKNFMSIYSDQRYGFDSQVKQELEKCSTSIAEKIEELACSPSVKRGITQAFKVAEELVSVMGHAPQNMFIEFARGEDKSKKGKISTSRQKQLKKKYDEALKSAQDLYKQLISDNNELKSNLNNLKDADKAKDFDNEKVVLYYLQAGKCMYTGEPLYLDRLNEYEVDHIVPRSLITDNSFENKALVKKYANQEKQDSEVVPNKFKQYKLWQSLKTLKFLSNEKYMRLARTELTDRDKAGFIKRQIVETSQIVKNTAILLDSYFKNKKEETHIYSIKAGLNSEFRKQFGYPKGEGGRAINDLHHAKDAYITTIMGNYLLNKWTLDNVESLHTSGLFYNAKSAKSSQNGLLLWCLKQNADNGVEWKDDDNLTTKMVLNNFDRNYYSADCFFTKKINSKPTGEFYDQTKYKNVKNAKAWGENYKSSMVTLGKKKFGKELDPAIYGGYSSINPSIFAVLQKQTNKGFRYEFIGIPTMIICPTSTMSVKEYLQLNYPNHKIVRFIPQYAVLEEETFGKAIISGISDKYCANQLKFSRRNKELYKFTYLVFKYFDGNKKFVNYMRWLDDGTYPILSKDEKELLTIQKQKQYAESYVLDCVSRFKTEYIGHLRSKYIRKDYADVFEPYFDEMLSENADLNKMLAIIPDLLKVTQCNGARASFKDYSTQNTKLSGEYGRITVSIKDWENTYIIHNSITGIYSKKEKIIKNTKK

SEQ ID NO: 17975 - protein, 1210 aa, unidentified
  REGION 1..1210: note = Cas Enzyme sequence
MTKLNQPYGIGLDIGSNSIGFAVVDANSHLLRLKGETAIGARLFREGQSAADRRGSRTTRRRLSRTRWRLSFLRDFFAPHITKIDPDFFLRQKYSEISPKDKDRFKYEKRLFNDRTDAEFYEDYPSMYHLRLHLMTHTHKADPREIFLAIHHILKSRGHFLTPGAAKDFNTDKVDLEDIFPALTEAYAQVYPDLELTFDLAKADDFKAKLLDEQATPSDTQKALVKLLLSSDGEKEIVKKRKQVLTEFAKAITGLKTKFNLALGTEVDEADASNWQFSMGQLDDKWSNIETSMTDQGTEIFEQIQELYRARLLNGIVPAGMSLSQAKVADYGQHKEDLELFKTYLKKLNDHELAKTIRGLYDRYINGDDAKPFLREDFVKALTKEVTAHPNEVSEQLLNRMGQANFMLKQRTKANGAIPVQLQQRELDQIIANQSKYYDWLAKPNPVEKHRASKPYQLDELLTFRIPYYVGPLITPKQQAESGENVFAWMVRKNPSGNITPYNFDEKVDREASANTFIQRMKTTDTYLIDEDVLPKQSLLYQKYEVLNELNNVRINNEALSTDQKQRLIHEVFERHSSVTIKQVVDNLVAHGDFAQRPEIRGLADEKRFLSSLSTYHQLKEILHGAIDDSTKLHDIENIITWSTVFEDAAIFKTKLAEIDWLDPATIKKLSNIRYRGWGQFSRKLLDGLKLGNGHTVIQELMLSNHNLMQILADETLKETMTELNQDKLKTDDIEDVINDAYTSPSNKKALRQVLRVVEDIKHAANGQDPSWLYIETADGTGTAGKRTQSRQKQIQTVYANAAQELIDSAVRGELEDKIADKASFTDRLVLYFMQGGRDIYTGAPLNIDQLSHYDIDHILPQSLIKDDSLDNRVLVNATINREKNNVFASTLFASKMAATWRKWHEAGLISGRKLRNLMLRPDETDKFAHGFVARQLVETRQIIKLTEQIAAAQYPNTKIIAVKAGLSHQLREELDFPKNRDVNHYHHAFDAFLAARIGTYLLKRYPKLAPFFTYGEFAKVDVKKFREFNFIGALTHAKKNIIAKDTGEIVWDKERDIQELDRIYNFKRMLITHEVHFETADLFDQTIYAAKDSKERGGRMSLIPKKLGYLTGIYGGYQTERGSYVSIIRTFKKGETIYKVVNILTADVSLLSEKEKVSKTLADIYLKELIAKKLSKGKSGKNIASEPFEIVLPRVGKDSFLKTKSMVCS

SEQ ID NO: 17976 - protein, 1362 aa, unidentified
  REGION 1..1362: note = Cas Enzyme sequence
MTKLGKPYGIGVDIGSNSIGFAAVDENSHLIRLKGKTVIGARLFEEGKAAAKRRAGRTTRRRLSRNRWRLSFLRDFFESHITPTDPNFFMRQKYSEISPKDKARYKYEKRLFNDRTDAEFYQQYSTMYHLRNRLMTDPSRADVREIYFAIHHILKSRGHFLTPGDAKDFNTNDVALDEIFPALQDAYAQVYPDLGITFDEDKANEFKTILLNEIATSIDTQRALVKLLLAEEDDKDILKQQKQVLTEFAKAVVGLKTKLNLALGTEVDSSEATAWNFSLGQLDDKWAGIESAMTDEGTEILDQIRDLYRARLLNGIVPTGKTLSQAKVDDYTQHHEDLQLFKAYLKQLEDDGTAKAIRQLYDRYIDGDDAAPFLRENFVKALTKDVTAHPNTKSPELLERLAQPDFMLKQRNKANGAIPVQMQQRELDQIIKNQAVYYDWLAAPNPVEKHRKSMPYQLDELLNFRIPYYVGPLVTAKEQKAAQGGVFAWMVRKDPEGNITPYNFDEKVDREASANTFIQRMKTTDTYLIGEDVLPKQSLLYQRYEVLNELNNVRVNNEKLSIEQKQQVIRELFERHNSVTIKQFAENLRAHGDYAHIPEIRGLADEKRFLSSLSTYRQLKSLLPEAIDDPAKQADIENIIAWSTVFEDAAIFKTKLKEISWLGSEAITKLSNIRYRGWGQFSRKFLNGLTLGNGHTIIQELLLSTNNLMQILTDETLQKKMTELNADKLKTANINDAIDNAYTSPSNKKALRQVLRVVDDIKRAADGQDPSWLYVETADGGGTPGKRTRARQHQLQEIYANAAHELIDTAVRGELEDKISDKADFNDRLVLYFMQGGRDIYTGAPLNIDQLSSYDIDHILPQSLIKDNSLDNRVLVHAIINREKNATFASTIYAQKMNATWRQWHEAGLISGRKLRNLQMRPDQIDKYASGFVARQLVETRQIIKLTEQIVAAQYPDTKIIAVKAGLSHQLREELEFPKNRDVNHYHHAFDAFLAARIGTYLLKRFPNLQAFFTYGKFTKADVKKLRGFNFIRDITHAEDKIVAKDTGEVVWDKQRDVDELDRIYNFKRMLITHEVRFETADLFKQTVYGARDSKEAGGSKQLIPKKKGYPVDIYGGYFRENTAYLAVVKVTKKTETIFKVVKIATSQVAALNKARSRSTAEELSVLTELLKPKFSKVGKNGKITDTPFEVVLPRVPREQLFYNAKYGFFMVNSDTMFHNFQEIWVSRSDQKILQQIRKAKIDYPNVDQDLDNLFHNLADQIVKYFDLYSIAGFKEKISQSQNTFNDLAVDDTDQSVGKITVINELLKGAQANGMTGSLKVLKISTPFGFTQDKSGVLTKDSSIIYQSPTGLFERSVRLTDL

SEQ ID NO: 17977 - protein, 1361 aa, unidentified
  REGION 1..1361: note = Cas Enzyme sequence
MTKLGKPYGIGVDIGSNSIGFAAVDENSHLIRLKGKTVIGARLFEEGKAAADRRASRTTRRRLSRNRWRLSFLRDFFESHITPTGPNFFMRQKYSEISPKDKARYKYEKRLFNDRTDAEFYQQYPTMYHLRNRLLTDPSKADVREIYFAIHHILKSRGHFLTSGYAKDFNTNKVALNEIFPALQDAYAQVYPDLDITFDENKVNEFKTVLLNEKATPSDTQRALVNLLLAEDGDKDILKQQKQVLTEFAKAVVGLKTKLNVALGTEVDSSEATVWNFSLGQLDDKWAGIESAMTDEGTEILDQIRDLYRARLLNGIVPAGKTLSQAKVDDYAQHHEDLELFKDYLKQLEDDGTAKAIRQLYDRYIDGDDAKPFVREDFVKALTKEVTAHPNAKSPELLERLAQPDFMLKQRNKANGAIPVQMQQRELDQIIKNQSVYYDWLAAPNPVEKHRKSMPYQLDELLNFRIPYYVGPLVTAKEQKAAQGGVFAWMVRKDPDGNITPYNFDEKVDREASANTFIQRMKTTDTYLIGEDVLPKQSLLYQRYEVLNELNNVRVNNEKLSIEQKQQVIRELFERHNSVTIKQFAENLRAHGDYAHIPEIRGLADEKRFLSSLSTYRQLKSLLPDAIDDPAKQADIENIIAWSTVFEDAAIFKTKLKEINWLDSQTITKLSNIRYRGWGQFSHKFLNGLTLGNGHTIIQELFLSNNNLMQILTDETLQKKMTELNADKLKAANINDAIDDAYTSPSNKKALRQVLRVIEDIKRAADGQDPSWLYVETADGGGTPGKRTRARQHQLQEIYANAAHELIDSAVRGELEDKIADKADFNDRLVLYFMQGGRDIYTGTPLNIDQLSSYDIDHILPQSLIKDNSLDNRVLVHAIINREKNATFASTIYAQKMNATWRQWHEAGLISGRKLRNLQMRPDQIDKYASGFVARQLVETRQIIKLTEQIVAAQYPETKIIAVKAGLSHQLREELEFPKNRDVNHYHHAFDAFLAARIGTYLLKRFPNLQAFFTYGKFKKADVKKLRGFNFIRDITHAEDKIVVKDTGEVIWDKKRDVDELDRIYNFKRMLITHEVHFEKADLFKQTVYGAKDSKEAGGKKQLISKKKGYPVDIYGGYTQETGSYLSVVRLTKKAMYAVVKVSTRDAAKLAVAKSISEQKENETLNDIIDEKLSKISKNGKITHELFEVVLPRVGQKTLFKNSKYNLFLVNSDTYMHNYQELWMPREYQKMWKDISLSKYGDAQTEDQLDQIFGFIVSQVNSYFNLYDINQFRKKLNDAADKFATLPMRDTDDMQGKIATIGQLLIGLQANAARSDLRNLDIKTPLGLLQIPNGISLDSDTSVVYQSPTGLLEREVHLSDL

SEQ ID NO: 17978 - protein, 1388 aa, unidentified
  REGION 1..1388: note = Cas Enzyme sequence
VIIRTYELKTITTIAILKVFQILTGGLSMTKLGKPYGIGVDIGSNSIGFAAVDENSHLIRLKGKTVIGARLFEEGKAAADRRASRTTRRRLSRNRWRLSFLRDFFESHITPTDPNFFMRQKYSEISPKDKARYKYEKRLFNDRTDAEFYQQYPTMYHLRTRLLTDPSKADVREIYFAIHHILKSRGHFLTSGYAKDFNTNKVALNEIFPALQDAYAQVYPDLDITFDENKVNEFKTVLLDEKATPSDTQRALVNLLLAEDGDKDILKQQKQVLTEFAKAVVGLKTKLNVALGTEVDSSEATAWNFSLGQLDDKWAGIESAMTDEGTEILDQIRDLYRARLLNGIVPAGKTLSQAKVDDYEQHHEDLELFKDYLKQLEDDGMAKAIRQLYDRYIDGDDAKPFVREDFVKALTKEVTAHPNAKSPELLERLVQPDFMLKQRNKANGAIPVQMQQRELDQIIKNQSVYYDWLAAPNPVEKHRQSMPYQLDELLNFRIPYYVGPLVTAKEQKAAQGGVFAWMVRKDPDGNITPYNFDEKVDREASANTFIQRMKTTDTYLIGEDVLPKQSLLYQSYEVLNELNNVRVNDNKLSFDQKQQVLGELFERHNTVTIKQFVDNLLAHGDYDRIPEVRGLADEKRFLSSLSTYNQLKGILHEAIDDSDKQTDIEKIIAWSTIFEDKAIFKTKLNEISWLNAGMINSLANIRYRGWGQFSHKLLNELTLSTGRTVFEELLISSHNLMQILTDEVLKQKIAELNAHELKASGIYAAIDDAYTSPSNKKALRQVLSVIDDITNAAGQAPNWLYIETADGDGVPGKRTNSRQRKIQEIYVNAAQELITSSVRGELEDKIASRADFTDRLVLYFMQGGRDIYTGEPLNIDNLSSYDIDHILPQSLIKDNSLDNRVLVHPLVNREKDTIFASTRFAKQMNGMWRQWHAAGLISSRKLRNLQMRPDEIDKYASGFVARQLVETRQIIKLTEQIVADQYPDAKIIAVKAGLSSQLRKELDFPKNREVNHYHHAFDAFLAARIGTYLLKRYPNLEPFFTYGKFKKTEVKKLKSFNFIRDMTHAKDKIVAKETGEIVWDNASDINELDRIYNFKRMLITHEVRFETASLFKQTLYAAKNSKNRGGSRQLIPKKKGYLVDIYGGYTQETGSYLSVVRLTKKAMYAVVKVSTRDAAKLAVAKSISEQKENETLKKIIDGKLSKTSKKGKTTHQLFEIVLPRVGQKTLFKNSKYNQFLVNSDTYMHNYQELWMPREYQRMWKDILLSNHGDAQLEGQLDQIFKFIVSQVNSYFNLYDINQFRKKIADATDKFAKLPTHDTDNARGKIATIGQLLIGLQANAMRSDLRNLDIKTPFGLLQIGTGITLDLDTSIIYQSPTGLFEREVPLTDL

SEQ ID NO: 17979 - protein, 1382 aa, unidentified
  REGION 1..1382: note = Cas Enzyme sequence
MEYFMGLDMGTNSVGWAVTDPQYNLIKKKGKDMWGIREFERAESAAERRTHRVSRRNHQRSQVRIGLLKEIFSDALMAEDENFLARLDNSFYKAEDKDSNLTTLDAIFADKDYRDADYYKDYPTIFHLKYDLIMDRVPNDGRYTRKVYLALLNYFKRRGHFLNESLSGSDENGKDVWSAYIELCDVVYEGLDISLNHDSSLAEDFRAVFCDSAISRSKKREKLMDLLGIAKKDAKEFIILGAVCGLKADLLKLLSIESEQKADLDFSSAGFEDKLPEIYSIIGESYADIIDAMKQVYDAGVLAGIMSGTDEEGDTIKWLSQARVSSYEKHKKDLKILKECVRKYCDEAEYDHLFRREEDDSYSAYVGSVNSGNVVRRGEKLSASKSGDRYANLKKRIKKDLENYDYDENVKYILREMETETFLPKQLTFANGVIPNQLHEREVRKILENASKYLPFLRDKDESGLTNSEKIVSLFTFRVPYFIGPVSQNYKGNGWAVRKPGMDTRAVYPWNIEEVIDYDDTRSHFITRMVRECSYIVGEKVLPKESMEYQAFMVLNTINNIKVRNEKISCELKQDIYHDVFENNGRVTKKKILTYLNNRGIEVSDNELSGIDTVIGCQLSTYRRFYGVFRNELSKDSVKHIVEDIVFKGTVYGDSKEMLRQLISEQYSDTLSQDQIKRIIGFKFRDWGNLSKQFLELEGFNKKTGEVTSLIRALWEDEDNLNIMELLHSDKYTFDESLKEKHQNSLKSITEFAYEDLNDMYFSAPVKRMIWQTLLIIREVTQIMGCPPKKIFVEMTRSEEEIKGDAGRKDSREKELLELYKSIKGDRSWDDEIKEAGSSGKLRSKKMYLYYKQMGRDMYTGLPIDLNELFDDNKYDIDHIYPRHYVKDDSIHNNLVLVDKRKNSRKSDNYPLDTDIRGDKEITAYWSMLHQKGFMNDEKYRRLTGDRPFSEEQKADFIARQLVETSQATKGVNDLLIEILPKETTLVYSKARNVSDFRRDFGFYKSRMLNDFHHAHDAYFNIVVGNVYYTKFTANPMNFIRKERGKYNLGRMFERDVVRNGYTAWVAPVKDKVTGEIIEPGVSLAAVQKTMSKNTPLLTRLSTTQHGAISDATICSASKAKEDGYLPVKSSNNTKLKDVTKYGGFNSIKIAYYFLVEHEIDGKGKDKGKPVRIRTIECLPVYKRAYVESHDDGLYQYCLELGLKNPSVRVKMIKPQSLIKVDGFPLYITGKTGERFVVRNACNLILTSYWNRYIHLIEKCNLSDRIPEGISADDNIRLYDELTSKHKYGIYAKRPNSIGETLDKGREKFIDLEIDKQVNILTQIINLSLICNSASADLKLIGGSSKTGVTLISKKVSGYSEFKLINYSVTGLYVKEVDLLTV

SEQ ID NO: 17980 - protein, 1380 aa, unidentified
  REGION 1..1380: note = Cas Enzyme sequence
MEYYIGLDMGTNSVGWAVTDVNYNLIRKKGKDMWGIREFDEAESAAERRVHRVGRRSHQRSQVNIGLLKEIFANALAAEDENFLARLDNSFYKAEDKDENLTTLDGIFADADYHDADYYKEYPTIFHLKYDLIMDKVPNDGRYARKVYLALNNYFKRRGHFLNESLSGSDEGGKDIWTAYVELCDTVYEEFDIVLAHEYELENKFRSVFCDASLSRSRKRDMLMDLFGMTKKENAQQYMILGAICGLKTDLLKLLSIESEQKADLEFSSAGFEDKLPEIYAIIGESYANLIESMKQVYDAGVLAGIMSGVDAEGNPIAWLSQARVTSYKKHKKDLHILKECIHKYCDEKEYNHLFRENADGSYSAYVGTVNSESKVRRGEVLHASKSGERYANLAKRIKTDLEPYANDENVRYILDELKAETFLPKQLTFANGVIPNQLHEREVRRILDNASKYLPFLQEKDESGLTNSEKIIRLFTFRVPYYIGPVSQNYKGNGWAVRRAGMEKKTVYPWNMEAVINYDDTREAFITKMVRECSYIAGEKVLPKESMEYQAFMVLNTINNIKVKDEKISCELKQDIYHDIFEKNGRITKKKILTYLNQRGFSVEENELGGIDAVIGCQLSTYRRFYGVLGDDLSKDSVRHMVEDIVFKGTVYGDSKAMLKDMIAEKYSDELSKEQMKRILGFKYRDWGNLSKQFLEMEGCNKQTGEITSLIRALWEDNLNLMELLHSDKYTFADTLKEKHQKNMKSLTEFNFEDLEEMYFSSPVKRMIWQTLLIIREVTEILGCAPTKIFVEMTRSEDEKKGDAGRKDSREKELLELYKSIKDDRSWDEEIKNAGASGKLRSKKMYLYYKQMGRDMYTGLPIDLNELFDDNKYDIDHIYPRHFVKDDSIHNNLVLVDKRKNSRKSDNYPIDKSIREDGKITAYWRMLHDKKLMNDEKYRRLTGNRPFTEEQEADFIARQLVETSQATKGVNDLLKELLPKNTILVYAKAVNVSEFRKQFDFYKSRTINDFHHAHDAYLNIVVGNVYFTKFTANPLNFIKKEKKEYHLGRMFDRDVERNGYIAWKAPIYDKETKRMVEPGESLTTVRKVLATHTPLLTRLSTTQHGAISDSTICSAAKAKKDGYLPVKSLSNPKLMDVTKYGGFNSIKNAYFFLVEHEVDGKGKDKGKPVKIRTLECLPVYKRAYVESHEEGLYQYCLELGLKNPSIRMKKIKPQSLIKVDGFPLYITGKSENRFVVRNACNLVLGAQWNQYIHAIEKSNLSGRISENITVEDNVRLYDELMKKHTEDIYAKRPNSVGEILNKGRAKFVDLDVAKQVYTLTQILNLSLICNSALADLNLIGGSTKTGVARISKSVSGYKEFKLINCSVTGMFEKEVDLLK

SEQ ID NO: 17981 - protein, 1465 aa, unidentified
  REGION 1..1465: note = Cas Enzyme sequence
MINNLNLSECLDDVVTKEPSDVVTKEPSDVVSQKDGYYVGLDIGTGSCGWAVTDTKYQVLKKSKKRLWGVRLFPTANTAAERRTFRCNRRRLQRRNWRLNLLKGLFEAEINKVDPAFFMRMKESMLQDDDRTTTARNALFADENYKDKNYAEEYPTIYHLRLNLMEKAPKDIRLLYLAIHHILKHRGHFLFENFNVDNISGSFETIWRNVSNIIVEKVFLNPNLESELIDDDGDDGDLNNNAIERLQSHGQEVLQQLLSLNRNRTDVKKRLLSIFEEALGEKADKKKKKSIEQCVAALVGAKFKPFVCVSDDEPEEEQLKIELCFGSANYETDFATKLGSTQQSVFAILKEVYDFVRLQNLLGGRKSISEAKVEMYKEHSKDLIVLKDLIRNSDHLQDNEKTFLYNNVFKKYDAPVKCVGECLYETILRYRALEIKSTTNKDLASAKALYGQLMEIAQKFIEMNAAGAVIEPDILKVCNRIVDGTIFSHAVSVENSVIPQQLHAFELKKILENAKAQFPFLNESDEFGTVVDKIIKLHSFRIPYYVGPVNNYVGELNNSGNKHAWCVKNEGVNLPYTPWTFHKIVDTKKSAQEFINRMTSKCTYLRYADVLPKCSILYSEFEVLQELNNIRFNGCKLKHEQISLLIEELYKKDKNVTLKKLKNLLVSRMGFSREDVEVVSGIDLELKGNMASYVQLNELLKSNGIQLKDEKQKIDVMEQIILWVTIFEDTKVLKDKLSQELGYLLNDKVINSVVGLRFAAWGRLSREFLENVLGRVRNDKLDVPVNIMTRLRKGEGNLMMLLSDAYTYSETVAKLNEQSSEVKKYDSISYDMVDELYVSPSVKRMIWQSLKVVDEIVNIMGGVQPKKIFVEMARGEEKKPERTVSRKKYLQDLYQNCRKQEPELAEQLDKVENSSLLNERLYLYYTQFGRCMYSGEAIDLEKLFDSYDVDHIYPRCYVKDDSLDNKVLVKRTLNGIKSKTYPLGAVAEIAKNFDVCRPLWTKLRDKGLISNEKYKRLIRTTEFTQDELQSFVARQLVETRQSTKEVCNLLKQVYKDSRVVYSKAGNVSDFRHKFSFIKVRELNCLHHAKDAYLNIVVGNVFDEKFCHGDIRKFFSICSHTEEGYTFREGDTDVFSKPGDRLKKLGVWSGLDQIGAIRKQYRQNDIFVTELQEIRSGQFFDMNLSPKEAGLIPPKDIRVQTKNELVSGEILPKTGLDTSKYGGYKGASTSYFAFIEYTEKNKVVRNFVAVPVYINSMKGNLKDNIKDYFAKNGYDSPKVLISQLKMPFFLRDNKTSLTFKVSGVSNGWLTCGLAEQLTLSEKDTAQLKKVVSFLKKLQEDNSYQYSPKFAGFSDSELNELLNILKWKIINTKFKNISKPVTKLLIKAPQFDENLVLSIPDKAQLVMNLVGIFKNSYSSKGNDFSLIGGKKKMGSLLKSIKPEDDFSIVYKSVTGFYVHEIKLNELK

SEQ ID NO: 17982 - protein, 1098 aa, unidentified
  REGION 1..1098: note = Cas Enzyme sequence
MPFRFAFDLGSTSIGWAVYELDSTLWGSHRRGQPIALHKLGVRLFDDGRDAQSGESYAANRRLPRAMRRQQDRRLARRSRLEDELEAAGLLPPSGQDRDQVFECSHPEQSCTEAHNIDCRNPYRLRARAATEPVTLHEIGRAFWHISKHRGFASNRKTDPDENDTGLIRSGAKALLEKLAESGHPTYGSYLWSRLTNGEGVRVRPSGDGAEKHYDFYPTRDMLKAEFDTIWAQQAPNHSELTDALRDQLRGTIFFQRPLRPVEPGRCTFFPKKPRLPRWHPAAQAFLILQQLGHLRIIREVREFRLDLDKHRVLFDHLYGGQKMTWAQVRKALALNSQDEINLQSGGLKHLHFNEVAAALLGTKKKPGPLVDYWPDYDVATRETILAKLAEAESPEVLIDWMTETLDLSPSIAASVERVRLPDGHLRFCREATEAMVAEMRKDVINYNEAVERAPLLCGIDFTDSRPDKGVSTLPFYNELPQLQRMLGNGTGNPDDPRDMRLGRITNPTVHIALNQFRRVINMLIAEYGKPAQVVLEATRDLGKSQREKDEIEKTIKANEKRNDRYRQSLEEANLLKPGQRVGDLFLKMRLWEELGRNEADRRSPFTGRPISLSDLHSDAVEIEHILPFGETLDNSPANKTLAFRGENRLKGNLSPGEAAERGIFDQHAMIERTKHLPRNKAWRFLPDAMQVFENQKGFEDRQLHATGYLARMVRSYAEALFDKKDADNKARSHVWMLPGRMTALLRHRWGLNLGDHNRKNRNDHRHHAIDAAVVGVIDRRMIAQLQKAAKAYGAESLECVLPAPPEPFSGFRNTVMQTVVNINVSHRSQHVTTDITNPSQTSGRLHEATAYGLIREVPENQAELTIGNVVVRKPVTSLTPKEIRQIRDVKLRNTLLEATAPSRASDLSSSEADKLRAELLASWSTRTGHRRLRIIKAETSVRAVHDSKGNPYKFYAPGENACLDIIEADGIWRCHPVTVWDANAGQDCHWRDVYPSANFVMRVHKDDTLQLFDWDENEGCVTAGSNAIKRIVRLSPSNNVLYLAGLNEAGVLSKRHADKEDDFRWDFANVSKLKLRRARRVRIDELGKVHTIPFGKV

SEQ ID NO: 17983 - protein, 1255 aa, unidentified
  REGION 1..1255: note = Cas Enzyme sequence
MEPFARVYPEDRESDLAKAAQAKADEELARRRRYSPIANLGTFTGYRIGLDIGNGNVGWCVLFEDGHLLRFLRAEDIEAHNAALPKDARRTQIPDLSTFVPLGTHKFDARVEKTQESLSKVRAEAHSTMRLLDAQQRRKLHVGAALRKAGLLPNEGQPIEGHRRISADKLRVRLLDPAFEADPHDLGRALLNLYKRRGYMPPMGRAKPDKDAKQAKGTGKAEDAGTDEGSAFAKGIEAAYRKALADFGCRTVGEFLDRCARDAKADGIKNFRKRHKTLQWQKDHKKEKPKEGAPARSYEVLNFLTPTHALIREEGRILREAQGARLPLDDKAWAEIEETAEFRRPLQAKVPGRCRFLPTEFRCVRALPSFQHFRILEQISFLRDSGNRALDDQAFAEARAALSQSERLTIAELSRKLGAGRLTLKNEKNEDEAARTLVGAKTDLALAAALGEAWMRQSIEQRDKWVMRFLRRHEPRLGAEGTAEVAPWSIDDERALKAEAEAAFGPGALDKVDDDAAKTFTREDGFSNISVKAASIRAECYEKRLAHDLHMKALRAAGMPEPSLGLYERLPYYGEVMPGDVVPATGFAPAERTCAEEKAHGRAANPDVHVVMNRVRAVVNAIIDMMGGILPTTCVVEMARSALSEDQAKEHLQKARERERLHDLIRADIDKVFEGLGRRRPRGPALDRLIDRWKAAMRQGWRDYNGEEIQRSNLIDSAMYQLDHVSPAAFGAFQKNNLFVSRFNRDKGRKLPWEAFGEEDKENKFRPALIAFAEFGLEQRVAVLEGQIKKLKKLSKPPAKKLKQAEDALQDAKRDLKDLEKHGEPRGDVLNALKRTLTSGVAGLVGEGDEQLQEGQRSARRPFEAGDQASLFRRFGPAARKPEREFAARDVANIGYSTKLTLQYLTFLGATAEAVKPWAVHALRCMFGIDKERSDLRNHAVDAFLIAHFDGRVLRPAFDELKDRPLEEMYSTRELGIALDRIGNGAGFLDATRENIARLEAELRYIATAHRANNMWNPGDAAGGSFGALGGQNIYAFRPDWEERKRLTGIARKHGMAVADGQILAAKELLDLAFTKSEDKTSRKIGKALNKEIELRYLTRGDKSAKPTTIKLPIALPLPKQPGAFIDGEGKFAIIAAGGNQERRIVSTAEFSKMNAAERAALFADKRPIYRNGDTVILDGKSYVVTGLMQDGRIIAYPVDEATRDPDKKELTTVPSSSKDQPPRKFASDVLGRRLYRLRKSAGGVEPVPYPLRGE

SEQ ID NO: 17984 - protein, 1091 aa, unidentified
  REGION 1..1091: note = Cas Enzyme sequence
MGRLVLGLDIGITSVGFGIIDLDESEIVDYGVRLFKEGTAAENETRRTKRGGRRLKRRRVTRREDMLHLLKQAGIISTSFHPLNNPYDVRVKGLNERLNGEELATALLHLCKHRGSSVETIEDDEAKAKEAGETKKVLSMNDQLLKSGKYVCEIQKERLRTNGHIRGHENNFKTRAYVDEAFQILSHQDLSNELKSAIITIISRKRMYYDGPGGPLSPTPYGRYTYFGQKEPIDLIEKMRGKCSLFPNEPRAPKLAYSAELFNLLNDLNNLSIEGEKLTSEQKAMILKIVHEKGKITPKQLAKEVGVSLEQIRGFRIDTKGSPLLSELTGYKMIREVLEKSNDEHLEDHVFYDEIAEILTKTKDIEGRKKQISELSSGLNEESVHQLAGLTKFTAYHSLSFKALRLINEEMLKTELNQMQIITLFGLKQNNELSVKGMKNIQADDTAILSPVAKRAQRETFKVVNRLREIYGEFDSIVVEMAREKNSEEQRKAIRERQKFFEMRNKQVADIIGDDRKINVKLREKLVLYQEQDGKTAYSLEPIDLKLLIDDPNAYEVDHIIPISISLDDSITNKVLVTHRENQEKGNLTPISAFVKGRFTKGSLAQYKAYCLKLKEKNIKTNKGYRKKVEQYLLNENDIYKYDIQKEFINRNLVDTSYASRVVLNTLTTYFKQNEIPTKVFTVKGSLTNAFRRKINLKKDRDEDYGHHAIDALIIASMPKMRLLSTIFSRYKIEDIYDESTGEVFSSGDDSMYYDDRYFAFIASLKAIKVRKFSHKIDTKPNRSVADETIYSTRVIDGKEKVVKKYKDIYDPKFTALAEDILNNAYQEKYLMALHDPQTFDQIVKVVNYYFEEMSKSEKYFTKDKKGRIKISGTNPLSLYRDEHGMLKKYSKKGDGPAITQMKYFDGVLGNHIDISAHYQVRDKKVVLQQISPYRTDFYYSKENGYKFVTIRYKDVRWSEKKKKYVIDQQDYAMKKAEKKIDDTYEFQFSMHRDELIGITKAEGESLIYPDEAWYNFNFFCHDGETPEILKFTATNNDKRNAIEVKPIYCYCKKRLMPTISKKIVCIDKYATDVVGNLYKVKKNTLKFEFD

SEQ ID NO: 17985 - protein, 1036 aa, unidentified
  REGION 1..1036: note = Cas Enzyme sequence
MSHKDKRYRFAFDLGTNSIGWAVYELNAALAPIDLTDAGVRIFSDGRDPKSGASLAEGRRGPRAMRRNRDRYLQRRTFLMDELIKASLMPSEEAERKALETLDPYDLRRKGLYEALSLHEFGRALFHLNQRRGFQSNRIADSGNDDEGGKIKKAEKELRDLLEKNNCKTYGEFLAKRHDVRESVRIRLRGKDAKAHYDFYPTRDMLKHEFEELWKEQAKHQPGLTPEWHDRFHEILFFQRPLKPPVIGKCTFFPTEERLAKSHPLSQARRIYQDLNHLRLIVDGQPPVQLNKDDRDKLAYILLSGEDVTFKTGLRRHLGLSAGTTSTLEESGKTDRLVGDQLAARLANPKKGPLRQVWGGLTTEQRADIALRLNTEQSEEALIAYLIATYGLDEATARATANIRLPEGYDNLGLTATTHILEALKAEVITYDKALKAAFPDRHHSDERDGEILDRLPYYGEVLQRHTLGGTLNPADTPDKKFGRLSNPTVHVALNQLRRVVNALVKEYGHPEQIVLELARDLKLSQKQKDELAKTQKDNEKNNARRKVEIEALDRVATPNAMILMRLWEELGPPMQRNCVYTGRPISLEQLLSGEVEIEHILPYSRTLDDTFTNRTLAMRDANRGKRNLAPCEAYQGMDYDAIRERARALPPNKRWRFEPDAMERFESEERDFLARQLNETRHLATLARKYMIGICNDPNAVWVVTGQLTALLRARFGLNTILNDHNQKNRTDHRHHAIDACVIGITDRGLLQRVSRVAGIHEHKDDLKDITKDVPDPFEHFRDRVKARIDAVIVSHKPEHGTGGALHNDTNYGIVTGADRSEGELVTRKAIDALTYNEIDKVRDLTLREQLQQVKHEAGKDAKALIKALSDFGDKTGIRRVRILKKQEDFIQIKNRKTGEAYRAVIPGENHHMDIIEGPDGVWRGFAATVFDANQENQPPKWQSEYPDAKLIMRVHKGDLLELLDDDGVMRVKRAVRLEISANRIRLATHNDGGDFQKRHDDPDDIFRWDFANIGKLKERLCRLYIANELGKLPK

SEQ ID NO: 17986 - protein, 1038 aa, unidentified
  REGION 1..1038: note = Cas Enzyme sequence
MSEKDKRYRFAFDLGTNSIGWAVYELNTALAPIDLTDAGVRIFSDGRDPKSGASLAEGRRGPRAMRRNRDRYLQRRTFLMDELIRAGLMPPEETDRKALEALDPYDLRRKGLYEALSLHEFGRALFHLNQRRGFQSNRIADSGNDDESGKIKKAEKELRDLLEKNNCRTYGEFLAKRHDERESVRIRLRGKDAKAHYDFYPTRDMLKHEFECLWQAQAKHHPSLTPEWHDRFHEILFFQRPLKPPVIGKCTFFPTEERLAKSHPLSQARRIYQDLNHLKLIIEGQPPVILSRSDRDKLAFVLLSGEDVTLKTGLRKHLGLPAGTTSTLEEGGKTDRLVGDQLAARLANPKKGPLRQVWGGLTTDQRADIALRLNTEQSEEALISYLMATHGLDEATARATANIRLPEGYDSLGLTATTHILEALKAEVITYDKAVKAAFPDKHHSDERDGEIHDQLPYYGEVLQRHTLGGTLNPADKPDKKYGRLSNPTVHVALNQLRRVVNALVKEYGHPEQIVLELARDLQLSQKQKDELAKTQKDNEKNNARRKAEIEALDRVATPNAMILMRLWEELGPPMQRNCVYTGRPISLEQLLSGEVEIEHILPYSRTLDDTFANRTLAMRDANRGKRNLAPCEAYSGMDYDAIRERARALPPNKRWRFEPDAMERFENEERDFLARQLNETRHLATLSRKYMIGICNNPNAVWVVTGQLTALLRARFGLNTILNDHNQKNRTDHRHHAIDACVIGICDRRLLQVISREAASYERKDDLKHVTRDVPDPFPDFRDRVKARIDAVIVSHKPEHGTGGALHNDTNYGIVTGADKIDGELVTRKAIDALTWNEIDKVRDLNLREQLQQVKHEAGKDAKALMKALSEFGDKTSIRRVRILKKQEDFIRIKDRQTGDAYRAVIPGENHHMDIIEGPDGVWRGFAATIFDANQGKQPPRWQDEYPDAKLIMRVHKGDILELLDEDGIMRVKRIVRLAPSASRFYLAAHNEGGDFQKRHDDPDDMFRWDLATISKLKERKCRLARFSEIGHYKILA

SEQ ID NO: 17987 - protein, 1064 aa, unidentified
  REGION 1..1064: note = Cas Enzyme sequence
MALRFSFDLGTASLGWAVFELGENGSPVALVGCGVRIFDDGRDPQTGESRARDRRLPRAMRRSRDRFIQRRDFVIAKLVEIGLMPADKADRKALEHLDPYRLRADALNNVLPLYHIGRALFHLNQRRGFKSNRKTDDPGERGKIASATARLEEKMEGFETLGAFLAARQVDPDVRKRLPTRIRPDNVNKDELYEFYPTRDMLEYEFDLICQRQAGFNHCFPGPQAVAELKRAIFHQRPLREVHPGYCSFYPDEPRLARAHPLAEDWAFYQKINQLKAEDEDGYPVLMSLSQRDEMIDRLKRGENLTWDRVRKVLRMPGKGGRINLEDGGEKQIDGSTLVKRFKGTKARPGPFFAVWDSFAEDPVLDIIAAYGTSNTDEELLAALEPFVLDSEQKKRALRCSLPDGYIAVSERAARKIVAELKTEIIPYSEAAKRAMPDKHHSDKRDGEVFDRLPYYNEIDELKRHLGHGTGDQDDPRDVRFGRIANPTVHIGLNQLRRVVNALIDRFGRPDQVVLELSRELKQSRQQKLDAGRMRDANRKANDKRRDELSTYGFFQEGDRRRTREAFMRIRLWEELGPPNNRFCPYSGKPITSLATLLSDEVEIEHILPLSKTLDNSMANKTVSFRQWNRLKRNLAPTDAAQRYPDMFDQDEMVARTKSMPSNKRWRFHADAMERFASNKSFEARQLGETQHFGVVARHYLSKLNPANPEQKEMPVWVTTGRLTADLRRKWGLHLGSNSKNRNDHRHHAIDACVIGVIDRGLIQRIARDAARDEENQAVSRILADIEEPYEGYSEQVNAAVRKVFVSHRPNHQTGGKLHEDGAYGLVAENSDNINRGETSIGNAVIRREVASLSAKQIGQVRDLKIRADLEAVLAEGRQLHPLKTDFDRHLPELLAEWSRRKGTRRVRTLVRDESIIPLGKRADGSRYKYAVPGENHHMDIVETPDGVWRGVAQSVFDANQIKPQTDWRNVYPDARFIMRLHKNDTLQLFDEDGVNRVKRVVRIAPSANRLMLAEHTDAGKLQERHDDRDDAFRWDLATISRLKHRRARRVRVDETGRVRVVPT

SEQ ID NO: 17988 - protein, 1399 aa, unidentified
  REGION 1..1399: note = Cas Enzyme sequence
MGKQHFNDYYLGFDIGTNSVGWAVTDLQYKLLRFNKKDMWGSRLFEEAKTAKDRRVYRNSRRRLDRRKRRLKLLEELFLEEVSKVDSTFFKRLEESNLYNEDKSIQFNYPLFNDKNYTDVDFYNEYKTIYHLRKALVFEDKKFDIRLIYLALHHILKYRGHFIFEGQSFEDIKSFDSIFAELQTWILENFELDINSNTKEKLEEIILSNKNKSNKKTDLKELFEDKRVQAIFNLGIGSKVDLKDVFNNEELKDQKICFAEIDYENEKRDELYQLLGENIFIVDLAKKIYDFMVLKKILKNSDSFSESKVALYDEHKKDLDTLKYIFKKYLKPSDYYKFFRSNSEKINYPSYIGLNKIKSKQILKENRCSISDLNKELKKYLNNLEIEPADEKILKNILLKIDENRFLEKLKSGENSTVPYQVHEIELIKILENQSKYYPFLNENRDGKTIYEKVIMLFKFRIPYYVGPLNTDKNVKGSNTWVVRKDENNKSPITPWNFEEKVDTQKSAEEFIKRMTNRCTYLKDEDVIPKNSLLYEEFILLNELNKVTVDNGHLHFSLKNEIIEELFKTTVKVTKKKFLEFLKKKQAVNDVESITGIGLEFNGKLQGYNTFRKILGDKIENANVKNFVERCIELKCLYGTDKKLFKNAVGNEYKNYNITEEEFSKINKLSYNQWGRISKKLLLDISFEKNDNTEKFESVMEALRSTNYNLMELLSEKFNLQEKINEINGEEDFSNFDIEKYVNELYVSPSVKRSIIQSYKIAMEIKKITGKNPKKIFIEVAKGGGEKGKTTEKRKDKIKELYKAMKNPLAEYCSNLQDLSSEIDKYDDNRLRQKELFLYFMQMGKSMYTGKEIDLDNLFNSNIYDIDHIYPQSKVKDDSFDNTVLVEKEINHNKDNELLKPEIQSKMKNYWIFLRENNFISKEKYNRLTRNYDFTDDELGDFVARQLVTTRQSTKEVAKLFEKLFEGSKVVYSKASLVSEFREKYNIVKVREVNDAHHAQDAYLNIIVGNVFNTKFTENYWKFTKENKRRNEENPNKKEGYNFKNIYESDVFRNEDVAWVFSKTDTKYNTINTIENMVYRKTVNITEMITEGKGQLFNLTIKDKTQLKKNVGNIVAITPKALKNRNISFNSVELAKKYGYFDSLNNAYFVLFKYEEKGKEKIGFDSITIVDKEKLKNNSDIEKFLENKGNKNVKLIRKIFKNQKVLIDGHPYLVKSYNKQKQIKFYNYKMLYLDKTNLKFASNAIKFEKNNLDINTNNQRYIVNFLKKKNKNEINETYEECIERLHNEFNLLFLKLYEILKSPIYKNYKLQEFLSNKNRVEIVDKYDVFKNLTLYNKSKLIKEFLNYFKIENNELNFSLIEIDKKANCLQKTLQEDLIRDFVILDESVTGLFVKLERLE

SEQ ID NO: 17989 - protein, 1353 aa, unidentified
  REGION 1..1353: note = Cas Enzyme sequence
MQTKKVDEYYVGFDIGTNSVGYAVTDKNYNLIKHGGEPMWGSHVFEAASTAQERRTFRTARRRNDRKKQRIALVSEIFAPEIAKVDPRFFIRRRESALFRDGVDIKDRYVVFNDDDFTDKDYYDIYPTIHHLIYDLMSNKEKHDIRLVYMACAYLVAHRGHFLSEVSKDNIEDVLDFDVVYCNFLNVMDNYAEIPWKCDISKFKEILKKKQTVTNKEREFLQLLNEGKKFKTSEEDDVSREGLVKLLSGGTYELGKLFPKLIFEEKVSVSFNMAEEDFAMVLQQLGDEGDIISSLRNVYDWAILSDVLNGKNSVSEGKITVYEQHKKDLSFLKYFVKKYIPNRYYEVFRDGNIVGNYVSYSYNLKNVQNVSKFKGAKKDVFCDYIKKVVKDIKVDDEDKVEYEDMMFRLDTYSFIPKQVENDNRVIPYQLYYYELKIILDNASSYLEFLDEKDMDGYTSREKLLSIMEFRIPYYVGPLRTDNGQHGWMKRKAEGRIYPWNFEDKVDLDASEQEFINRMTNSCTYLPGETVVPKYSLLYCKFNVLNEINNIKINDCSIPIEHKQGIYKLFERYRKVTLKKIKDFLISNNLLHPEDVISGIDVTIKSSLKSYHDFKKLLESCVLKENQVEAIIERLTYSEDKGRILRWLHMEFPDLSDDDVKYISKLKYSDFGRLSRKLLVGIRGCNKDTGEVDSIMGMLWSTNDNMMKLLSNSYTFIEEIEAIKNEYYVEHPANLDSMLDEMYVSNAVRRPIHRTLDILSDIRKVCGKNPSKIFVEMARGGGEKGVRTKSRRDQISELYKNMDKAEVRELSEQLEGKTDNELQSEVLFLYFMQLGKCAYTQKTIDIDKLKTNIYNVDHIYPQSYVKDDSITNKVLVISEENGQKGDKYPISKDIREKMQPFWYRLLSNKLISEEKYRRLTRCTSFTEEELTGFINRQLVETHQSTKAVTTVFRTLFPDVEIVYSKAGLVSEFRKEFDMLKTRSVNDLHHAKDAYLNIVVGNVYHCRFTKNFYITQKYSLKTKTLFTHSVKLGDDVIWNGQESIGNVRKVLAKNNIHYTKYPFMRKGGLFDQMPVKAAAGLIPRKTGLDTEKYGGYNKSTATAFLLVKYKEKGKQEAMIMPVDYMYSEKVFSDNEYALKYSKENIKKIWGRTEDQVIDVSLPLGLRPIKINTMLSFDGFRACITGKANAGQKIGFTSMMPLVIGNEWENYIKKIDNYIEKKGKNKNITLNEKNDGICGEKNEKLYCILTDKIINNIYSIPFNSQQKILENGYDKFKKLDIERQVYFLQNLVLVLKSGRAGSCDMSAIGGSKNAATFAFGSKLSLWAKKFQKVYLIDNSSSGIYQNMSDNLLDIIK

SEQ ID NO: 17990 - protein, 1353 aa, unidentified
  REGION 1..1353: note = Cas Enzyme sequence
MQTKKVDEYYVGFDIGTNSVGYAVTDKNYNLIKHGGEPMWGSHVFEAASTAQERRTFRTARRRNDRKKQRIALVSEIFAPEIAKVDPRFFIRRRESALFRDDVDIKDRYVVFNDDDFTDKDYYDIYPTIHHLIYDLMSNKEKHDIRLVYMACAYLVAHRGHFLSEVSKDNIEDVLDFDVVYCNFLNVMDNYAEIPWKCDISKFKEILKKKQTVTNKEREFLQLLNEGKKFKTSEEDDVSREGLVKLLSGGTYELGKLFPKLTFEEKVSVSFNMAEEDFAMVLQQLGDEGDIISSLRNVYDWAILSDVLNGKNSVSEGKITVYEQHKKDLSFLKYFVKKYIPNRYYEVFRDGNIVGNYVSYSYNLKNVQNVSKFKGAKKDVFCDYIKKVVKDIKVDDEDKVEYEDMMFRLDTYSFIPKQVENDNRVIPYQLYYYELKRILDNASFYLEFLDEKDMDGYTSREKLLSIMEFRIPYYVGPLRTDNGQHGWMKRKAEGRIYPWNFEDKVDLDASEQEFINRMTNSCTYLPGETVVPKYSLLYCKFNVLNEINNIKINDCSIPIEHKQGIYKLFERYRKVTPKKIKDFLISNNLLHPEDVISGIDVTIKSSLKSYHDFKKLLESCVLKENQVEAIIERLTYSEDKGRILRWLHMEFPDLSDDDVKYISKLKYSDFGRLSRKLLVGIRGCNKDTGEVDSIMGMLWSTNDNMMKLLSNSYTFIEEIEAIKNEYYVEHPANLDSMLDEMYVSNAVRRPIHRTLDILSDIRKVCGKNPSKIFVEMARGGGEKGVRTKSRRDQISELYKNMDKAEVRELSEQLEGKTDNELQSEVLFLYFMQLGKCAYTQKTIDIDKLKTNIYNVDHIYPQSYVKDDSITNKVLVISEENGQKGDKYPISKDIREKMQPFWYRLLSNKLISEEKYRRLTRCTSFTEEELTGFINRQLVETHQSTKAVTTVFRTLFPDVEIVYSKAGLVSEFRKEFDMLKTRSVNDLHHAKDAYLNIVVGNVYHCRFTKNFYITQKYSLKTKTLFTHSVKLGDDVIWNGQESIGNVRKVLAKNNIHYTKYPFMRKGGLFDQMPVKAAAGLIPRKTGLDTEKYGGYNKSTATAFLLVKYKENGKQEAMIMPVDYMYSEKVFSDNEYALKYSKKNIQNIWGKTDEQITNVSFPLGLRPIKINTMLSFDGFRACITRKANSGQKIGLTSMMPLVIGNEWENYIKKIDNYIEKKGKNKNITLNEKNDGICGEKNEKLYCILTDKIINNIYSIPFNSQQKILENGYDKFKKLDIERQVYFLQNLVLVLKSGRAGSCDMSAIGGSKNAATFAFGSKLSLWAKKFQKVYLIDNSSSGIYQNMSDNLLDIIK

SEQ ID NO: 17991 - protein, 1197 aa, unidentified
  REGION 1..1197: note = Cas Enzyme sequence
MEKYKYILGLDVGISSVGWGMLALDEENNPTRIIDTGVRIFTPGEHVKTGESKTKARTAKRGTRRITRRREFRVDRIRYLLFQNNFLGKYDLNDLHVHEVNEILSDVFSDLITEYYKNKDVTPYDLKVKALDEKISSEELAIILVHYAKHRGYKSNREDNTSTSAESGKVKKAIAENNALMIEKGYRTISEMILNDERFSEKKRNSSGDYKTCVTREQYLEEIEKVLDAQIRFGLISNEFKSEYINIWVSQRHYASGPGGNSKYGGDLIAKMVGTCKFDGNPRAPKFAPSTEIFVALSKLVNLRYRIVGTSNYQVLTKEQINDILEMAKSQDKISFRKIVQLIGEENIEFKGLSLGKDKYISVLKKFKKEVLNLADDDRSRVDIKNLNEAEKEAYDILLHGALYEQIAIELKGITIIRKEIKKQFGSEEWNLLLNQIELLDLFVEIVTNYKTDDDVIKHLKEFDVDEKYYSFVLSLPNFKEHNNLSLDLIRKLNPLLLGGKRYDEAMNKLVPDFRNALIEEEKYDLLIPINKNMEIRNQRVIRSLSQTRKVLNAIIKRYGMPHQINIETARELSKTMQERNKILRQMEENKLRNEELKKELVKTLSSRFKTIEDIKSMDLLKYKLWIEQQERCTYSLEKITIEELYDNNLVQIDHILPYSRTFNDNYLNKTLVKSKFNQEKANKTPYEWFGKTEKWDNYVVFIDSLDIPNQKKDNYLLKGLTLEIENEMRNQNLNDTKYISKYLTNYLKAYLNVPKVFNVSGSITGKLRGIWGLNRVTHSLESRDYYYSEDDHDEKKKNRENHLHHAMDSLVIASVTPSLVKQITSYEKYKRYINGKTLNQILNADEYLIEEKNDQYVDHNTGEVFEDSKSLREYFEKMKMSEYIEKKKNSTYRLHFPLPYAEFIDELKIRVFEQDQDVYKDKINRFPYLVKEKRKMYPIIPSISKPKVGGSLHGETYYGIKIRENEKVVHERMSVISSSFNDKKLELIVDKEGGSKVVYETLISWLDGQDGEKAFKEKGYPKNPLTDNLIKKIKLETPFDGKGHIIGTKLVAKENVVQVKVFKKVNEDKMYFIGLDSYDVIQLKKGHDVDVIVWWGQGKNNVLIKYSELVRDYNSYIELQKNDLIEVELYNGAKGAAYSLGFTSGIFEVGSKLGDGLDLIGENLLFNKSRERYQLTISTIKSIEKLNISVLGKIDN

SEQ ID NO: 17992 - protein, 917 aa, unidentified
  REGION 1..917: note = Cas Enzyme sequence
EELCNQIIEMVSRRRRYDQGPGSEKSPTPYGSYRLVDGVLKHVNLIDEMRGRCSVYPNEFRAPKQSYTAELFNLLNDLNNLTIKGEKITVEEKKKVIAVVNEKGNITVKQLLKLLDTQEDEVTGFRIDKNDKPLITEFKGYSKVLKVFKKYNQQELLEDKLIVDQVIDICTKSKGIDERKKDIKELYPEFDNELIEELASIKGVSAYHSLSFKAMHMINKEMLETEMNQIQVLHEIEMFDKNRKSLKGKKNIESDEEAILSPVAKRAHRETFKVINALRKKYGEFDSIVIEMTRDKNSKEQVKRINDNQKRFKNENEQVDEIIKNAGINPERINGKTKTKVRLYLQQDCKTAYTQQDIDLHTLIFDDKAYEIDHIIPISVSLDDSLTNKVLASRLENQQKGNLTPMMAYLKEKFTDGNLEKYKLFVTSNKNFNGKKRNNLLTEQDITKEDVAKKFINRNLVDTSYACRTVLNTLQRYFKDNEIDTKVHTIRGQSTNIFRKRINLQKDREQDYFHHAIDALIVASLKKMNIVNSYLMHYDYSDLYDEKTGEVFDVLPDKQFIDQRYISFISDLKNIYQESNQYNLGYITQEQMHYPLIKVSHKIDTKPNRQIADETIYSTRNIEGQDMLVEKIKNIYDPKEKKAIELVNNIINDNTDKYIMKHKDPQTFEKIKEVVLNHFNDCKDSKEYYVIDKKGKYSLKGESPLTFYFNENGPFTKYSKKNNGPAITSMRFYSEKLGNHLSITDNYSTNNKKVILKQISPYRTDFYVSPDGKYKFVTVRYKDVFYKETIHKFVIDENWYHEEKIKKGIQEDWKFVCSMHRDELIGLIKPEGKKFVYDASINGGQTQYHDGKHYEILKFTATNDEKKGTFEVKPINTICKKQLMPSVGPFVKIQKFATDVLGNMYEIKDNRLKLEFD

SEQ ID NO: 17993 - protein, 1102 aa, unidentified
  REGION 1..1102: note = Cas Enzyme sequence
  REGION 158..164: note = misc_feature - Xaa can be any naturally occurring amino acid
MSRYVLGLDIGITSVGYGVIDVDNDLFVDYGVRLFKEGTAAENETRRTKRGSRRLKRRKSNRLNDMKNLLKKNDLYFDNYRNYNPYEMRVKGLNEKLSSKELCTAIMHITKSRGTTLEVLADESQDDEGTKATLSKNAKELSNGKYVCEVQLDRLNNXXXXXXXNFKTEDYVKELKEILKHQDLNEELCNQIIEIVSRRRRYDQGPGSEKSPTPYGSYRLVDGVLKHVNLIDEMRGRCSVYPNEFRAPKQSYTAELFNLLNDLNNLTIKGEKITVEEKKKVIAVVNEKGNITVKQLLKLLDAQEDEVTGFRIDKNDKPLITEFKGYSKVLKVFKKYNQQELLEDKLIVDQVIDICTKSKGIDERKKDIKELYPEFDNELIEELASIKGVSAYHSLSFKAMHMINKEMLTTEMNQIQVLHEIEMFDKNRKSLKGKKNIEPDEEAILSPVAKRAHRETFKVINALRKQYGEFDSIVIEMTRDKNSKEQVKRINDNQKRFKNENDQVDEIIKNAGIDPERVNGKTKTKVRLYLQQYCKTAYTQQDIDLHTLIFDDKAYEIDHIIPISISLDDSLSNKVLASRLENQQKGNLTPMMAYLKGKFTDGNLERYKLFVNSNKNFNHKKRSNLLDEQDITKEDVARKFINRNLVDTSYACRTVLNTLQHYFKDNEIDTKVHTIRGQSTNIFRKRINLQKDREQDYFHHAIDALIVASLKKMNIVNSYLMHYDYSDLYDEETGEVFDVLPDKQFIGQRYISFISDLKNIYQESNQYNLGYITQEQMHYPLIKVSHKIDTKPNRQIADETIYSTRNIEGQDMLVEKIKNIYDPKEKKAIELVNNIINDDTDKYIMKHKDPQTFEKIKEVVLNHFNDYKDSKEYYVIDKKGKYSLKEESPLTSYYNENGAITKYSKKNNGPAITSMKFYSEKLGNHLAITSNYNANNKKVILKQISPYRTDFYLSPEGKYKFVTIRYKDVFYKETIHKFVIDENWYHEEKTKKGIQDGWKFVCSMHRDELIGLIKPEGKKFVYDASINGGQTQYHDGKHYEILKFTATNNDKANMFEVKPINTNCSKRLMPSVGTFIKIQKFATDVLGNMYEVKDNRLKLEFD

SEQ ID NO: 17994 - protein, 1104 aa, unidentified
  REGION 1..1104: note = Cas Enzyme sequence
MSRYVLGLDIGITSVGYGVIDIDNNLFVDYGVRLFKEGTAAENETRRTKRGSRRLKRRKSNRLNDMKNLLKENELYFEDYRNYNPYEVRVKGLKEKLLPEELCTAIMHITKSRGTTLEALADESQDDEGTKAILSKNAKELNDGKYICEVQLDRLNKDYKVRGTENNFKTEDYVKELKEILKHQDLNEELCDQIIEMVSRRRRYDQGPGSEKSPTPYGSYRMVDGVLKHVNLIDEMRGRCSVYPDEFRAPKQSYTAELFNLLNDLNNLTIKGEKITVEEKEKVVAFVNEKGSITVKQLLKLLDAQEDEVTGFRIDKNDKPLITEFKGYSKVLKVFKKYNQQELLEDKLIVDQVIDICTKSKGIDERKKDIKELYPEFDNELIEELASIKGVSAYHSLSFKAMHMINKEMLTTEMNQIQVLHEIEMFDKNRKSLKGKKNIEPDEEAILSPVAKRAHRETFKVINALRKQYGEFDSIVIEMTRDKNSKEQVKRINDNQKRFKNENDQVDEIIKNAGIDPERVNGKTKTKVRLYLQQYCKTAYTQQDIDLHTLIFDDKAYEIDHIIPISISLDDSLSNKVLASRLENQQKGNLTPMMAYLKGKFTDGNLERYKLFVNSNKNFNHKKRSNLLDEQDITKEDVARKFINRNLVDTSYACRTVLNTLQHYFKDNEIDTKVHTIRGQSTNIFRKRINLQKDREQDYFHHAIDALIVASLKKMNIVNSYLMHYNYSDLYDEETGEVFDVLPDKQFIDQRYISFISDLKNIYQESNQYNLGYITQEQMHYPLIKVSHKIDTKPNRQIADETIYSTRNIEGQDMLVEKIKNIYDPKEKKAIELVNNIINDDTDKYIMKHKDPQTFEKIKEVVLNHFNDYKDSKEYYVIDKKGKYSLKEESPLTSYYNENGAITKYSKKNNGPAITSMKFYSEKLGNHLAITGNYNTNNKKVILKQISPYRTDFYVSPEGKYKFVTVRYKDVFYKETIHKFVIDENWYHEEKNKKGILEDWKFVCSMHRDELIGLIKPEGKKFVYDASINGGQTQYHDGKHYEILKFTATNNDKANMFEVKPINTICKKQLMPSVGPFIKIQKFATDVLGNMYEVKDNRLKLEFD

SEQ ID NO: 17995 - protein, 1104 aa, unidentified
  REGION 1..1104: note = Cas Enzyme sequence
MSRYVLGLDIGITSVGYGVIDIDNNLFVDYGVRLFKEGTAAENETRRTKRGSRRLKRRKSNRLNDMKNLLKENDLYFEDYRNYNPYEIRAKGLKEKLLPEELCTAIMHITKSRGTTLEALADESQDDEGTKATLSKNAKELNDGKYICEVQLDRLNKDHKVRGTENNFKTEDYVKELKEILKHQDLNEELCDQIIEMVSRRRRYDQGPGSEKSPTPYGSYRMVDGVLKHVNLIDEMRGRCSVYPDEFRAPKQSYTAELFNLLNDLNNLTIKGEKITVEEKEKVVAFVNEKGNITVKQLLKLLDAQEDEVTGFRIDKNEKPLITEFKGYSKVLKVFKKYNQQEVLEDKSIVDQIIDICTKAKGIDERKKDIKELYPQFDDDLIEGLASIKGVSAYHSLSFKAMHMINKEMLTTEMNQMQVLHEIDQYDKNRKSLKGKKNIEPDEKAILSPVAKRAHRETFKVINALRKKYGEFDSIVIEMTRDKNSKEQVKRINDNQKRFKNENDQVDEIIKNVGIDPERVNGKTKMKVRLYLQQDCKTAYTQQDIDLHTLIFDDKAYEIDHIIPISVSLDDSLSNKVLASRLENQQKGNLTPMMAYLKGKFTDGNLEKYKLFVSSNKNFNGKKRNNLLTEQDITKEDVARKFINRNLVDTSYTCRTVLNTLQRYFKDNEIDTKVHTIRGQSTNIFRKRINLQKDREQDYFHHAIDALIVASLKKMNIVNSYLMHYDYSDLYDEETGEVFDVLPDKQFIDQRYISFISDLKNIYQESNQYNLGYITQEQMHYPLIKVSHKIDTKPNRQIADETIYSTRNIEGQDMLVEKIKNIYDPKEKKAIELVNNIINDDTDKYIMKHKDPQTFEKIKEVVLNHFNDYKDSKEYYVIDKKGKYSLKEESPLTSYYNENGTITKYSKKNNGPAITSMKFYSEKLGNHLAITGNYNTNNKKVILKQISPYRTDFYVSPEGKYKFVTVRYKDVFYKETIHKFVIDKNWYHEEKIKKGILEDWKFVCSMHRDELIGLIKPEGKKFVYDASINGGQTQYHDGKHYEILKFTATNDEKKGTFEVKPINTNCSKRLMPSVGPFIKIQKFATDVLGNIYEVKDNRLKLEFD

SEQ ID NO: 17996 - protein, 1104 aa, unidentified
  REGION 1..1104: note = Cas Enzyme sequence
MSGYVLGLDIGITSVGYGVIDIDNNLFVDYGVRLFKEGTAAENETRRTKRGSRRLKRRKSNRLNDMKNLLKEDELYFEDYRNYNPYEVRVKGLKEKLLPEELCTAIMHITKSRGTTLEALADESQDDEGTKATLSKNAKELNDGKYICEVQLDRLNKDHKVRGTENNFKTEDYVKELKEILKHQDLNEELCDQIIEMVSRRRRYDQGPGSEKSPTPYGSYRMVDGVLKYVNLIDEMRGRCSVYPDEFRAPKQSYTAELFNLLNDLNNLTIKGEKITVEEKEKVVAFVNEKGNITVKQLLKLLDAQEDEVTGFRIDKNDKPLITEFKGYSKVLKVFKKYNQQELLEDKLIVDQVIDICTKSKGIDERKKDIKELYPEFDNELIEELASIKGVSAYHSLSFKAMHIINKEMLTTEMNQIQVLHEIDQYDKNRKSLKGKKNIEPDEKAILSPVAKRAHRDTFKVINALRKKYGEFDSIVIEMTRDKNSKEQVKRINDNQKRFKNENDQVDEIIKNVGIDPERVNGKTKMKVRLYLQQDCKTAYTQQDIDLHTLIFDDKAYEIDHIIPISVSLDDSLSNKVLASRLENQQKGNLTPMMAYLKGKFTDGNLEKYKLFVNSNKNFNHKKRSNLLDEQDITKEDVARKFINRNLVDTSYACRTVLNTLQHYFKDNEIDTKIHTIRGQSTNIFRKRINLQKDREQDYFHHAIDALIVASLKKMNIVNSYLMHYDYSDLYDEETGEVFDVLPDKQFIDQRYISFISDLKNIYQESNQYNLGYITQEQIHYPLIKVSHKIDTKPNRQIADETIYSTRNIEGQDMLVEKIKNIYDPKEKKAIELVNNIVNDDTDKYIMKHKDPQTFEKIKEVVLNHFNDYKDSKEYYVIDKKGKYSLKEESPLTSYYNENGAITKYSKKNNGPAITSMKFYSEKLGNHLAITGNYNTNNKKVILKQISPYRTDFYVSPEGKYKFVTVRYKDVFYKETIHKFVIDENWYNEEKVKKGIDSDWKFVCSMHRDELIGVIKKEGQKCVYDASINDGQTQYHDGKHYEILKFTATNNDESGRFEVKPINTNCSKRLMPSVGPFIKIQKFATDVLGNIYEVKDNRLKLEFD

SEQ ID NO: 17997 - protein, 1002 aa, unidentified
  REGION 1..1002: note = Cas Enzyme sequence
MEITINREIGKLGLPRHLVLGMDPGIASCGFALIDTANHEILDLGVRLFDSPTHPKTGQSLAVIRRGFRSTRRNIDRTQARLKHCLQVLKAYGLIPQDATKEYFHTTKGDKQPLKLRVDGLNRLLNDREWALVLYSLCKRRGYIPHGEGNQDKSSEGGKVLSALAANKEAIAETSCRTVGEWLAQQPQSRNRGGNYDKCVTHAQLIEETHILFDAQRSFGSKYASPEFEAAYIEVCDWERSRKDFDRRTYDLVGHCSYFPTEKRAARCTLTSELVSAYGALGNITIIHENGTSRALSATERDECIAILFSCEPIRGNKDCAVKFGALRKALDLSSGDYFKGVPAADEKTREVYKPKGWRVLRNTLNAANPILLQRLRDDRNLADAVMEAVAYSSALPVLQEQLQGLPLSEAEIEALCRLPYSSKALNGYGNRSKKALDMLLDCLEEPEVLNLTQAENDCGLLGLRIAGAQLERSDRLMPYETWIERTGRTNNNPVVIRSMSQMRKVVNAVCRKWGVPNEIHVELDRELRLPQRAKDEIAKANKKNEKNRERIAGQIAELRGCTADEVTGKQIEKYRLWEEQECFDLYTGAKIEVDRLISDDTYTQIDHILPFSRTGENSRNNKVLVLAKSNQDKREQTPYEWMSHDGAPSWDAFERRVQENQKLSRRKKNFLLEKDLDTKEGEFLARSFTDTAYMSREVCAYLADCLLFPDDGAKAHVVPTTGRATAWLRRRWGLNFGSNGEKDRSDDRHHATDACVIAACSRSLVIKTARINQETHWSITRGMNETQRRDAIMKALESVMPWETFANEVRAAHDFVVPTRFVPRKGKGELFEQTVYRYAGVNAQGKDLARKASSDKNIVMGNAVVSADEKSVIKVSEMLCLRLWHDPEAKKGQGAWYADPVYKADIPALKDGTYVPRIAKAATGRKAWKAIPQNVLNSAPLEIYLGDLVQIGNQKGRFRGINIDTVSWSFVDTLSKLPVKMPTIGRLNNETIPTLIRELLI

SEQ ID NO: 17998 - protein, 1003 aa, unidentified
  REGION 1..1003: note = Cas Enzyme sequence
MEITINREIGKLGLPRHLVLGMDPGIASCGFALIDTANHEILDLGVRLFDSPTHPKTGQSLAVIRRGFRSTRRNIDRTQARLKHCLQVLKAYGLIPQDATKEYFHNTKGDKQPLKLRVDGLDRLLNDREWALVLYSLCKRRGYIPHGEGNQDKSSEGGKVLSALAANKEAIAETSCRTVGEWLAQQPQSRNRGGNYDKCVTHAQLIEETHILFDAQRSFGSKYASPEFEAAYIEVCDWERSRKDFDRRTYDLVGHCSYFPTEKRAARCTLTSELVSAYGALGNITIIHENGTSRALSATERDECIAILFSCEPIRGNKDCAVKFGALRKALDLSSGDYFKGVPAADEKTREVYKPKGWRVLRNTLNAANPILLQRLRDDRNLADAVMEAVAYSSALPVLQEQLQGLPLSEAEIEALCRLPYSSKALNGYGNRSKKALDMLLDCLEEPEVLNLTQAENDCGLLGLRIAGAQLERSDRLMPYETWIERTGRTNNNPVVIRAMSQMRKVVNAICRKWGVPNEIHVELDRELRLPQRAKDEIAKANKKNEKNRERIAGQIAELRGCTADEVTGKQIEKYRLWEEQECFDLYTGAKIEVDRLISDDTYTQIDHILPFSRTGENSRNNKVLVLAKSNQDKREQTPYEWMSHDGAPSWDAFERRVQENQKLSRRKKNFLLEKDLDTKEGEFLARSFTDTAYMSREVCAYLADCLLFPDDGAKAHVVPTTGRATAWLRRRWGLNFGSNGEKDRSDDRHHATDACVIAACSRSLVIKTARINQETHWSITRGMDETQRRDAIMKALESVMPWETFANEVRAAHDFVVPTRFVPRKGKGELFEQTVYHYAGVNAQGKDIARKASSDKDIVMGNAVVSADEKSVIKVSEMLCLRLWHDPEAKKGQGAWYADPVYKADIPALKDGTYVPRIAKAHTGRKAWKPVPESAMKKPPLEIYLGDLVQIGDFVGRFSGYNIDNANWSFVDRLTRIKISCPTVGKLSNDMSPFVVRESPIK

SEQ ID NO: 17999 - protein, 1003 aa, unidentified
  REGION 1..1003: note = Cas Enzyme sequence
MEITINREIGKLGLPRHLVLGMDPGIASCGFALIDTANHEILDLGVRLFDSPTHPKTGQSLAVIRRGFRSTRRNIDRTQARLKHCLQILKAYGLIPQDATKEYFHTTKGDKQPLKLRVDGLDRLLNDREWALVLYSLCKRRGYTPHGEGNQDKSSEGGKVLSALAANKEAIAETSCRTVGEWLAQQPQSRNRGGNYDKCVTHAQLIEETHILFDAQRSFGSKYASPEFEAAYIEVCDWERSRKDFDRRTYDLVGHCSYFPTEKRAARCTLTSELVSAYGALGNITIIHENGTSRALSATERDECIAILFSCEPIRGNKDCAVKFGALRKALDLSSGDYFKGVPAADEKTREVYKPKGWRVLRNTLNTANPILLQRLRDDRNLADAVMEAVAYSSALPVLQEQLQGLPLSEAEIEALCRLPYSSKALNGYGNRSKKALDLLLDCLEEPEVLNLTQAENDCGLLGLRIAGAQLERSDRLMPYETWIERTGRTNNNPVVIRAMSQMRKVVNAICRKWGVPNEIHVELDRELRLPQRAKDEIAKANKKNEKNRERIAGQIAELRGCTADEVTGKQIEKYRLWEEQECFDLYTGAKIEVDRLISDDTYTQIDHILPFSRTGENSRNNKVLVLAKSNQDKREQTPYEWMSHDGAPSWDAFERRVQENQKLSRRKKNFLLEKDLDSKEGEFLARSFTDTAYMSREVCAYLADCLLFPDDGAKAHVVPTTGRATAWLRRRWGLNFGSNGEKDRSDDRHHATDACVIAACSRSLVIKTARINQETHWSITRGMNETQRRDAIMKALESVMPWETFANEVRAAHDFVVPTRFVPRKGKGELFEQTVYRYAGVNAQGKDIARKASSDKDIVMGNAVVSADEKSVIKVSEMLCLRLWHDPEAKKGQGAWYADPVYKADIPALKDGTYVPRIAKAHTGRKAWKPVPESAMKKPPLEIYLGDLVQIGDFVGRFSGFDINGANWSFSDRLTKKKLRSPTVNKLGNDPLPLIIRESPVR

SEQ ID NO: 18000 - protein, 1003 aa, unidentified
  REGION 1..1003: note = Cas Enzyme sequence
MEITINREIGKLGLPRHLVLGMDPGIASCGFALIDTANHEILDLGVRLFDSPTHPKTGQSLAVIRRGFRSTRRNIDRTQARLKHCLHILKAYGLIPQDATKEYFHTTKGDKQPLKLRVDGLDRLLNDREWALVLYSLCKRRGYIPHGEGNQDKSSEGGKVLSALAANKEAIAETSCRTVGEWLAQQPQSRNRGGNYDKCVTHAQLIEETHILFDAQRSFGSKYASPEFEAAYIEVCDWERSRKDFDRRTYDLVGHCSYFPTEKRAARCTLTSELVSAYGALGNITIIHENGTSRALSATERDECIAILFSCEPIRGNKDCAVKFGALRKALDLSSGDYFKGVPAADEKTREVYKPKGWRVLRNTLNAANPILLQRLRDDRNLADAVMEAVAYSSALPVLQEQLQGLPLSEAEIEALCRLPYSSKALNGYGNRSKKALDMLLDCLEEPEVLNLTQAENDCGLLGLRIAGAQLERSDRLMPYETWIERTGRTNNNPVVIRAMSQMRKVVNAICRKWGVPNEIHVELDRELRLPQRAKDEIAKTNKKNEKNRERIAGQIAELRGCTADEVTGKQIEKYRLWEEQECFDLYTGAKIEVDRLISDDTYTQIDHILPFSRTGENSRNNKVLVLAKSNQDKREQTPYEWMSHDGAPSWDAFERRVQENQKISRRKKNFLLEKDLDTKEGEFLARSFTDTAYMSREVCAYLADCLLFPDDGAKAHVVPTTGRATAWLRRRWGLNFGSNGEKDRSDDRHHATDACVIAACSRSLVIKTARINQETHWSITRGMNETQRRDAIMKALESVMPWETFANEVRAAHDFVVPTRFVPRKGKGELFEQTVYRYAGVNAQGKDIARKASSDKDIVMGNAVVSADEKSVIKVSEMLCLRLWHDPEAKKGQGAWYADPVYKADIPALKDGTYVPRIAKAHTGRKAWKPVPESAMKKPPLEIYLGDLVQIGDFVGRFSGYNIDNANWSFVDRLTRIKISCPTVGKLSNDMSPFVVRESPIK

SEQ ID NO: 18001 - protein, 1002 aa, unidentified
  REGION 1..1002: note = Cas Enzyme sequence
MEITINREIGKLGLPRHLVLGMDPGIASCGFALIDTANHEILDLGVRLFDSPTHPKTGQSLAVIRRGFRSTRRNIDRTQARLKHCLQILKAYGLIPQDATKEYFHTTKGDKQPLKLRVDGLDRLLNDREWALVLYSLCKRRGYIPHGEGNQDKSSEGGKVLSALAANKEAIAETSCRTVGEWLAQQPQSRNRGGNYDKCVTHAQLIEETHILFDAQRSFGSKYASPEFEAAYIEVCDWERSRKDFDRRTYDLVGHCSYFPTEKRAARCTLTSELVSAYGALGNITIIHENGTSRALSATERDECIAILFSCEPIRGNKDCAVKFGALRKALDLSSGDYFKGVPAADEKTREVYKPKGWRVLRNTLNATNPILLQRLRDDRNLADAVMEAVAYSSALPVLQEQLQGLPLSEAEIEALCRLPYSSKALNGYGNRSKKALDMLLDCLEEPEVLNLTQAENDCGLLGLRIAGAQLERSDRLMPYETWIERTGRTNNNPVVIRAMSQMRKVVNAICRKWGVPNEIHVELDRELRLPQRAKDEIAKANKKNEKNRERIAGQIAELRGCTADEVTGKQIEKYRLWEEQECFDLYTGAKIEVDRLISDDTYTQIDHILPFSRTGENSRNNKVLVLAKSNQDKREQTPYEWMSHDGAPSWDAFERRVQENQKLSRRKKNFLLEKDLDTKEGEFLARSFTDTAYMSREVCAYLADCLLFPDDGAKAHVVPTTGRATAWLRRRWGLNFGSNGEKDRSDDRHHATDACVIAACSRSLVIKTARINQEAHWSITRGMNETQRRDAIMKALESVMPWETFANEVRAAHDFVVPTRFVPRKGKGELFEQTVYRYAGVNAQGKDIARKASSDKDIVMGNAVVSADEKSVIKVSEMLCLRLWHDPEAKKGQGAWYADPVYKADIPALKDGTYVPRIAKAATGRKAWKAIPQNVLNSAPLEIYLGDLVQIGNQKGRFRGINIDTVSWSFVDTLSKLPVKMPTIGRLNNETIPTVIRELLI

SEQ ID NO: 18002 - protein, 1003 aa, unidentified
  REGION 1..1003: note = Cas Enzyme sequence
MEITINREIEKLGLPRHLVLGMDPGIASCGFALIDTANHEILDLGVRLFDSPTHPKTGQSLAVIRRGFRSTRRNIDRTQARLKHCLQILKAYGLIPQDATKEYFHTTKGDKQPLKLRVDGLDRLLNDREWALVLYSLCKRRGYIPHGEGNQDKSSEGGKVLSALAANKEAIAETSCRTVGQWLAQQPQSRNRGGNYDKCVTHAQLIEETHILFDAQRSFGSKYASPEFEAAYIEVCDWERSRKDFDRRTYDLVGHCSYFPTEKRAARCTLTSELVSAYGALGNITIIHENGTSRALSATERDECIAILFSCEPIRGNKDCAVKFGALRKALDLSSGDYFKGVPAADEKTREVYKPKGWRVLRNTLNATNPILLQRLRDDRNLADAVMEAVAYSSALPVLQEQLQGLPLSEAEIEALCRLPYSSKALNGYGNRSKKALDMLLDCLEEPEVLNLTQAENDCGLLGLRIAGAQLERSDRLMPYETWIERTGRTNNNPVVIRAMSQMRKVVNAICRKWGVPNEIHVELDRELRLPQRAKDEIAKANKKNEKNRERIAGQIAELRGCTADEVTGKQIEKYRLWEEQECFDLYTGAKIEVDRLISDDTYTQIDHILPFSRTGENSRNNKVLVLAKSNQDKREQTPYEWMSHDGAPSWDAFERRVQENQKLSRRKKNFLLEKDLDTKEGEFLARSFTDTAYMSREVCAYLADCLLFPDDGAKAHVVPTTGRATAWLRRRWGLNFGSNGEKDRSDDRHHATDACVIAACSRSLVIKTARINQETHWSITRGMNETQRRDAIMKALESVMPWETFANEVRAAHDFVVPTRFVPRKGKGELFEQTVYRYAGVNAQGKDIARKASSDKDIVMGNAVVSADEKSVIKVSEMLCLRLWHDPEAKKGQGAWYADPVYKADIPALKDGTYVPRIAKAHTGRKAWKPVPESAMKKPPLEIYLGDLVQIGDFVGRFSGYNIDNANWSFVDRLTRIKISCPTVGKLSNDMSPFVVRESPIK

SEQ ID NO: 18003 - protein, 1003 aa, unidentified
  REGION 1..1003: note = Cas Enzyme sequence
MEITINREIGKLGLPRHLMLGMDPGIASCGFALIDTANHEILDLGVRLFDSPTHPKTGQSLAVIRRGFRSTRRNIDRTQARLKHCLQILKAYGLIPQDATKEYFHTTKGDKQPLKLRVDGLDHLLNDREWALVLYSLCKRRGYIPHGEGNQDKSSEGGKVLSALAANKEAIAETSCRTVGEWLAQQPQSRNRGGNYDKCVTHAQLIEETHILFDAQRSFGSKYASPEFEAAYIEVCDWERSRKDFDRRTYDLVGHCSYFPTEKRAARCTLTSELVSAYGALGNITIIHENGTSRALSATERDECIAILFSCEPIRGNEDCAVKFGALRKALDLSSGDYFKGVPAADEKTREVYKPKGWRVLRNTLNATNPILLQRLRDDRNLADAVMEAVAYSSALPVLQEQLQGLPLSEAEIEALCRLPYSSKALNGYGNRSKKALDMLLDCLEEPEVLNLTQAENDCGLLGLRIAGAQLERSDRLMPYETWIERTGRTNNNPVVIRAMSQMRKVVNAICRKWGVPNEIHVELDRELRLPQRAKDEIAKANKKNEKNRERIAGQIAELRGCTADEVTGKQIEKYRLWEEQECFDLYTGAKIEVDRLISDDTYTQIDHILPFSRTGENSRNNKVLVLAKSNQDKREQTPYEWMSHDGAPSWDAFERRVQENQKLSRRKKNFLLEKDLDTKEGEFLARSFTDTAYMSREVCAYLADCLLFPDDGAKAHVVPTTGRATAWLRRRWGLNFGSNGEKDRSDDRHHATDACVIAACSRSLVIKTARINQETHRSITRGMNETQRRDAIMKALESVMPWETFANEVRAAHDFVVPTRFVPRKGKGELFEQTVYRYAGVNAQGKDIARKASSDKDIVMGNAVVSADEKSVIKVSEMLCLRLWHDPEAKKGKGAWYADPVYKADIPALKDGTYVPRIAKAHTGRKAWKPVPGSAMKKPPLEIYLGDLVQIGDFVGRFSGYNIDNANWSFVDRLTRIKISCPTVGKLSNDMSPFVVRESPIK

SEQ ID NO: 18004 - protein, 1017 aa, unidentified
  REGION 1..1017: note = Cas Enzyme sequence
MVLFSRVLIREGCSMEITINREIGKLGLPRHLVLGMDPGIASCGFALIDTANHEILDLGVRLFDSPTHPKTGQSLAVIRRGFRSTRRNIDRTQARLKHCLQILKAYGLIPQDATKEYFHTTKGDKQPLKLRVDGLDRLLNDREWALVLYSLCKRRGYIPHGEGNQDKSSEGGKVLSALAANKEAIAETSCRTVGEWLAQQPQSRNRGGNYDKCVTHAQLIEETHILFDAQRSFGSKYASPEFEAAYIEVCDWERSRKDFDRRTYDIVGHCSYFPTEKRAARCTLTSELVSAYGALGNITIIHENGTSRALTATERDECIAILFSCEPIRGNKDCAVKFGALRKALDLSSGDYFKGVPAADEKTREVYKPKGWRVLRNTLNATNPILLQRLRDDRNLADAVMEAVAYSSALPVLQEQLQGLPLSEAEIEALCRLPYSSKALNGYGNRSKKALDMLLDCLEEPEVLNLTQAENDCGLLGLRIAGAQLERSDRLMPYETWIERTGRTNNNPVVIRAMSQMRKVVNAICRKWGVPNEIHVELDRELRLPQRAKDEIAKANKKNEKNRERIAGQIAELRGCTADEVTGKQIEKYRLWEEQECFDLYTGAKIEVDRLISDDTYTQIDHILPFSRTGENSRNNKVLVLAKSNQDKREQTPYEWMSHDGAPSWDAFERRVQENQKLSRRKKNFLLEKDLDTKEGEFLARSFTDTAYMSREVCAYLADCLLFPDDGAKAHVVPTTGRATAWLRRRWGLNFGSNGEKDRSDDRHHATDACVIAACSRSLVIKTARINQETHWSITRGMNETQRRDAIMKALESVMPWETFANEVRAAHDFVVPTRFVPRKGRGELFEQTVYRYAGVNAQGKDIARKASSDKDIVMGNAVVSADEKSVIKVSEMLCLRLWHDPEAKKGQGAWYADPVYKADIPALKDGTYVPRIAKAHTGRKAWKPVPESAMKKPPLEIYLGDLVQIGDFVGRFSGYNIDNANWSFVDRLTRIKISCPTVGKLSNDMSPFVVRESPIK

SEQ ID NO: 18005 - protein, 1027 aa, unidentified
  REGION 1..1027: note = Cas Enzyme sequence
MSKSDRGLVFGVDLGKASCGLAIIDYEAKEVKLLSSRIIKAPENRSGKSLAAVRREKRSIRRQIDRRAARKKNVLKVLKQFGVTPQDSDCTWFETKKNGNGGIDLPVIALRSQGLDRQLSDREWARILYWFCSQRGYINRGEETLINGETSIEGTSESEEAGKVLSAISENRKVLRESGYRTFGEYLYKESYVTTHSYRNKAGDYKHCVSHPMVVDEIKELFEQQKKFGNTHTSEEFKDAYLEQLNWLKDTKAFDKLTYKKVGYCVYFDQYSDEPQKRAANADLISEVVKAYEKLGNIRLKFDDKPEQSLTREVRDAVINEMFSVHRGAKVKSVTYKTLRKLIDDDNLVGFKGVKSDLEKNPVFVPKAWNTFCRVLSGSESGIQLLNRMKSDFKFANAIAESLTYASSLDSLERRISMYQEKEDLVISEDELALIESLPYNTKIFKGYGSRSIQALEMLHDQFLDGEAFTLDEAEKQSGLQGFRLREKGIRQSLLPPYSDYDVQCTNPVVLRVLAQARKMINSAIKQYGMPNIIRIELGNDIAKSAKEKSKIAKGQNENRKENERIKDIVAELLHIDQSEVTGKQITKMKLYEEQGGKDIYTGEGLGDIAFAGGRRFLIDDNYCEIDHVLPYSRSADDLKSNKVLVLAKSNQEKGNRTPYEWMNSNDGSHPNWEQFCLRVSSNVRLSDGKKSKLLEEKFAEKEASFIKRNIVDTQYMARAISAWLSDSLNFSSEFDQKQHVYAVNGRMTAKLRRKWGLNFGEDDTKDRSDNRHHAIDAAVIAACSASMVKEFAISYSRLREVRDSVIAEPWEGFADQVREAREWVIPTMYRPNKKNGLIYEDTKYKYLGKEVSDKKIVHILKGKKQGVGTVDLFRDPTGGQFARILGDRAYIRLWLDEEGKSGRGEWLIEPVYFADLDKIKRGSYVPRYIPRQKITTQEWEPIPSRITENSIPVVLRNDDIVRIDGIYGRLSGLNINSKRLIFDRILSKDVKTIGSWTKDTSVEVIHEDCLGLMWFNLLKNQNSKES

SEQ ID NO: 18006 - protein, 1031 aa, unidentified
  REGION 1..1031: note = Cas Enzyme sequence
MSKSDRGLVFGVDLGKSGNGLAGIDYENKEIKFLSSRCFKAPEDRTGKSLAKVRREARSIRRQLNRKSIRKKQIIKVLKQFGVIAQECDSRWFETKKNGNGGIDLPIIILRSQGLDRQLTNREWARVLYWFCSQRGYINRGEEVLSNGEALVEDSSESDESGKVLSAISDNRKALKKSGYRTFGEYLYKESYATTRSYRNKNGEYRHCVSHPMVVDEINELFKQQQKLGNTYTSEEFRDAYLEQLNWLKDTIAFDRLTYQKVGYCVYFDQYSDEPQKRAANADLISEVVKAYEKLGNIRLKFGDKSEQNLTKEVRDAVINEMFSIHQGSRVKSVTYKTLRKLIDNENLIEFKGIKSDLEKNSVFVPKAWNIYCKVLSVSGSGLQLLNRMKSDFKFANAISESLTYATSLESLESRILMYQDEESLEISEEELTLIESLPYNSKIFKGYGSRSIEALEMLYDQFTEGNAFTLDEAEKQSGLQDFRLRDKGIRQRLLPPYSDYDPQCTNPVVLRALSQARKMINSGIKQFGMPDIIRVELGKELTKSPKQREKIAKEQNKNRKENERIREEISKFLEIDSSCVTKKQILKKKLYEEQKGLDVYTGESLGPSLYADDLTYLKDDSYCQIDHILPYSRSADDSIANKVLVLAKSNQDKGNRTPYEWMTSGHGHHLSWEEFSIRVSTNLSFPDSKKWRLLEEDFDKKEVQFMNRNLVDTQYMSKAIVAWLSDSLDFPSRYGQKQHVYATNGRMTSKLRKEWGLNFGENGIKDRNDKRHHAVDAVAIAACSASMVKEFATSYSKLRETKNATLAEPWEGFADQVREAREWVIPTMYRPNKKNGLLFEDRRYRYARKTNKHVLIGKEGKEKTSGNIRFFDNEKDGKHVKIIGDVAYIRLWLDANAREGKGEWLIEPVYFADLRAIKNGTYIPKYIATYNATNEEWKPVPNDVLSKNNPLVVHRQDVIKVESSFFRVNSVDIAKKTLELAPVFYDSKYSNPELMVTRKWNKSTRIELVSEDALGMVWFNFLKNQNSSES

SEQ ID NO: 18007 - protein, 1012 aa, unidentified
  REGION 1..1012: note = Cas Enzyme sequence
NGLAGIDYENKEIKFLSSRCFKAPEDRTGKSLAKVRREARSIRRQLNRKSIRKKQIIKVLKQFGVIAHECDSRWFETKKNGNGGIDLPIIILRSQGLDRQLTNREWARVLYWFCSQRGYINRGEEVLSNGEALVEDSSESDEAGKVLSAISDNRKALKKSGYRTFGEYLYKESYATTRSYRNKNGEYRHCVSHPMVVDEINELFKQQQKLGNTYTSEEFRDAYLEQLNWLKDTIAFDRLTYQKVGYCVYFDQYSDEPQKRAANADLISEAVKAYEKLGNIRLKFDDKSEQNLTKEVRDAVINEMFSIHQGSRVKSVTYKTLRKLIDNENLIEFKGIKSDLEKNPVFVPKAWNIYCRVLSVSESGLQLLNRMKSDFKFANAISESLTYATSLESLESRILMYQDEESLEISEEELTLIESLPYNSKIFKGYGSRSIEALEMLYDQFTEGNAFTLDEAEKQSGLQGFRLRDKGIRQRLLPPYSDYDPQCTNPVVLRALSQARKMINSGIKQFGMPNIIRVELGKELTKSPKQREKIAKEQNKNRKENERIREEISIVLEIDSSCVTKKQILKKKLYEEQKGLDVYTGESLGPSLYADDLTYLKDDSYCQIDHILPYSRSADDSIANKVLVLAKSNQDKGNRTPCEWMTSGHGHHLSWEEFSIRVSTNLSFPDSKKWRLLEEDFDKKEVQFMNRNLVDTQYMSKAIVAWLSDSLDFPSRYGQKQHVYATNGRMTSKLRKEWGLNFGENGIKDRNDKRHHAVDAVAIAACSASMVKEFATSYSRLRETKNATLAEPWEGFADQVREAREWVIPTMYRPNKKNGLLFEDKRYRYVGKKKKHILIGKEGKEKSSGNIRFFENEKDGKHVKIVGNIAYIRLWLDESARKGKGEWLIEPVYFADLQSIKNSTYVPKYISAAHVTSDEWRKIPNHLLVSSNPIIIHLQDVIKVDSVFFRVEGVNIDNKSLDLKVLHSDKQGDSGEERISKWHKETQISVFEEDVLGRNWFEKLKNQNSSES

SEQ ID NO: 18008 - protein, 1071 aa, unidentified
  REGION 1..1071: note = Cas Enzyme sequence
VAKYILGLDMGITSVGWGLIDYDSGKIVDKGVRLFKEATAEDNLKRRTHRGSRRLKRRRQQRIIELKRLLKKENILTDDYTPLNNVYYLRCKGLNEKLTNAELVSVLLHIAKIRGSSLEVVEDDEKKANEDKSSKANLSVNETKLRISKEEICEKQYKDLIENGKVRGINNIYKSSSYESELKKILANQGLSKEVNDKIINIIFRRRDFNEGPGSMESPTIYGRFIPHENGEIEIIPSMIEKMQGKCSIYQNEPRAAKMSFTADLFNFLNDLNNLEIQRADNYDNYITPDEKKLIINEYIIKKGKITIQKLCDVLQVKKENITGFRVNKGEPILTEFKGYQKVLKALNRIIDTEIVDAVIDVLTKYKDVEKRKEEIKKINNAEFSEEDIVKLSEITGIQQYHSLSYKAMKVIIPELYENPENQMEVITRLNLVKTSIDDLKGRTTIPSYSDRIYSPVAKRVHNETIKVVNAVIKKYGDLDSIVIEMARDRNTAEERKNIEQAQKRNQENREKAKEILDVNYSFSKLDSKLVQKIMLYNQQDGKSMYSGKPINLNVLISDPNAYEIDHIIPLSISLDDSIANKVLVYRSENQQKLNNTPLQYLRSGNSNGWSVDEFREVVIKMYNDKKISLKKLQNLLCEKDITKQDVRKEFIERNLVDTRYASRVVLGLLKDYFKANNKNTKVFTIRGQITSQFRKSRNLVKSRDCFYHHIVDALIIAYFRKFNYINELMQYNFSYKVKIDEETGELIQYNDTLFSTKDDDFTIQLRKLNDLNKYSEDIKISHKVDRKPNRQFSDETIYSARKINNDYMKISKYKDIYGEEGKKFAKVIKDNLQKEKDLDKFLMKKVDPETFNLLVSIVINTTCGEKENPFVKYCEENNIDFIRKKSKNGNGPIIRSIRYYDGKVNSHLDISQKYVNLSDDKKVVLLQISPYRTDFYLTKEGNYKFLTIKYANIKENHNGYYIPKDVYESLKKSKKINDSDEFLFSLYRNDYLRITTNDPTENAPMIYRFVGTNNDLENKVEVKPIYCDKNEENRIMKTIGKKVTKIEKFDVDVLGNKIAKKRDKCLQLEL

SEQ ID NO: 18009 - protein, 1071 aa, unidentified
  REGION 1..1071: note = Cas Enzyme sequence
VAKYILGLDMGITSVGWGLIDYDSGKIVDKGVRLFKEATAEDNLNRRTHRGSRRLKRRRQQRIIELKRLLKKENILTDDYTPLNNVYYLRCKGLNEKLTNAELVSVLLHIAKIRGSSLEVVEDDEKKANEDKSSKANLSANEVKLRTSKEEICEKQYKDLIENGKVRGINNIYKSSSYESELKKILANQGLSKEVNDKIINIIFRRRDFNEGPGSMESPTIYGRFIPHENGEVEVIHSMIEKMQGKCSIYQNEPRAAKMSFTADLFNFLNDLNNLEIQRADNYDNYITPDEKKLIINEYIIKKGKITIQKLCDVLQVKKENITGFRVNKGEPILTEFKGYQKVLKALNRIIDTEIVDAVIDVLTMHKDVEKRKEEIKKINNTEFSEEDIVKLSEITGIQQYHSLSYKAMKVIIPELYENPENQMEVITRLNLVKTSIDDLKGRTTIPSYSNRIYSPVAKRVHNETIKVINAVIKKYGDLDSIVIEMARDRNTAEERKNIEQAQKRNQENREKAKEILNVNYSFSKLDSKLVQKIMLYNQQDGKSMYSGKPINLNVLISDPNAYEIDHIIPLSISLDDSIANKVLVYRSENQQKLNKTPLQYLRSGNSNGWSVDEFREVVIKMYNDKKISLKKLQNLLCEKDITKQDVRKEFIERNLVDTRYASRVVLGLLKDYFKANNKNTKVFTIRGQITSQFRKSRNLVKSRDCFYHHIVDALIIAYFRKFNYINELMQYNFNYKGKIDEETGELIQYNDTLFSTKDDDFTIQLRKLNDLNKYSEDIKISHKVDRKPNRKFSDETIYSAIKIGNDYMKISKYKDIYGEEGKKFAKKIKDNLQKENELDIFLMKKVDPETFNLLVSIVKNTICGEKENPFVKYCEENNIDFIRKKSKNGNGPIIRSIRYYDGKVNSYQDISQKYSNLSDDKKVVRLHISPYRTDFYLTKEGNYKFLTIKYANIKENHNGYYIPKEVYETLKKSKKINDSDEFLFSLYRNDYLRITTNDPTENAPMIYRFVGTKKDLNNVIEVKPIYCDKIDKPQIEKTIGKKVTKIEKFDVDVLGNKIAKKRDKCLQLEL

SEQ ID NO: 18010 - protein, 1211 aa, unidentified
  REGION 1..1211: note = Cas Enzyme sequence
MSKNMKANVSRILGLDLGIGSIGWAVIDSDNHRIDDLGVRTFSSGEENASKSADRASQKRRVKRSIRRQIRRRRLRKFELKNLLQEIGLISVDKINIAYRTPGFNPDVFSLRSKALESKLQPIEIAAILINFANYRGYLDFYENDELMRNGTIKEAMNAVQEIFEAPENAGKWSTIGQMIFEHPSFRNDNNKISFRNRKKPSEKDPTKKETNYKYLIPRRLLIDETRLILSKQGGYHDVLTNDQIDRIVHLIFRQRAFEDGPGPNKKDSSERRSAMLAASKGQQKYSGFDELVGACPFYPEETRGTKNSQLYDMYVLINNLSQFSFLKGNDTVTFPADLLEDTRKALFENNGELTLKEFRKLCDKSGITVVIKDAKKTKVTVSPFIKFICDESFFSKEDRDAFFKEDYINASTLSHQIGLVLTRFITPSKRKEALIQLLEERGFLSIHNAELIKSKKFAGAAGVSDHYMKEAILAFKEGIKYGDFQAEFLSDQPKSDYAWCRLSSKGSIRPIGDSDLVRNPVVYRSINEARKQINAIRRQYPGIKQINIELAREIGKSFESRKDSREKQLNKQKYNESLINELTIKLSDSGYDIGLSDKLFMKYRLWKEQNGVCLYSGKEISFLMLLNNATQIDHIIPQSIVLDETINNKALVISEENQRKGNRIPLEYMDLNQAELFINRVSNLHRKGRISDKKNDYLRLKKLDDDIVSGFVDRNINDARYISKYVANLLRTAFSSGNEKINVNVLNGSITSRFRRYWLGGKYSNQNPSVYGLDDKGRDLHYYHHAIDAVIIANLTRKNIEIAQDYIKLEDMRKEYRRFLKEDKASSAEKKGIEIELELQNSIDKLCKHYHMSKNEAHELLTQGAVPSIISDLRKEVEVRIPLNIDFNDKGYCRYEKLNRDLTRLLVLANEELTLSDENGKIIINADLVQQINKKISEVDPEIAAVTETGDVIFSDGEKERITLKKYISKRKTKDLFSFINGISMYSEKQYKQRVVEFYQNDEFASKVKLPYVSFKVDRKFRSNITYRENPVELSATGFSTYLELEKDIRENIKSPYYVWVNKGIGENSNFTIYDARSYFCLEVYTDAAQNYGARGIRYIDIYKRNGKLFLKKSLPEGYHHVIYIFKNEYIRAYDPKGKLRNNGFGSYRGVENINHCTVKMRLFSNANLSGRDTYIPIAGPVEKIEMSILGHIMGKVKCGDQSLFMTEKS

SEQ ID NO: 18011 - protein, 1345 aa, unidentified
  REGION 1..1345: note = Cas Enzyme sequence
VAKKVFGDYYLGLDIGTNSVGWAVTDPQYNVLRFNGKAMWGVHLFKEGNSAAERRTHRCARRRLQRRKQRIELLQDLMDSEVSSVDPGFFARLKESNLHLKDRKVDQINSIFNDPAFKDKDYHDRFPTIYHLRKYLMETKEKPDIRLVYLALHHILKYRGHFLFEGLSEGALPDFEPVFKDLMEKASSELDIDFEVHENIDSIKGLLVDKDIRVLERKRKMRELLSAESKRQNAFADLLSGAKIDLSTLFSECDTNESEEYPKISFGDASLEENTSSLENILSEGQMSTLLLMKTIYDWGILSKLLDGEKFISDSMVKKYNLHKKDLYLLKTILKDYGYNNSNDYSLYREVLKSDSEPNNYCAYSGMIKQTKDPSNVKKFCNQEAFCDYLKKKLKDIINFEICDATKDMWRRIEDKTFMPLQRSNSNSVIPNSLHRSELERIIENMSVHYQFFNEKDKNGISIGEKISKLCTFRIPYYVGPLSQISDRSWAIHKESGRVTPLNFDDKIDIDRSSEMFIEKLVSRCTYLVGETVLPKSSLLYQRFKLYNELNNIRVNGERIECSLKKELIDELFVKRQTPVTRKKIRDFIVSRTGDDAVEITGIDDKVASSLKSEAQLRVILGKEFDDRSFVEELIRVSTIFGDDVKRLNSKIKKEYSGRLTKSQVSEVSRLRFRDWGNLSEKFLTGIYSTLHDGREVNIITALETTNLNLMELLSDKYGFRREIDKFNESKTGTSYDRITYNVVKELYCSPAVKHSIWRTLSIIKEIVKITGHNPTKVFIETTREARDDGRKDSRLDDLQKKYKEMEDKGSYQEILSILDSLENEPSKLRSKRLFAYLNQRGRCMYCDAPIDLNDLEDHNVCDIDHIIPQSVKKDDSINNTVLVCRSCNMDKSDIYPIKPHIQDKMKGIWKDLVKCKLMSDEKYKRLTRVEPLSEDEKCSFIARQLVETSQTTKAVAEVMKKVFAKGTDIVYVKANNVSDFRSIYKDRGFYTKSRNVNDYHHAKDAYLNIVVGNTYDVKFTKNPLHVISKEHYNMGKMFEKDVSRNGVVAWVSGEEGTIRTIDKYIRRDNVIYTRSPYKVTGQLYDLNIMRKGEGQHPIKTGLDVNDYGGYNKVSGSFFSLVEHTLKKKRVRSLEAVPIMDAGEMESAQASKIYFENRGLIDPDVRIACIKIDSLFEFRGTSVTLSGRSGNSVVYYNAEQLILSNEMYNYCKSLYKYEEGRSKKSNYSLESYGISRELNIKLYLEIGAKVNKLFSNAPTFELLCDIFNGNKFESLDLGAQTNGLIGLLRILHCAPSSVDIKPLGGNSSQFGKIKINKVLKMEDTPHLICRSATGLFERKIDLMRI

SEQ ID NO: 18012 - protein, 938 aa, unidentified
  REGION 1..938: note = Cas Enzyme sequence
LNLKEKRQVVSHLLHNEKLSERDLLKILGLKKDDGFAVDKNVAKGIKGSDTYVQLRNALGDYPKALELLRFEVHIETDNVVDPETGEVTEVLHISDSYLREPLYQLWHTVYSINDKDELAHALRHKFGITDGDVLSRMFNIDFSGKGYGNKSSKFMCRILPYLMDGYHYSEACEYVGVNHSDSITKEENEARELASSLQLLKRGELRQPVVEKILNQMVHQVNAILEAYGPIDEIHIEMARTLKQSKEKRAADNLRINAREKENSIIASRIQDEYKLRPSRNRIQKYRMWLESEHCCMYCGKPIGVNEFLAGTEVEKEHVIPRSLFFDDSFSNKVCACRECNRQKGQMTGYDFMACKGQSALDTYIDRVERLYDAYKKTKGVSGISKTKHDRLLTPYEDIPTEFLNRDLVQTQYIARKAIGMLKTVCRNVYSSTGSVTDFFRHAWGYDEILHDLNLPAYKEGGQTEIVEVRHKGQTHQEERITGWTKRWDHRHHAIDALVIALVSQAHIQRLNNLNTLKDTEGSGAYERQARNLDRWAESQPHFSYADTSTVVSGIAVSFKSGKKATTPGKRVVYKKGKRVVAQEGLLIPRGALTEGYVYGIVRVLNPKRKLKEIFSNPSLIVDKMIRESVNERLVRFDQDVKRAVASCKKEPLGKDKDGNPVSEFDCWELRVVKRYGIETVQCKNIAKVVDPHIRNLISDRYETLRLTLGNPADGKLVKAYQESLTTDPLYSDEAKHHKIVTVRMFADINQDNMMVVQRNADGKGIGFSKLGSNHHIALYRTPDGDIEECVVPFAHAVMRKNLGIPVIIQDPDTAWTLIDNLKEDVDESLLMNIPLPGWKFLFSMQQNEMFLIGLSEDEVKDMNKMQLSNHLYRAQALSSKYYIFKRHTCSLSDKGPEMLANKQCINIRSFGIIQEREIWKVRIDRLGNSIILPTYD

SEQ ID NO: 18013 - protein, 1265 aa, unidentified
  REGION 1..1265: note = Cas Enzyme sequence
MKRILGLDLGVASIGWAVIDLPIDGEADAMRICGLGSRIMPLTNDEETGFRKGNSETVCKSRTLKRGYRRGLDRYQQRRKMLGQILAGVNMTFDKSLKNLPPVDLWGLRAKAATGERLTLPEIGRVIYHINQRRGYKHSKSDVAGDDKKQSDYLSSIKSRDDEARENNQTPGQYFYQRLVESVYETSKGGAACTYRVKNQVFPRKAYEEELKQILMTQGKHYPDVLTNEVQETIFNYVFYQRPLKSCKHLVSLCEFESREIVDEKTGRVILKGPKVAPVSSPLFQLCRIWEVVNNIELHNPKNRRKKDKGPINSSFADDRKYEPTFYLNLKEKRQVVSHLLHNEKLSERDLLKILGLKKDDGFAVDKNVAKGIKGSDTYVQLRNALGDYPKALELLRFEVHIETDNVVDPETGEVTEVLHISDSYLREPLYQLWHTVYSINDKDELAHALRHKFGITDGDVLSRMFNIDFSGKGYGNKSSKFMCRILPYLMDGYHYSEACEYVGVNHSDSITKEENEARELASSLQLLKRGELRQPVVEKILNQMVHQVNAILEAYGPIDEIHIEMARTLKQSKEKRAADNLRINAREKENSIIASRIQDEYKLRPSRNRIQKYRMWLESEHCCMYCGKPIGVNEFLAGTEVEKEHVIPRSLFFDDSFSNKVCACRECNRQKGQMTGYDFMACKGQSALDTYIDRVERLYDAYKKTKGVSGISKTKHDRLLTPYEDIPTEFLNRDLVQTQYIARKAIGMLKTVCRNVYSSTGSVTDFFRHAWGYDEILHDLNLPAYKEGGQTEIVEVRHKGQTHQEERITGWTKRWDHRHHAIDALVIALVSQAHIQRLNNLNTLKDTEGSGAYERQARNLDRWAESQPHFSYADTSTVVSGIAVSFKSGKKATTPGKRVVYKKGKRVVAQEGLLIPRGALTEGYVYGIVRVLNPKRKLKEIFSNPSLIVDKMIRESVNERLVRFDQDVKRAVASCKKEPLGKDKDGNPVSEFDCWELRVVKRYGIETVQCKNIAKVVDPHIRNLISDRYETLRLTLGNPADGKLVKAYQESLTTDPLYSDEAKHHKIVTVRMFADINQDNMMVVQRNADGKGIGFSKLGSNHHIALYRTPDGDIEECVVPFAHAVMRKNLGIPVIIQDPDTAWTLIDNLKEDVDESLLMNIPLPGWKFLFSMQQNEMFLIGLSEDEVKDMNKMQLSNHLYRAQALSSKYYIFKRHTCSLSDKGPEMLANKQCINIRSFGIIQEREIWKVRIDRLGNSIILPTYD

SEQ ID NO: 18014 - protein, 1059 aa, unidentified
  REGION 1..1059: note = Cas Enzyme sequence
MTRIKYRLALDMGANSLGWCVYRLNDNDEPDALRRLGSRIFSDGRDPKTLASKAADRRAARQMRRRRDRVLKRRHRLLEGLARFGLISADDAERKTLQGKDPYELRARGLDQPLTPHELGRAIYHLARKRGFRSSRKDGRDPESVKEAGKVHAAIAALKSRIAEAGCRTVGEYLARQHASRLPVRARHSTDGQYVLYLQRGMVAEEFDALWAAQQPHHPGLLTREAHDYLRDTMLFQRRLLPVQPGRCLFEPDEYRARLCSPLQQRFRILQELNNLRVKEGIGQRPLSLDERNQMLQRLTQASGPVSFAQLAKAAGLHNAKEFNFGNDEKRHGLKGDVVVASFASDGALGLRWHALNPEVQQALAVLIEQADQTDTLIEALVALPGSIASAEKILGKQHDAEAILGALIKLPFAITPETARVLANFRLPDDYGSLSLKALARIVPELEREVITYDVAVTRAGYDHHSQFYDGVFHPQLPYYGELLRGYTSPADKARDESERKYGKIPNPTVHIGLNQIRQLVNAIIKRYGHPHQIVIELTREFGASAEKRREITKQQAENQQRNERYNTELERLGVRVNRENRLKLQLWEELGKDDALDRYCIYSGKRLSKAALFSDEVEIDHILPFSRSLHDGIGNKLLCTRQGNRDKSNCTPFEAFGHTERWDAIVERAERLPAHKRKLFQESALETFLGGKDFLARHLTDTAYLGRAAKQYLSAVCPPNCVWVSSGKLTGMIRGKFGLNQLLSDNSQKNREDHRHHALDAAVIGLCSRSLIQRIATAAARAEDKGEQRLLEGLELPWPSFRDDLRNSLAQIVVSHKPDHGKEAALHNDTNYGWRDGPDKRGNPLMGRRVPLESLSKVSDAENIADEVLRTEISRLLAPLPSTKEIKAALLEYSTRTGIRRILRQERLSVIPIHDRRTGKPYRYVKGDGNYCYEVFRQPDGRWDGEVISLFEANQKSFQTSATRAQNGLPLVMRIHKDDLMAIEGEKQEVRILRVAKFSPGKINLADHNEANVDARNRNPDSTFRYLQFAPSKLRDKKARLVGVDILGYVNDPGFKE

SEQ ID NO: 18015 - protein, 1056 aa, unidentified
  REGION 1..1056: note = Cas Enzyme sequence
MARIKYRLALDMGANSLGWCIYRLNDNEEPDAIKRLGSRIFSDGRDPKTLASKAADRRAARQMRRRRDRVLKRRHRLIEGLTRFGLMPADDAERKALQGNDPYELRACGLDQPLTPHELGRAIYHLARKRGFRSSRKDGRDPESEKETGKVHAAMAALKSRIAEAGCRTVGEYLARQHADRLPVRARRSSDGQYVLYLQRGMVAEEFDVLWAAQQPHHPTVLTREAHDYLRDTMLFQRRLLPVQPGRCLFEPEEYRARLCSPLQQRFRILQELNNLRVKESIGQRPLSLDERNQMLQRLTQASGPVSFAQLAKAAGLHNAKEFNFGNDEKRHGLKGDVVTASFASDGALGPRWHALNPEVQQGLAVLVEQADQTDTLIEALVALPGSTIQAENILGKQYDAKTILDGLKKLPFAITPETARVLANFRLPDDYGSLSLKALARIVPELEREVITYDVAVTRAGYSHHSQFYDGVFHPQLPYYGELLRGYTSPADKARDESERKYGKIPNPTVHIGLNQIRQLMNAIIKRYGHPHQIVIELTREFGASGEKRREITKQQTENQQRNERYNAELERLGVRVNRENRLKLQLWEELGKDDALDRYCIYSGKRLSKAALFSDEVEIDHILPFSRSLHDGIGNKLLCTRQGNRDKGNRTPFEAFGHTERWDAIVERAERLPAHKRKQFQESALETFLGDKDFLARHLTDTAYLGRAAKQYLSAVCPPNCVWVSSGKLTGMIRGKFGLNPLLSDDSQKNREDHRHHALDAAVIGLCSRSLIQRIATAAARAEDKGEQRLLEGLELPWPSFRDDLRNSLAQVVVSHKPDHGKQAALHNDTNYGWRDGPDKRGNPLVGRRVPLESLSKASDAESIADEVLRVEISQLLAPLSSAKEVKTALLDYSTRTGIRRVLRQERLSVIPIHDRRTGKPYRYVKGDGNYCYEIFRRPDGRWSGEVINLFEANQKAFLASNACAQNGQPLVMRIHKDDVLIVLQQERLRIMRVAQFSDGKVLLVEHNEANASARVRKGELQFLQASINSLKQLNARLGGVDILGYVNDPGFKE

SEQ ID NO: 18016 - protein, 1059 aa, unidentified; identical to SEQ ID NO: 18014
  REGION 1..1059: note = Cas Enzyme sequence

SEQ ID NO: 18017 - protein, 1408 aa, unidentified
  REGION 1..1408: note = Cas Enzyme sequence
MKRILGLDLGTASIGWALVEEAENENEISEIVKLGVRVNPLSIDEKTNFEKGRPLTTNADRTLKRGARRNLQRFKLRRENLLAVLKDNGILNGNESLTEDGKNTTHQLVQLRALSAREKVELDDFARILLAINKKRGYKSSRKTKIEGDGVAIDGMAVAKFLYEEELTPGQYVWKLLTEDKKFIPDFYRSDLNQEFDTIWNKQLTYYPTLLTMKLYDELQGKNKSQTWAICQDPFKLVGIKLSGGVAEQKRRRYELRVEALSHKLDLENLAIVLQEVNNDQKKSSGYLGAISDRSKILFTEKKTVGEYLYGQIKVNHHTSLKNQVFYRQDYLDEFEQIWDTQAKYHKELTPALKAEIRDIVIFYQRKLKSQKGLLSFCLFESWQLERVDKNGDIILNKLTGKPKLRTVGQRVVPKSSPLFQEFKIWQNINDLEFGQKNMKDGDDFLLDEDQKQELFEELNIGRAFTEKQLLKFFGLSDKEWTTNQPVLDGKKNVKKPLESNRTNAALLNVFQEIAVAEGYGFDWAQKTGKEIREELKAILPQIGIVPDVLDFDGNIDGELFDKQPSYQLWHLLYSAEDDIKSTEEDRLIYGSSDVALKKKLHEKFGFKPAYAKMLANVSLSDDYGSLSARAIRKILPYMQTGNDYYDACRMAGYNHSNSFTKEELENRILKDNLEILPKNSLRNPVVEKILNQMVNLVNQLIEEYGKPDEVRIELARELKKSAKEREDATQYIASATRANEEIRKIIQKDFGFAATKNDVVRFKLWKELDKNGNHTLFTNQYISREKIFSKDIDIEHIIPKAVLFDDSFSNKTLAFRSVNLKKADRTAIDFITQDYFSELDKYKARVEHLYKEGAIQKGKYKKLLMSLGNLPDGFIERDLRNSQYIAKKAKRMLFEVVNNVIATTGSITDKLREDWDLINVMKELNLPKYRALGLTESETRKNGKTIERIIDWTKRNDHRHHAMDALTVAFTTHSHIQYINYLNARRNENHKEHTNIIAIEKKIKGKDNNGKSRYVAPTSDFREKSKKHIENILISFKAKNKVVTKNINKTKRGNEINIKEQLTPRGQLHKETMYGKSLRLMDRPLKINKKLNVDRVNCIANKEIRDLMVDHLMRYGNNPEVAFSTKVLKESPLFIDEKQITEVFCYEEIFTIRKLINPDNFKDLKSLQKVVDEGVKNILVSRLHKYAGDAKKAFSDLEKEPIWLNKEKGIAIKRVTISGVSNAEALHHKKDHTGDDILNSAGQKIPSDYVSTGNNHHVAIYIDEDGKLHDNVVSLYEAVAKVTEGLAVIDKEFNNDQGWQLLFTMKQNEMFVFPSEDFNPKEIDLLDVNNATIISKHLFRVQKFSKVEYGNSAVRDYVFRHHLETQLIDNKILKDTTFIVCKSLPYFNDIVKVRIDHIGKIVQVGEY

SEQ ID NO: 18018 - protein, 1403 aa, unidentified
  REGION 1..1403: note = Cas Enzyme sequence
KKYENKNMKRILGLDLGTASIGWAVADEAESKNETSKIVKLGVRVNPLTVDEKTNFEKGKPLTTNADRTLKRGARRNLQRFKLRRQNLVSVLIENGILKKDKSLTEDGKDTTHQLLKLRSKAAQEKVNLQDIARVLLAINKKRGYKSSRKTNLEEDGVAIDGMEVAKFLYEEELTPGQYVLRLLGDDKKYTPDFYLSDLKAEFDAIWEVQKNYYPDLLTDELYENLQEKNKSQTWAICQEPFGLIGIKLKGNATEQKEQRYQFRVDALKEKTELEHLAIALQEINNDQKKSSGYLGAISDRSKILFIDKKTVGEYLYEQIEANPHTSLKNQVFYRQDYLDEFEKIWSTQAQYHKELTSELKIEIRDIVIFYQRRLKSQKGLLGFCQFESWEQERKDKDGNVVLNKLTGLPKKRTVGQRVVPKSSPLFQEFKIWQNINNLAFKQKKNIDGEDFVLDEDQKQELFEELNMGRSMTDKQLLKFFNLSDKEWSTNQPASDGVSGSKKPIEYNKTNATLYNIYQTIADLEGYGFDWSKKTSKEIKEELRSIFPEIGIDPRILEFNATMDGDSFDKQMSYQLWHLLYSAEDDPKSTEEDRLTYGSTDVALKKKLHQKFGFKPEYTKMLSSISLSDDYGSLSARAIRKIFPFMQNGHEYSKACGLAGYNHSNSFTSEELEKRVTKDLLEILPKNSLRNPVVEKILNQMVNVVNQVIEEYGKPDEIRIELARELKKSAKEREETIKFIASGTKRNEDLRKIIQKDFGFMPTKNDITKYKLWQELDKNGHKTLFTDKYIGREQIFSKDIDIEHIIPKAVLFDDSFSNKTLAYRAVNLKKADRTALDFITQDYNSDLENYKSRVEHLYKQDAISKGKYKKLLMSFKDLPDGFIERDLRNSQYIAKKAKHMLFEICNSVVSTTGSITDKLRQDWDLINVMKEVSIDKYRALGLTEIEQRKDGKTIEKIKDWTKRNDHRHHAMDALTVAFTTHNHIQYINNLNARRDEEHEKHKIVWAIEQKIKQKDSKGSSRFTPPLENFRDQAKEHIESILISFKAKNKVVTRNINTIKKKNGLYSKDQLTPRGQLHKETVYGKSKRLMTKATKISKRLTYSQVLNIASEDIKSIIIEHLGAFGNEPEKAFGSKILKKSPLLYNELPIDEVFCYEEIFTIRKPINSDNFKDLKSLEKVVDKGVKTILQKRLSDFSGDAKKAFSDLDNNPIWLNKEKGIAIKRATISGVSNAEPLHYKKDHNGDEITDEMGSKIPADYVSTGNNHHVAIYEDEEGNLHEKVVSLYEAVARVNQDLPVIDRSYKSEVGYSFLFTMKQNEMFVIVTDDIKGLDLMEQKNYSLLSPNLFRVQKIGSKDYWFRHHLETSVTNDIKGVTYYRIKSTNPLKAFKKVRVNHAGKIVGVGEY

SEQ ID NO: 18019 - protein, 1397 aa, unidentified
  REGION 1..1397: note = Cas Enzyme sequence
MKRILGLDLGTASIGWALVNEAENDNETSEIIKLGVRVNPLSIDEKTNFEKGRPLTTNADRTHKRGARRNLQRFKLRRENLIAALKDNAVLNGNESLTEDGKNTTHQLVQLRALSAREKVELDEFARILLAINKKRGYKSSRKTKVEADGVAIDGMAVAKLLYEEELTPGQYVWKLLSEDKKHIPDFYRSDLQQEFDTIWNVQQSYYPTLLTKELYNELQGKNKSQTWAICQTPFNLEGIKLSGSQTEQKIERYKLRVEALGKKVGLEYLAIVLQEVNNNQKQSSGYLGAISDRSKILYTEKKTVGEYLYDQINENSHTSLKNQVFYRQDYLDEFEQIWDTQAKYHKELTPELKTEIRDIVIFYQRKLKSQKGLLSFCQFESWQQERKDDNGSVVLNKLTGQPKLRTVGQRVIPRSSPLFQEFNIWQNINNLEFKKKKEQDGESFVLDEEQKQELFDELNIGRSYTERQLLKFFKLSDKEWITNQPIADIKKNVKKPLESNRTNAALLNVFQEIAGSEGYGFDWAKKTGKEIRVELNAILPEIGIDADILDFDANMDGQKFDKQVSYQLWHILYSAEDDTNSTEEDRLIYGNSDVALKKKLHQKFGFKPRYAKMLANISLSDNYGSLSARAIRKILPYMQTGNDYYDSCRMAGYNHSNSFTKEELENRILKDNLEILSKNSLRNPVVEKILNQMVNLVNQLIAEYGKPDEVRIELARELKKSAKEREDATQFIATATRVNEEIRKVIQKDFGFTPTKNDVVRFKLWKELDKNGNHTLFTNQYISREKIFSKDIDIEHIIPKAVLFDDSFSNKTLAFRSVNLKKADRTAIDFISQDYFSELDKYKARVEHLYKEGSISKGKYKKLLMSLSELPDGFIERDLRNSQYIAKKAKRMLFEVINNVIATTGSITDKLREDWDLINVMKELNLPKYRALGLTEIETRKNGKTIERIIDWTKRNDHRHHAMDALTVAFTTHSHIQYINYLNARRNENHKEHTNIIAIEKKIKGKDNNGKSRYVAPTSDFREKSKKHIENILISFKAKNKVVTKNINKTKRGNEINIKEQLTPRGQLHKETMYGKSLRLMDRPLKINKKLKVDRVKFIANKETRDLILDHLTRYGKNPEVAFSTKVLKESPLIIDEKQITEVFCYEEIFTIRKLINPDNFKDLKSLQKVVDEGVKKILESRLRKYAGDAKKAFSDLEKEPIWLNKEKGIAIKRVTISGVNNAEALHHKKDHKGDDILNSAGQKIPSDYVSTGNNHHVAIYIDEDGELHEKVVSLYDAVTRVNLDLPVVDCDFNTDLGWNLLFTMKQNEMFVFPSGDLDLSEVDLTDGKNSSLISKHLFRVQKIATKNYMFRHHLETTVTNDLDFTYYNLRSLPKLKEIRKVRLNHLGSIVQVGEY

SEQ ID NO: 18020 - protein, 948 aa, unidentified
  REGION 1..948: note = Cas Enzyme sequence
MITLGIDYGASNIGMALVRNTSEGNEPLFAATIVLDARRLKDKTEPRAAIRRLRRTRKTKKRRLGELKTKLLSLGIDIETVSRIVRFCERRGYKSLFDEGGPPKKKADEELTYRFSREEFFQQLNEELVSILEFDAMAKQALKACERILNRDGDRQFEVRPIRIDNRGVSRCAWEGCNKTTPRRINATDEAIKQQLVTFFQGILKEEPGFLEDMSRAVSELDRISHEIRAAIERQATEDKKMLAKKAGMVLRKLKENLWSSEDVDDRMKKTWEHVRKGIMNILEKGYGRNSYCRQHTQEYLDRVLAGKPIPFKKSIADSDIISRREQIAFSKLWRYIEARILPLVPKGIDRIVVERTAFDLLAGSRKKVGKLSDKSLEHMYQLGPMYGFGNEHEMLRTEFGGLCAYCGNPSDTLIEQEHILPRRDFFFDSYLNILPACPNCNAEKGRRRPGPASLHISQAAYDRYSAYLSDLGRKRPLHLLHNEKKGILNLMRDPNRAWEVDRYLSLIANNLASIVQSQRGPRPFARFLYSRLSDRQQKAPEISFRSGRHTALYRNIAYPNFRKDQDKSAGGTINHALDAILLASKLPDPTPLEARGLNVHDLGTWCRKVRARVPKSGKDGVPALPGYDWYVPGFESVDANGYAVIEMATMNWNQKDAATHKQDPYGWSARAKKPTKRTAALELYEKLKTKKAKSEIERIVATIHHPALRAAMSKELETADPGAAVAEAMKEWLRESVSQSINKSEFSRHPADLLRRQQLVEFANNGGLIPQVIGIKRFDTGVQGKIDLERIDPFTGKTGHRYMADPANREVVLAYPSGSDGKANLSKPVTAGVRQNFALKTGGERIFGPKPLELEGGIAWGNGTPPKNGWTEVLETYLAGCGFSCYVRLTPCCVICYQDGTQHFVRNFDKNDGFKKSILENVIGVRRTPFTSKIMPLKVLTQKAERS

SEQ ID NO: 18021 - protein, 952 aa, unidentified
  REGION 1..952: note = Cas Enzyme sequence
MLLKKDGKQINKIEGLLAFRVPYFVGPLVVPEDLQKSDNSENHWMVRKKKGEITPWNFDEMVDKDASGRKFIERLVGTDSYLLGEPTLPKNSLLYQEYEVLNELNNVRLSVRTGNHWNDKRRMRLGREEKTLLCQRLFMKGQTVTKRTAENLLRKEYGRTYELSGLSDESKFTSSLSTYGKMCRIFGEKYVNEHRDLMEKIVELQTVFEDKETLLHQLRQLEGISEADCALLVNTHYTGWGRLSRKLLTTKAGECKISDDFAPRKHSIIEIMRAEDRNLMEIITDKQLGFSDWIEQENLGAENGSSLMEVVDDLRVSPKVKRGIIQSIRLIDDISKAVGKRPSRIFLELADDIQPSGRTISRKSRLQDLYRNANLGKEFKGIADELNACSDKDLQDDRLFLYYTQLGKDMYTGEELDLDRLSSAYDIDHIIPQAVTQNDSIDNRVLVARAENARKTDSFTYMPQIADRMRNFWQILLDNGLISRVKFERLTRQNEFSEREKERFVQRSLVETRQIMKNVATLMRQRYGNSAAVIGLNAELTKEMHRYLGFSHKNRDINDYHHAQDALCVGIAGQFAANRGFFADGEVSDGAQNSYNQYLRDYLRGYREKLSAEDRKQGRAFGFIVGSMRSQDEQKRVNPRTGEVVWSEEDKDYLRKVMNYRKMLVTQKVGDDFGALYDETRYAATDPKGIKGIPFDGAKQDTSLYGGFSSAKPAYAVLIESKGKTRLVNVTMQEYSLLGDRPSDDELRKVLAKKKSEYAKANILLRHVPKMQLIRYGGGLMVIKSAGELNNAQQLWLPYEEYCYFDDLSQGKGSLEKDDLKKLLDSILGSVQCLYPWHRFTEEELADLHVAFDKLPEDEKKNVITGIVSALHADAKTANLSIVGMTGSWRRMNNKSGYTFSDEDEFIFQSPSGLFEKRVTVGELKRKAKKEVNSKYRTNEKRLPTLSGASQP

SEQ ID NO: 18022 - protein, 1420 aa, unidentified
  REGION 1..1420: note = Cas Enzyme sequence
MSRKNYVDDYAISLDIGNASVGWSAFTPNYRLVRAKGHELIGVRLFDPADTAESRRMARTTRRRYSRRRWRLRLLDALFDQALSEIDPSFLARRKYSWVHPDDENNADCWYGSVLFDSNEQDKRFYEKYPTIYHLRKALMEDDSQHDIREIYLAIHHMVKYRGNFLVEGTLESSNAFKEDELLKLLGRITRYEMSEGEQNSDIEQDDENKLVAPANGQLADALCATRGSRSMRVDNALEALSAVNDLSREQRAIVKTIFAGLEGNKLDLAKIFVSKEFSSENKKILGIYFNKSDYEEKCVQIVDSGLLDDEEREFLDRMQGQYNAIALKQLLGRSTSVSDSKCASYDAHRANWNLIKLQLRTKENEKDINENYGILVGWKIDSGQRKSVRGESAYENMRKKANVFFKKMIETSDLSETDKNRLIHDIEEDKLFPIQRDSDNGVIPHQLHQNELKQIIKKQGKYYPFLLDAFEKDGKQINKIEGLLAFRVPYFVGPLVVPEDLQKSDNSENHWMVRKKKGEITPWNFDEMVDKDASGRKFIERLVGTDSYLLGEPTLPKNSLLYQEYEVLNELNNVRLSVRTGNHWNDKRRMRLGREEKTLLCQRLFMKGQTVTKRTAENLLRKEYGRTYELSGLSDESKFTSSLSTYGKMCRIFGEKYVNEHRDLMEKIVELQTVFEDKETLLHQLRQLEGISEADCALLVNTHYTGWGRLSRKLLTTKAGECKISDDFAPRKHSIIEIMRAEDRNLMEIITDKQLGFSDWIEQENLGAENGSSLMEVVDDLRVSPKVKRGIIQSIRLIDDISKAVGKRPSRIFLELADDIQPSGRTISRKSRLQDLYRNANLGKEFKGIADELNACSDKDLQDDRLFLYYTQLGKDMYTGEELDLDRLSSAYDIDHIIPQAVTQNDSIDNRVLVARAENARKTDSFTYMPQIADRMRNFWQILLDNGLISRVKFERLTRQNEFSEREKERFVQRSLVETRQIMKNVATLMRQRYGNSAAVIGLNAELTKEMHRYLGFSHKNRDINDYHHAQDALCVGIAGQFAANRGFFADGEVSDGAQNSYNQYLRDYLRGYREKLSAEDRKQGRAFGFIVGSMRSQDEQKRVNPRTGEVVWSEEDKDYLRKVMNYRKMLVTQKVGDDFGALYDETRYAATDPKGIKGIPFDGAKQDTSLYGGFSSAKPAYAVLIESKGKTRLVNVTMQEYSLLGDRPSDDELRKVLAKKKSEYAKANILLRHVPKMQLIRYGGGLMVIKSAGELNNAQQLWLPYEEYCYFDDLSQGKGSLEKDDLKKLLDSILGSVQCLYPWHRFTEEELADLHVAFDKLPEDEKKNVITGIVSALHADAKTANLSIVGMTGSWRRMNNKSGYTFSDEDEFIFQSPSGLFEKRVTVGELKRKAKKEVNSKYRTNEKRLPTLSGASQP

SEQ ID NO: 18023 - protein, 1420 aa, unidentified
  REGION 1..1420: note = Cas Enzyme sequence
MSRKNYVDDYAISLDIGNASVGWSAFTPNYRLVRAKGHELIGVRLFDPADTAESRRMARTTRRRYSRRRWRLRLLDALFDQALSEIDPSFLARRKYSWVHPDDENNADCWYGSVLFDSNEQDKRFYEKYPTIYHLRKALMEDDSQHDIREIYLAIHHMVKYRGNFLVEGTLESSNAFKEDELLKLLGRITRYEMSEGEQNSDIEQDDENKLVAPANGQLADALCATRGSRSMRVDNALEALSAVNDLSREQRAIVKAIFAGLEGNKLDLAKIFVSKEFSSENKKILGIYFNKSDYEEKCVQIVDSGLLDDEEREFLDRMQGQYNAIALKQLLGRSTSVSDSKCASYDAHRANWNLIKLQLRTKENEKDINENYGILVGWKIDSGQRKSVRGESAYENMRKKANVFFKKMIETSDLSETDKNRLIHDIEEDKLFPIQRDSDNGVIPHQLHQNELKQIIKKQGKYYPFLLDAFEKDGKQINKIEGLLAFRVPYFVGPLVVPEDLQKSDNSENHWMVRKKKGEITPWNFDEMVDKDASGRKFIERLVGTDSYLLGEPTLPKNSLLYQEYEVLNELNNVRLSVRTGNHWNDKRRMRLGREEKTLLCQRLFMKGQTVTKRTAENLLRKEYGRTYELSGLSDESKFTSSLSTYGKMCRIFGEKYVNEHRDLMEKIVELQTVFEDKETLLHQLRQLEGISEADCALLVNTHYTGWGRLSRKLLTTKAGECKISDDFAPRKHSIIEIMRAEDRNLMEIITDKQLGFSDWIEQENLGAENGSSLMEVVDDLRVSPKVKRGIIQSIRLIDDISKAVGKRPSRIFLELADDIQPSGRTISRKSRLQDLYRNANLGKEFKGIADELNACSDKDLQDDRLFLYYTQLGKDMYTGEELDLDRLSSAYDIDHIIPQAVTQNDSIDNRVLVARAENARKTDSFTYMPQIADRMRNFWQILLDNGLISRVKFERLTRQNEFSEREKERFVQRSLVETRQIMKNVATLMRQRYGNSAAVIGLNAELTKEMHRYLGFSHKNRDINDYHHAQDALCVGIAGQFAANRGFFADGEVSDGAQNSYNQYLRDYLRGYREKLSAEDRKQGRAFGFIVGSMRSQDEQKRVNPRTGEVVWSEEDKDYLRKVMNYRKMLVTQKVGDDFGALYDETRYAATDPKGIKGIPFDGAKQDTSLYGGFSSAKPAYAVLIESKGKTRLVNVTMQEYSLLGDRPSDDELRKVLAKKKSEYAKANILLRHVPKMQLIRYGGGLMVIKSAGELNNAQQLWLPYEEYCYFDDLSQGKGSLEKDDLKKLLDSILGSVQCLYPWHRFTEEELADLHVAFDKLPEDEKKNVITGIVSALHADAKTANLSIVGMTGSWRRMNNKSGYTFSDEDEFIFQSPSGLFEKRVTVGELKRKAKKEVNSKYQTNEKRLPTLSGASQP

SEQ ID NO: 18024 - protein, 1357 aa, unidentified
  REGION 1..1357: note = Cas Enzyme sequence
VRLFDPADTAESRRMARTTRRRYSRRRWRLRLLDALFDQALSEIDPSFLARRKYSWVHPDDENNADCWYGSVLFDSNEQDKRFYEKYPTIYHLRKALMEDDSQHDIREIYLAIHHMVKYRGNFLVEGTLESSNAFKEDELLKLLGRITRYEMSEGEQNSDIEQDDENKLVAPANGQLADALCATRGSRSMRVDNALEALSAVNDLSREQRAIVKAIFAGLEGNKLDLAKIFVSKEFSSENKKILGIYFNKSDYEEKCVQIVDSGLLDDEEREFLDRMQGQYNAIALKQLLGRSTSVSDSKCASYDAHRANWNLIKLQLRTKENEKDINENYGILVGWKIDSGQRKSVRGESAYENMRKKANVFFKKMIETSDLSETDKNRLIHDIEEDKLFPIQRDSDNGVIPHQLHQNELKQIIKKQGKYYPFLLDAFEKDGKQINKIEGLLAFRVPYFVGPLVVPEDLQKSDNSENHWMVRKKKGEITPWNFDEMVDKDASGRKFIERLVDTDSYLLGEPTLPKNSLLYQEYEVLNELNNVRLSVRTGNHWNDKRRMRLGREEKTLLCQRLFMKGQTVTKRTAENLLRKEYGRTYELSGLSDESKFTSSLSTYGKMCRIFGEKYVNEHRDLMEKIVELQTVFEDKETLLHQLRLLEGISEADCALLVNTHYTGWGRLSRKLLTTKAGECKIGDDFAPRKHSIIEIMRAEDRNLMEIITDKQLGFSDWIEQENLGAENGSSLMEVVDDLRVSPKVKRGIIQSIRLIDDISKAVGKRPSRIFLELADDIQPSGRTISRKSRLQDLYRNANLGKEFKGIADELNACSDKDLQDDRLFLYYTQLGKDMYTGEELDLDRLSSAYDIDHIIPQAVTQNDSIDNRVLVARAENARKTDSFTYMPQIADRMRNFWQILLDNGLISRVKFERLTRQNEFSEREKERFVQRSLVETRQIMKNVATLMRQRYGNSAAVIGLNAELTKEMHRYLGFSHKNRDINDYHHAQDALCVGIAGQFAANRGFFADGEVSDGAQNSYNQYLRDYLRGYREKLSAEDRKQGRAFGFIVGSMRSQDEQKRVNPRTGEVVWSEEDKDYLRKVMNYRKMLVTQKVGDDFGALYDETRYAATDPKGIKGIPFDGAKQDTSLYGGFSSAKPAYAVLIESKGKTRLVNVTMQEYSLLGDRPSDDELRKVLAKKKSEYAKANILLRHVPKMQLIRYGGGLMVIKSAGELNNAQQLWLPYEEYCYFDDLSQGKGSLEKDDLKKLLDSILGSVQCLYPWHRFTEEELADLHVAFDKLPEDEKKNVITGIVSALHADAKTANLSIVGMTGSWRRMNNKSGYTFSDEDEFIFQSPSGLFEKRVTVGELKRKAKKK

SEQ ID NO: 18025 - protein, 1260 aa, unidentified
  REGION 1..1260: note = Cas Enzyme sequence
MEDDSQHDIREIYLAIHHMVKYRGNFLVEGTLESSNAFKEDELLKLLGRITRYEMSEGEQNSDIEQDDENKLVAPANGQLADALCATRGSRSMRVDNALEALSAVNDLSREQRAIVKAIFAGLEGNKLDLAKIFVSKEFSSENKKILGIYFNKSDYEEKCVQIVDSGLLDDEEREFLDRMQGQYNAIALKQLLGRSTSVSDSKCASYDAHRANWNLIKLQLRTKENEKDINENYGILVGWKIDSGQRKSVRGESAYENMRKKANVFFKKMIETSDLSETDKNRLIHDIEEDKLFPIQRDSDNGVIPHQLHQNELKQIIKKQGKYYPFLLDAFEKDGKQINKIEGLLAFRVPYFVGPLVVPEDLQKSDNSENHWMVRKKKGEITPWNFDEMVDKDASGRKFIERLVDTDSYLLGEPTLPKNSLLYQEYEVLNELNNVRLSVRTGNHWNDKRRMRLGREEKTLLCQRLFMKGQTVTKRTAENLLRKEYGRTYELSGLSDESKFTSSLSTYGKMCRIFGEKYVNEHRDLMEKIVELQTVFEDKETLLHQLRLLEGISEADCALLVNTHYTGWGRLSRKLLTTKAGECKIGDDFAPRKHSIIEIMRAEDRNLMEIITDKQLGFSDWIEQENLGAENGSSLMEVVDDLRVSPKVKRGIIQSIRLIDDISKAVGKRPSRIFLELADDIQPSGRTISRKSRLQDLYRNANLGKEFKGIADELNACSDKDLQDDRLFLYYTQLGKDMYTGEELDLDRLSSAYDIDHIIPQAVTQNDSIDNRVLVARAENARKTDSFTYMPQIADRMRNFWQILLDNGLISRVKFERLTRQNEFSEREKERFVQRSLVETRQIMKNVATLMRQRYGNSAAVIGLNAELTKEMHRYLGFSHKNRDINDYHHAQDALCVGIAGQFAANRGFFADGEVSDGAQNSYNQYLRDYLRGYREKLSAEDRKQGRAFGFIVGSMRSQDEQKRVNPRTGEVVWSEEDKDYLRKVMNYRKMLVTQKVGDDFGALYDETRYAATDPKGIKGIPFDGAKQDTSLYGGFSSAKPAYAVLIESKGKTRLVNVTMQEYSLLGDRPSDDELRKVLAKKKSEYAKANILLRHVPKMQLIRYGGGLMVIKSAGELNNAQQLWLPYEEYCYFDDLSQGKGSLEKDDLKKLLDSILGSVQCLYPWHRFTEEELADLHVAFDKLPEDEKKNVITGIVSALHADAKTANLSIVGMTGSWRRMNNKSGYTFSDEDEFIFQSPSGLFEKRVTVGELKRKAKKK

SEQ ID NO: 18026 - protein, 1399 aa, unidentified
  REGION 1..1399: note = Cas Enzyme sequence
MSRKNYVDDYAISLDIGNASVGWSAFTPNYRLVRAKGHELIGVRLFDPADTAESRRMARTTRRRYSRRRWRLRLLDALFDQALSEIDPSFLARRKYSWVHPDDENNADCWYGSVLFDSNEQDKRFYEKYPTIYHLRKALMEDDSQHDIREIYLAIHHMVKYRGNFLVEGTLESSNAFKEDELLKLLGRITRYEMSEGEQNSDIEQDDENKLVAPANGQLADALCATRGSRSMRVDNALEALSAVNDLSREQRAIVKAIFAGLEGNKLDLAKIFVSKEFSSENKKILGIYFNKSDYEEKCVQIVDSGLLDDEEREFLDRMQGQYNAIALKQLLGRSTSVSDSKCASYDAHRANWNLIKLQLRTKENEKDINENYGILVGWKIDSGQRKSVRGESAYENMRKKANVFFKKMIETSDLSETDKNRLIHDIEEDKLFPIQRDSDNGVIPHQLHQNELKQIIKKQGKYYPFLLDAFEKDGKQINKIEGLLAFRVPYFVGPLVVPEDLQKSDNSENHWMVRKKKGEITPWNFDEMVDKDASGRKFIERLVGTDSYLLGEPTLPKNSLLYQEYEVLNELNNVRLSVRTGNHWNDKRRMRLGREEKTLLCQRLFMKGQTVTKRTAENLLRKEYGRTYELSGLSDESKFTSSLSTYGKMCRIFGEKYVNEHRDLMEKIVELQTVFEDKETLLHQLRQLEGISEADCALLVNTHYTGWGRLSRKLLTTKAGECKISDDFAPRKHSIIEIMRAEDRNLMEIITDKQLGFSDWIEQENLGAENGSSLMEVVDDLRVSPKVKRGIIQSIRLIDDISKAVGKRPSRIFLELADDIQPSGRTISRKSRLQDLYRNANLGKEFKGIADELNACSDKDLQDDRLFLYYTQLGKDMYTGEELDLDRLSSAYDIDHIIPQAVTQNDSIDNRVLVARAENARKTDSFTYMPQIADRMRNFWQILLDNGLISRVKFERLTRQNEFSEREKERFVQRSLVETRQIMKNVATLMRQRYGNSAAVIGLNAELTKEMHRYLGFSHKNRDINDYHHAQDALCVGIAGQFAANRGFFADGEVSDGAQNSYNQYLRDYLRGYREKLSAEDRKQGRAFGFIVGSMRSQDEQKRVNPRTGEVVWSEEDKDYLRKVMNYRKMLVTQKVGDDFGALYDETRYAATDPKGIKGIPFDGAKQDTSLYGGFSSAKPAYAVLIESKGKTRLVNVTMQEYSLLGDRPSDDELRKVLAKKKSEYAKANILLRHVPKMQLIRYGGGLMVIKSAGELNNAQQLWLPYEEYCYFDDLSQGKGSLEKDDLKKLLDSILGSVQCLYPWHRFTEEELADLHVAFDKLPEDEKKNVITGIVSALHADAKTANLSIVGMTGSWRRMNNKSGYTFSDEDEFIFQSPSGLFEKRVTVGELKRKAKKK

SEQ ID NO: 18027 - protein, 1420 aa, unidentified
  REGION 1..1420: note = Cas Enzyme sequence
MSRKNYVDDYAISLDIGNASVGWSAFTPNYRLVRAKGHELIGVRLFDPADTAESRRMARTTRRRYSRRRWRLRLLDALFDQALSEIDPSFLARRKYSWVHPDDENNADCWYGSVLFDSNEQDKRFYEKYPTIYHLRKALMEDDSQHDIREIYLAIHHMVKYRGNFLVEGTLESSNAFKEDELLKLLGRITRYEMSEGEQNSDIEQDDENKLVAPANGQLADALCATRGSRSMRVDNALEALSAVNDLSREQRAIVKAIFAGLEGNKLDLAKIFVSKEFSSENKKILGIYFNKSDYEEKCVQIVDSGLLDDEEREFLDRMQGQYNAIALKQLLGRSTSVSDSKCASYDAHRANWNLIKLQLRTKENEKDINENYGILVGWKIDSGQRKSVRGESAYENMRKKANVFFKKMIETSDLSETDKNRLIHDIEEDKLFPIQRDSDNGVIPHQLHQNELKQIIKKQGKYYPFLLDAFEKDGKQINKIEGLLAFRVPYFVGPLVVPEDLQKSDNSENHWMVRKKKGEITPWNFDEMVDKDASGRKFIERLVGTDSYLLGEPTLPKNSLLYQEYEVLNELNNVRLSVRTGNHWNDKRRMRLGREEKTLLCQRLFMKGQTVTKRTAENLLRKEYGRTYELSGLSDESKFTSSLSTYGKMCRIFGEKYVNEHRDLMEKIVELQTVFEDKETLLHQLRLLEGISEADCALLVNTHYTGWGRLSRKLLTTKAGECKIGDDFAPRKHSIIEIMRAEDRNLMEIITDKQLGFSDWIEQENLGAENGSSLMEVVDDLRVSPKVKRGIIQSIRLIDDISKAVGKRPSRIFLELADDIQPSGRTISRKSRLQDLYRNANLGKEFKGIADELNACSDKDLQDDRLFLYYTQLGKDMYTGEELDLDRLSSAYDIDHIIPQAVTQNDSIDNRVLVARAENARKTDSFTYMPQIADRMRNFWQILLDNGLISRVKFERLTRQNEFSEREKERFVQRSLVETRQIMKNVATLMRQRYGNSAAVIGLNAELTKEMHRYLGFSHKNRDINDYHHAQDALCVGIAGQFAANRGFFADGEVSDGAQNSYNQYLRDYLRGYREKLSAEDRKQGRAFGFIVGSMRSQDEQKRVNPRTGEVVWSEEDKDYLRKVMNYRKMLVTQKVGDDFGALYDETRYAATDPKGIKGIPFDGAKQDTSLYGGFSSAKPAYAVLIESKGKTRLVNVTMQEYSLLGDRPSDDELRKVLAKKKSEYAKANILLRHVPKMQLIRYGGGLMVIKSAGELNNAQQLWLPYEEYCYFDDLSQGKGSLEKDDLKKLLDSILGSVQCLYPWHRFTEEELADLHVAFDKLPEDEKKNVITGIVSALHADAKTANLSIVGMTGSWRRMNNKSGYTFSDEDEFIFQSPSGLFEKRVTVGELKRKAKKEVNSKYRTNEKRLPTLSGASQP

SEQ ID NO: 18028 - protein, 956 aa, unidentified
  REGION 1..956: note = Cas Enzyme sequence
MSRKNYVDDYAISLDIGNASVGWSAFTPNYRLVRAKGHELIGVRLFDPADTAESRRMARTTRRRYSRRRWRLRLLDALFDQALSEIDPSFLARRKYSWVHPDDENNADCWYGSVLFDSNEQDKRFYEKYPTIYHLRKALMEDDSQHDIREIYLAIHHMVKYRGNFLVEGTLESSNAFKEDELLKLLGRITRYEMSEGEQNSDIEQDDENKLVAPANGQLADALCATRGSRSMRVDNALEALSAVNDLSREQRAIVKAIFAGLEGNKLDLAKIFVSKEFSSENKKILGIYFNKSDYEEKCVQIVDSGLLDDEEREFLDRMQGQYNAIALKQLLGRSTSVSDSKCASYDAHRANWNLIKLQLRTKENEKDINENYGILVGWKIDSGQRKSVRGESAYENMRKKANVFFKKMIETSDLSETDKNRLIHDIEEDKLFPIQRDSDNGVIPHQLHQNELKQIIKKQGKYYPFLLDAFEKDGKQINKIEGLLTFRVPYFVGPLVVPEDLQKSDNSENHWMVRKKKGEITPWNFDEMVDKDASGRKFIERLVGTDSYLLGEPTLPKNSLLYQEYEVLNELNNVRLSVRTGNHWNDKRRMRLGREEKTLLCQRLFMKGQTVTKRTAENLLRKEYGRTYELSGLSDESKFTSSLSTYGKMCRIFGEKYVNEHRDLMEKIVELQTVFEDKETLLHQLRQLEGISEADCALLVNTHYTGWGRLSRKLLTTKAGECKISDDFAPRKHSIIEIMRAEDRNLMEIITDKQLGFSDWIEQENLGAENGSSLMEVVDDLRVSPKVKRGIIQSIRLIDDISKAVGKRPSRIFLELADDIQPSGRTISRKSRLQDLYRNANLGKEFKGIADELNACSDKDLQDDRLFLYYTQLGKDMYTGEELDLDRLSSAYDIDHIIPQAVTQNDSIDNRVLVARAENARKTDSFTYMPQIADRMRNFWQILLDNGLISRVKFE

SEQ ID NO: 18029 - protein, 1007 aa, unidentified
  REGION 1..1007: note = Cas Enzyme sequence
MRICEKKANVFFKKMIETSDLSETDKNRLIHDIEEDKLFPIQRDSDNGVIPHQLHQNELKQIIKKQGKYYPFLLDAFEKDGKQINKIEGLLAFRVPYFVGPLVVPEDLQKSDNSENHWMVRKKKGEITPWNFDEMVDKDASGRKFIERLVDTDSYLLGEPTLPKNSLLYQEYEVLNELNNVRLSVRTGNHWNDKRRMRLGREEKTLLCQRLFMKGQTVTKRTAENLLRKEYGRTYELSGLSDESKFTSSLSTYGKMCRIFGEKYVNEHRDLMEKIVELQTVFEDKETLLHQLRLLEGISEADCALLVNTHYTGWGRLSRKLLTTKAGECKIGDDFAPRKHSIIEIMRAEDRNLMEIITDKQLGFSDWIEQENLGAENGSSLMEVVDDLRVSPKVKRGIIQSIRLIDDISKAVGKRPSRIFLELADDIQPSGRTISRKSRLQDLYRNANLGKEFKGIADELNACSDKDLQDDRLFLYYTQLGKDMYTGEELDLDRLSSAYDIDHIIPQAVTQNDSIDNRVLVARAENARKTDSFTYMPQIADRMRNFWQILLDNGLISRVKFERLTRQNEFSEREKERFVQRSLVETRQIMKNVATLMRQRYGNSAAVIGLNAELTKEMHRYLGFSHKNRDINDYHHAQDALCVGIAGQFAANRGFFADGEVSDGAQNSYNQYLRDYLRGYREKLSAEDRKQGRAFGFIVGSMRSQDEQKRVNPRTGEVVWSEEDKDYLRKVMNYRKMLVTQKVGDDFGALYDETRYAATDPKGIKGIPFDGAKQDTSLYGGFSSAKPAYAVLIESKGKTRLVNVTMQEYSLLGDRPSDDELRKVLAKKKSEYAKANILLRHVPKMQLIRYGGGLMVIKSAGELNNAQQLWLPYEEYCYFDDLSQGKGSLEKDDLKKLLDSILGSVQCLYPWHRFTEEELADLHVAFDKLPEDEKKNVITGIVSALHADAKTANLSIVGMTGSWRRMNNKSGYTFSDEDEFIFQSPSGLFEKRVTVGELKRKAKKRSK

SEQ ID NO: 18030 - protein, 1399 aa, unidentified
  REGION 1..1399: note = Cas Enzyme sequence
MSRKNYVDDYAISLDIGNASVGWSAFTPNYRLVRAKGHELIGVRLFDPADTAESRRMARTTRRRYSRRRWRLRLLDALFDQALSEIDPSFLARRKYSWVHPDDENNADCWYGSVLFDSNEQDKRFYEKYPTIYHLRKALMEDDSQHDIREIYLAIHHMVKYRGNFLVEGTLESSNAFKEDELLKLLGRITRYEMSEGEQNSDIEQDDENKLVAPANGQLADALCATRGSRSMRVDNALEALSAVNDLSREQRAIVKAIFAGLEGNKLDLAKIFVSKEFSSENKKILGIYFNKSDYEEKCVQIVDSGLLDDEEREFLDRMQGQYNAIALKQLLGRSTSVSDSKCASYDAHRANWNLIKLQLRTKENEKDINENYGILVGWKIDSGQRKSVRGESAYENMRKKANVFFKKMIETSDLSETDKNRLIHDIEEDKLFPIQRDSDNGVIPHQLHQNELKQIIKKQGKYYPFLLDAFEKDGKQINKIEGLLTFRVPYFVGPLVVPEDLQKSDNSENHWMVRKKKGEITPWNFDEMVDKDASGRKFIERLVGTDSYLLGEPTLPKNSLLYQEYEVLNELNNVRLSVRTGNHWNDKRRMRLGREEKTLLCQRLFMKGQTVTKRTAENLLRKEYGRTYELSGLSDESKFTSSLSTYGKMCRIFGEKYVNEHRDLMEKIVELQTVFEDKETLLHQLRQLEGISEADCALLVNTHYTGWGRLSRKLLTTKAGECKISDDFAPRKHSIIEIMRAEDRNLMEIITDKQLGFSDWIEQENLGAENGSSLMEVVDDLRVSPKVKRGIIQSIRLIDDISKAVGKRPSRIFLELADDIQPSGRTISRKSRLQDLYRNANLGKEFKGIADELNACSDKDLQDDRLFLYYTQLGKDMYTGEELDLDRLSSAYDIDHIIPQAVTQNDSIDNRVLVARAENARKTDSFTYMPQIADRMRNFWQILLDNGLISRVKFERLTRQNEFSEREKERFVQRSLVETRQIMKNVATLMRQRYGNSAAVIGLNAELTKEMHRYLGFSHKNRDINDYHHAQDALCVGIAGQFAANRGFFADGEVSDGAQNSYNQYLRDYLRGYREKLSAEDRKQGRAFGFIVGSMRSQDEQKRVNPRTGEVVWSEEDKDYLRKVMNYRKMLVTQKVGDDFGALYDETRYAATDPKGIKGIPFDGAKQDTSLYGGFSSAKPAYAVLIESKGKTRLVNVTMQEYSLLGDRPSDDELRKVLAKKKSEYAKANILLRHVPKMQLIRYGGGLMVIKSAGELNNAQQLWLPYEEYCYFDDLSQGKGSLEKDDLKKLLDSILGSVQCLYPWHRFTEEELADLHVAFDKLPEDEKKNVITGIVSALHADAKTANLSIVGMTGSWRRMNNKSGYTFSDEDEFIFQSPSGLFEKRVTVGELKRKAKKK

SEQ ID NO: 18031 - protein, 1343 aa, unidentified
  REGION 1..1343: note = Cas Enzyme sequence
MARTTRRRYSRRRWRLRLLDALFDQALSEIDPSFLARRKYSWVHPDDENNADCWYGSVLFDSNEQDKRFYEKYPTIYHLRKALMEDDSQHDIREIYLAIHHMVKYRGNFLVEGTLESSNAFKEDELLKLLGRITRYEMSEGEQNSDIEQDDENKLVAPANGQLADALCATRGSRSMRVDNALEALSAVNDLSREQRAIVKAIFAGLEGNKLDLAKIFVSKEFSSENKKILGIYFNKSDYEEKCVQIVDSGLLDDEEREFLDRMQGQYNAIALKQLLGRSTSVSDSKCASYDAHRANWNLIKLQLRTKENEKDINENYGILVGWKIDSGQRKSVRGESAYENMRKKANVFFKKMIETSDLSETDKNRLIHDIEEDKLFPIQRDSDNGVIPHQLHQNELKQIIKKQGKYYPFLLDAFEKDGKQINKIEGLLAFRVPYFVGPLVVPEDLQKSDNSENHWMVRKKKGEITPWNFDEMVDKDASGRKFIERLVDTDSYLLGEPTLPKNSLLYQEYEVLNELNNVRLSVRTGNHWNDKRRMRLGREEKTLLCQRLFMKGQTVTKRTAENLLRKEYGRTYELSGLSDESKFTSSLSTYGKMCRIFGEKYVNEHRDLMEKIVELQTVFEDKETLLHQLRLLEGISEADCALLVNTHYTGWGRLSRKLLTTKAGECKIGDDFAPRKHSIIEIMRAEDRNLMEIITDKQLGFSDWIEQENLGAENGSSLMEVVDDLRVSPKVKRGIIQSIRLIDDISKAVGKRPSRIFLELADDIQPSGRTISRKSRLQDLYRNANLGKEFKGIADELNACSDKDLQDDRLFLYYTQLGKDMYTGEELDLDRLSSAYDIDHIIPQAVTQNDSIDNRVLVARAENARKTDSFTYMPQIADRMRNFWQILLDNGLISRVKFERLTRQNEFSEREKERFVQRSLVETRQIMKNVATLMRQRYGNSAAVIGLNAELTKEMHRYLGFSHKNRDINDYHHAQDALCVGIAGQFAANRGFFADGEVSDGAQNSYNQYLRDYLRGYREKLSAEDRKQGRAFGFIVGSMRSQDEQKRVNPRTGEVVWSEEDKDYLRKVMNYRKMLVTQKVGDDFGALYDETRYAATDPKGIKGIPFDGAKQDTSLYGGFSSAKPAYAVLIESKGKTRLVNVTMQEYSLLGDRPSDDELRKVLAKKKSEYAKANILLRHVPKMQLIRYGGGLMVIKSAGELNNAQQLWLPYEEYCYFDDLSQGKGSLEKDDLKKLLDSILGSVQCLYPWHRFTEEELADLHVAFDKLPEDEKKNVITGIVSALHADAKTANLSIVGMTGSWRRMNNKSGYTFSDEDEFIFQSPSGLFEKRVTVGELKRKAKKK

SEQ ID NO: 18032 - protein, 1312 aa, unidentified
  REGION 1..1312: note = Cas Enzyme sequence
MLDAIFDAPLAEVDPSFLARRKYSWVHPADENNADYWYGGVLFDSKNQDKRFYKQYPTIYHLRKTLMEDDKQHDIREVYFAVHHLLKYRGNFLVEGDLDSSSVFDSKNLLNLIGEIILCVFDEQLDGSWTAGIDKKRLADTLCTTKGSRSMRVENALAVICESCELPKEQINVIKAIFAGLEGNKLDLAKIFPSEERTSDEKKALGIYFNKSDYEEVRAQVVDSGLLDDEQCELLDKMQKQYSAIALKQLLGNAKSVSESMCASYTRHQRNWDLIKKELRTEDNADEINKHYGELVGWTMVDGRRRSIRGTSTYEKTRQNANKYFSKLIEASNLSESKKLDLKHAIDEDRLFPVQRDSDNGVIPYQLHRNELRRILEKQGKYYPFLLDTFEKNGEQVNKIEGLLTFRVPYFVGPLVEREGMQPSDNGENHWMKRKKSGEITPWNFDKMVDKDESGRRFIERLVDTDSYLLGEATLPKNSMLYQEYEVLNELNNVRLSVRSGNRWENRRRQRLGREEKTLLIRNLFMKGGVVTKKAAENLLRKEYGRTYELSGLASESKFMSSMSSYGKLCRIFGAERVNKDSELMEQIIELQTVFEDKETLLHQLRMLDGLSDSDCELLARTHYTGWGKLSRKLLTTKVGECKIGDDFAPQKHSIIEIMRFEDRNFMEIITDKNYGFPEWIDEQNLGADKKQSLESMVDELHVSPKVKRGIIQSVRLIDDISKAVGKKPSRIFLELAGDIQASVRTTSRKNRLLELYKNAGLRKEFSDIYDRLEASDDKGLQDDRWFLYYTQLGKDMYTGEELDIDRLSSDYDIDHIIPQAVTQNDSLDNRVLVSRAANARKTDSFAYLPELVEARRGFWQELLDNRLISQTKFERLVRQNDFGRHEKERFVERSLVETRQIMKNVATLMRRRYGNSSAVIGLNSELTKEMRQYLGFEHKNRDINDYHHAQDALCLGVAGQFAVNRGFFDNGAVSDGAANAYNIYLQDYLRGYREKLKAGDRKHGKAFGFIVGSMASADENKRINPKTGEIAWSEADKDYLRRVMNYRKMLVTQKVGDSFGALYNETRYGAAVKEGHDGIAFDKNKADTSLYGGFSSAKVVYSILVELKGKVRLVNITMQEYSMLGDCPSDEALKKVLVAKKPEYAKAKILLRHIPSMQLIHYKGACMTIKSATELNNARQLWLDCDVYNALDDYLKCGTSKSSIDIMQIWDALFDAVNKHYPLHRVEESTLAKARTKFEKLDLDKQLDVLGMIVVALHADPGRANLSLVGLPSEWKRVRSVSFSDDDEFVFQSPSGLFETKITIAELKKAE

SEQ ID NO: 18033 - protein, 1312 aa, unidentified
  REGION 1..1312: note = Cas Enzyme sequence
MLDAIFDAPLAEVDPSFLARRKYSWVHPADENNADYWYGGVLFDSKNQDKRFYKQYPTIYHLRKTLMEDDKQHDIREVYFAVHHLLKYRGNFLVEGDLDSSSVFDSKNLLNLIGEIILCVFDEQLDGSWTAGIDKKRLADTLCTTKGSRSMRVENALAVICESCELPKEQINVIKAIFAGLEGNKLDLAKIFPSEERTSDEKKALGIYFNKSDYEEVRAQVVDSGLLDDEQCELLDKMQKQYSAIALKQLLGNAKSVSESMCASYTRHQRNWDLIKKELRTEDNADEINKHYGELVGWTMVDGRRRSIRGTSTYEKTRQNANKYFSKLIEASNLSESKKLDLKHAIDEDRLFPVQRDSDNGVIPYQLHRNELRRILEKQGKYYPFLLDTFEKNGEQVNKIEGLLTFRVPYFVGPLVEREGMQPSDNGENHWMKRKKSGEITPWNFDKMVDKDESGRRFIERLVDTDSYLLGEATLPKNSMLYQEYEVLNELNNVRLSVRSGNRWENRRRQRLGREEKTLLIRNLFMKGGVVTKKAAENLLRKEYGRTYELSGLASESKFMSSMSSYGKLCRIFGAERVNKDSELMEQIIELQTVFEDKETLLHQLRMLDGLSDSDCELLARTHYTGWGKLSRKLLTTKVGECKIGDDFAPQKHSIIEIMRFEDRNFMEIITDKNYGFPEWIDEQNLGADKKQSLESMVDELHVSPKVKRGIIQSVRLIDDISKAVGKKPSRIFLELAGDIQASVRTTSRKNRLLELYKNAGLRKEFSDIYDRLEASDDKGLQDDRWFLYYTQLGKDMYTGEELDIYRLSSDYDIDHIIPQAVTQNDSLDNRVLVSRAANARKTDSFAYLPELVEARRGFWQELLDNRLISQTKFERLVRQNDFGRHEKERFVERSLVETRQIMKNVATLMRRRYGNSSAVIGLNSELTKEMRQYLGFEHKNRDINDYHHAQDALCLGVAGQFAVNRGFFDNGAVSDGAANAYNIYLQDYLRGYREKLKAGDRKHGKAFGFIVGSMASADENKRINPKTGEIAWSEADKDYLRRVMNYRKMLVTQKVGDSFGALYNETRYGAAVKEGHDGIAFDKNKADTSLYGGFSSAKVVYSILVELKGKVRLVNITMQEYSMLGDCPSDEALKKVLVAKKPEYAKAKILLRHIPSMQLIHYKGACMTIKSATELNNARQLWLDCDVYNALDDYLKCGTSKSSIDIMQIWDALFDAVNKHYPLHRVEESTLAKARTKFEKLDLDKQLDVLGMIVVALHADPGRANLSLVGLPSEWKRVRSVSFSDDDEFVFQSPSGLFETKITIAELKKAE

SEQ ID NO: 18034 - protein, 1385 aa, unidentified
  REGION 1..1385: note = Cas Enzyme sequence
MSRKKIVPNYAISLDIGNASVGWAAFTPDYRLMRAKGRELIGVRLFEPAQTAEARRMARTTRRRYSRRRWRLHMLDAIFDAPLAEVDPSFLARRKYSWVHPADENNADYWYGGVLFDSKNQDKRFYKQYPTIYHLRKTLMEDDKQHDIREVYFAVHHLLKYRGNFLVEGDLDSSSVFDSKNLLNLIGEIILCVFDEQLDGSWTAGIDKKRLADTLCTTKGSRSMRVENALAVICESCELPKEQINVIKAIFAGLEGNKLDLAKIFPSEERTSDEKKALGIYFNKSDYEEVRAQVVDSGLLDDEQCELLDKMQKQYSAITLKQLLGNAKSVSESMCASYTRHQRNWDLIKKELRTEDNADEINKHYGELVGWTMVDGRRRSIRGTSTYEKTRQNANKYFSKLIEASNLSESKKLDLKHAIDEDRLFPVQRDSDNGVIPYQLHRNELRRILEKQGKYYPFLLDTFEKNGEQVNKIEGLLTFRVPYFVGPLVEREGMQPSDNGENHWMKRKKSGEITPWNFDKMVDKDESGRRFIERLVDTDSYLLGEATLPKNSMLYQEYEVLNELNNVRLSVRSGNRWENRRRQRLGREEKTLLIRNLFMKGGVVTKKAAENLLRKEYGRTYELSGLASESKFMSSMSSYGKLCRIFGAERVNKDSELMEQIIELQTVFEDKETLLHQLRMLDGLSDSDCELLARTHYTGWGKLSRKLLTTKVGECKIGDDFAPQKHSIIEIMRFEDRNFMEIITDKNYGFPEWIDEQNLGADKKQSLESMVDELHVSPKVKRGIIQSVRLIDDISKAVGKKPSRIFLELAGDIQASVRTTSRKNRLLELYKNAGLRKEFSDIYDRLEASDDKGLQDDRWFLYYTQLGKDMYTGEELDIDRLSSDYDIDHIIPQAVTQNDSLDNRVLVSRAANARKTDSFAYLPELVEARRGFWQELLDNRLISQTKFERLVRQNDFGRHEKERFVERSLVETRQIMKNVATLMRRRYGNSSAVIGLNSELTKEMRQYLGFEHKNRDINDYHHAQDALCLGVAGQFAVNRGFFDNGAVSDGAANAYNIYLQDYLRGYREKLKAGDRKHGKAFGFIVGSMASADENKRINPKTGEIAWSEADKDYLRRVMNYRKMLVTQKVGDSFGALYNETRYGAAVKEGHDGIAFDKNKADTSLYGGFSSAKVVYSILVELKGKVRLVNITMQEYSMLGDCPSDEALKKVLVAKKPEYAKAKILLRHIPSMQLIHYKGACMTIKSATELNNARQLWLDCDVYNALDDYLKCGTSKSSIDIMQIWDALFDAVNKHYPLHRVEESTLAKARTKFEKLDLDKQLDVLGMIVVALHADPGRANLSLVGLPSEWKRVRSVSFSDDDEFVFQSPSGLFETKITIAELKKAE

SEQ ID NO: 18035 - protein, 1385 aa, unidentified
  REGION 1..1385: note = Cas Enzyme sequence
MSRKKIVPNYAISLDIGNASVGWAAFTPDYRLMRAKGRELIGVRLFEPAQTAEARRMARTTRRRYSRRRWRLHMLDAIFDAPLAEVDPSFLARRKYSWVHPADENNADYWYGGVLFDSKNQDKRFYKQYPTIYHLRKTLMEDDKQHDIREVYFAVHHLLKYRGNFLVEGDLDSSSVFDSKNLLNLIGEIILCVFDEQLDGSWTAGIDKKRLADTLCTTKGSRSMRVENALAVICESCELPKEQINVIKAIFAGLEGNKLDLAKIFPSEERTSDEKKALGIYFNKSDYEEVRAQVVDSGLLDDEQCELLDKMQKQYSAIALKQLLGNAKSVSESMCASYTRHQRNWDLIKKELRTEDNADEINKHYGELVGWTMVDGRRRSIRGTSTYEKTRQNANKYFSKLIEASNLSESKKLDLKHAIDEDRLFPVQRDSDNGVIPYQLHRNELRRILEKQGKYYPFLLDTFEKNGEQVNKIEGLLTFRVPYFVGPLVEREGMQPSDNGENHWMKRKKSGEITPWNFDKMVDKDESGRRFIERLVDTDSYLLGEATLPKNSMLYQEYEVLNELNNVRLSVRSGNRWENRRRQRLGREEKTLLIRNLFMKGGVVTKKAAENLLRKEYGRTYELSGLASESKFMSSMSSYGKLCRIFGAERVNKDSELMEQIIELQTVFEDKETLLHQLRMLDGLSDSDCELLARTHYTGWGKLSRKLLTTKVGECKIGDDFAPQKHSIIEIMRFEDRNFMEIITDKNYGFPEWIDEQNLGADKKQSLESMVDELHVSPKVKRGIIQSVRLIDDISKAVGKKPSRIFLELAGDIQASVRTTSRKNRLLELYKNAGLRKEFSDIYDRLEASDDKGLQDDRWFLYYTQLGKDMYTGEELDIDRLSSDYDIDHIIPQAVTQNDSLDNRVLVSRAANARKTDSFAYLPELVEARRGFWQELLDNRLISQTKFERLVRQNDFGRHEKERFVERSLVETRQIMKNVATLMRRRYGNSSAVIGLNSELTKEMRQYLGFEHKNRDINDYHHAQDALCLGVAGQFAVNRGFFDNGAVSDGAANAYNIYLQDYLRGYREKLKAGDRKHGKAFGFIVGSMASADENKRINPKTGEIAWSEADKDYLRRVMNYRKMLVTQKVGDSFGALYNETRYGAAVKEGHDDIAFDKNKADTSLYGGFSSAKVVYSILVELKGKVRLVNITMQEYSMLGDCPSDEALKKVLVAKKPEYAKAKILLRHIPSMQLIHYKGACMTIKSATELNNARQLWLDCDVYNALDDYLKCGTSKSSIDIMQIWDALFDAVNKHYPLHRVEESTLAKARTKFEKLDLDKQLDVLGMIVVALHADPGRANLSLVGLPSEWKRVRSVSFSDDDEFVFQSPSGLFETKITIAELKKAE

SEQ ID NO: 18036 - protein, 1385 aa, unidentified
  REGION 1..1385: note = Cas Enzyme sequence
MSRKKIVPNYAISLDIGNASVGWAAFTPDYRLMRAKGRELIGVRLFEPAQTAEARRMARTTRRRYSRRRWRLHMLDAIFDAPLAEVDPSFLARRKYSWVHPADENNADYWYGGVLFDSKNQDKRFYKQYPTIYHLRKTLMEDDKQHDIREVYFAVHHLLKYRGNFLVEGDLDSSSVFDSKNLLNLIGEIILCVFDEQLDGSWTAGIDKKRLADTLCTTKGSRSMRVENALAVICESCELPKEQINVIKAFFAGLEGNKLDLAKIFPSEERTSDEKKALGIYFNKSDYEEVRAQVVDSGLLDDEQCELLDKMQKQYSAIALKQLLGNAKSVSESMCASYTRHQRNWDLIKKELRTEDNADEINKHYGELVGWTMVDGRRRSIRGTSTYEKTRQNANKYFSKLIEASNLSESKKLDLKHAIDEDRLFPVQRDSDNGVIPYQLHRNELRRILEKQGKYYPFLLDTFEKNGEQVNKIEGLLTFRVPYFVGPLVEREGMQPSDNGENHWMKRKKSGEITPWNFDKMVDKDESGRRFIERLVDTDSYLLGEATLPKNSMLYQEYEVLNELNNVRLSVRSGNRWENRRRQRLGREEKTLLIRNLFMKGGVVTKKAAENLLRKEYGRTYELSGLASESKFMSSMSSYGKLCRIFGAERVNKDSELMEQIIELQTVFEDKETLLHQLRMLDGLSDSDCELLARTHYTGWGKLSRKLLTTKVGECKIGDDFAPQKHSIIEIMRFEDRNFMEIITDKNYGFPEWIDEQNLGADKKQSLESMVDELHVSPKVKRGIIQSVRLIDDISKAVGKKPSRIFLELAGDIQASVRTTSRKNRLLELYKNAGLRKEFSDIYDRLEASDDKGLQDDRWFLYYTQLGKDMYTGEELDIDRLSSDYDIDHIIPQAVTQNDSLDNRVLVSRAANARKTDSFAYLPELVEARRGFWQELLDNRLISQTKFERLVRQNDFGRHEKERFVERSLVETRQIMKNVATLMRRRYGNSSAVIGLNSELTKEMRQYLGFEHKNRDINDYHHAQDALCLGVAGQFAVNRGFFDNGAVSDGAANAYNIYLQDYLRGYREKLKAGDRKHGKAFGFIVGSMASADENKRINPKTGEIAWSEADKDYLRRVMNYRKMLVTQKVGDSFGALYNETRYGAAVKEGHDGIAFDKNKADTSLYGGFSSAKVVYSILVELKGKVRLVNITMQEYSMLGDCPSDEALKKVLVAKKPEYAKAKILLRHIPSMQLIHYKGACMTIKSATELNNARQLWLDCDVYNALDDYLKCGTSKSSIDIMQIWDALFDAVNKHYPLHRVEESTLAKARTKFEKLDLDKQLDVLGMIVVALHADPGRANLSLVGLPSEWKRVRSVSFSDDDEFVFQSPSGLFETKITIAELKKAE

SEQ ID NO: 18037 - protein, 1385 aa, unidentified
  REGION 1..1385: note = Cas Enzyme sequence
MSRKKIVPNYAISLDIGNASVGWAAFTPDYRLMRAKGRELIGVRLFEPAQTAEARRMARTTRRRYSRRRWRLHMLDAIFDAPLAEVDPSFLARRKYSWVHPADENNADYWYGGVLFDSKNQDKRFYKQYPTIYHLRKTLMEDDKQHDIREVYFAVHHLLKYRGNFLVEGDLDSSSVFDSKNLLNLIGEIILCVFDEQLDGSWTAGIDKKRLADTLCTTKGSRSMRVENALAVICESCELPKEQINVIKAIFAGLEGNKLDLAKIFPSEERTSDEKKALGIYFNKSDYEEVRAQVVDSGLLDDEQCELLDKMQKQYSAIALKQLLGNAKSVSESMCASYTRHQRNWDLIKKELRTEDNADEINKHYGELVGWTMVDGRRRSIRGTSTYEKTRQNANKYFSKLIEASNLSESKKMDLKHAIDEDRLFPVQRDSDNGVIPYQLHRNELRRILEKQGKYYPFLLDTFEKNGEQVNKIEGLLTFRVPYFVGPLVEREGMQPSDNGENHWMKRKKTGEITPWNFDKMVDKDESGRRFIERLVDTDSYLLGEATLPKNSMLYQEYEVLNELNNVRLSVRSGNRWENRRRQRLGREEKTLLIRNLFMKGGVVTKKAAENLLRKEYGRTYELSGLASESKFMSSMSSYGKLCRIFGAERVNKDSELMEQIIELQTVFEDKETLLHQLRMLDGLSDSDCELLARTHYTGWGKLSRKLLTTKVGECKIGDDFAPQKHSIIEIMRFEDRNFMEIITDKNYGFPEWIDEQNLGADKKQSLESMVDELHVSPKVKRGIIQSVRLIDDISKAVGKKPSRIFLELAGDIQASVRTTSRKNRLLELYKNAGLRKEFSDIYDRLEASDDKGLQDDRWFLYYTQLGKDMYTGEELDIDRLSSDYDIDHIIPQAVTQNDSLDNRVLVSRAANARKTDSFAYLPELVEARRGFWQELLDNRLISQTKFERLVRQNDFGRHEKERFVERSLVETRQIMKNVATLMRRRYGNSSAVIGLNSELTKEMRQYLGFEHKNRDINDYHHAQDALCLGVAGQFAVNRGFFDNGAVSDGAANAYNIYLQDYLRGYREKLKAGDRKHGKAFGFIVGSMASADENKRINPKTGEIAWSEADKDYLRRVMNYRKMLVTQKVGDSFGALYNETRYGAAVKEGHDGIAFDKNKADTSLYGGFSSAKVVYSILVELKGKVRLVNITMQEYSMLGDCPSDEALKKVLVAKKPEYAKAKILLRHIPSMQLIHYKGACMTIKSATELNNARQLWLDCDVYNALDDYLKCGTSKSSIDIMQIWDALFDAVNKHYPLHRVEESTLAKARTKFEKLDLDKQLDVLGMIVVALHADPGRANLSLVGLPSEWKRVRSVSFSDDDEFVFQSPSGLFETKITIAELKKAE

SEQ ID NO: 18038 - protein, 1385 aa, unidentified
  REGION 1..1385: note = Cas Enzyme sequence
MSRKKIVPNYAISLDIGNASVGWAAFTPDYRLMRAKGRELIGVRLFEPAQTAEARRMARTTRRRYSRRRWRLHMLDAIFDAPLAEVDPSFLARRKYSWVHPADENNADYWYGGVLFDSKNQDKRFYKQYPTIYHLRKTLMEDDKQHDIREVYFAVHHLLKYRGNFLVEGDLDSSSVFDSKNLLNLIGEIILCVFDEQLDGSWTAGIDKKRLADTLCTTKGSRSMRVENALAVICESCELPKEQINVIKAIFAGLEGNKLDLAKIFPSEERTSDEKKALGIYFNKSDYEEVRAQVVDSGLLDDEQCELLDKMQKQYSAIALKQLLGNAKSVSESMCASYTRHQRNWDLIKKELRTEDNADEINKHYGELVGWTMVDGRRRSIRGTSTYEKTRQNANKYFSKLIEASNLSESKKMDLKHAIDEDRLFPVQRDSDNGVIPYQLHRNELRRILEKQGKYYPFLLDTFEKNGEQVNKIEGLLTFRVPYFVGPLVEREGMQPSDNGENHWMKRKKSGEITPWNFDKMVDKDESGRRFIERLVDTDSYLLGEATLPKNSMLYQEYEVLNELNNVRLSVRSGNRWENRRRQRLGREEKTLLIRNLFMKGGVVTKKAAENLLRKEYGRTYELSGLASESKFMSSMSSYGKLCRIFGAERVNKDSELMEQIIELQTVFEDKETLLHQLRMLDGLSDSDCELLARTHYTGWGKLSRKLLTTKVGECKIGDDFAPQKHSIIEIMRFEDRNFMEIITDKNYGFPEWIDEQNLGADKKQSLESMVDELHVSPKVKRGIIQSVRLIDDISKAVGKKPSRIFLELAGDIQASVRTTSRKNRLLELYKNAGLRKEFSDIYDRLEASDDKGLQDDRWFLYYTQLGKDMYTGEELDIDRLSSDYDIDHIIPQAVTQNDSLDNRVLVSRAANARKTDSFAYLPELVEARRGFWQELLDNRLISQTKFERLVRQNDFGRHEKERFVERSLVETRQIMKNVATLMRRRYGNSSAVIGLNSELTKEMRQYLGFEHKNRDINDYHHAQDALCLGVAGQFAVNRGFFDNGAVSDGAANAYNIYLQDYLRGYREKLKAGDRKHGKAFGFIVGSMASADENKRINPKTGEIAWSEADKDYLRRVMNYRKMLVTQKVGDSFGALYNETRYGAAVKEGHDGIAFDKNKADTSLYGGFSSAKVVYSILVELKGKVRLVNITMQEYSMLGDCPSDEALKKVLVAKKPEYAKAKILLRHIPSMQLIHYKGACMTIKSATELNNARQLWLDCDVYNALDDYLKCGTSKSSIDIMQIWDALFDAVNKHYPLHRVEESTLAKARTKFKKLDLDKQLDVLGMIVVALHADPGRANLSLVGLPSEWKRVRSVSFSDDDEFVFQSPSGLFETKITIAELKKAE

SEQ ID NO: 18039 - protein, 1385 aa, unidentified
  REGION 1..1385: note = Cas Enzyme sequence
MSRKKIVPNYAISLDIGNASVGWAAFTPDYRLMRAKGRELIGVRLFEPAQTAEARRMARTTRRRYSRRRWRLHMLDAIFDAPLAEVDPSFLARRKYSWVHPADENNADYWYGGVLFDSKNQDKRFYKQYPTIYHLRKTLMEDDKQHDIREVYFAVHHLLKYRGNFLVEGDLDSSSVFDSKNLLNLIGEIILCVFDEQLDGSWTAGIDKKRLADTLCTTKGSRSMRVENALAVICESCELPKEQINVIKAIFAGLEGNKLDLAKIFPSEERTSDEKKALGIYFNKSDYEEVRAQVVDSGLLDDEQCELLDKMQKQYSAITLKQLLGNAKSVSESMCASYTRHQRNWDLIKKELRTEDNADEINKHYGELVGWTMVDGRCRSIRGTSTYEKTRQNANKYFSKLIEASNLSESKKLDLKHAIDEDRLFPVQRDSDNGVIPYQLHRNELRRILEKQGKYYPFLLDTFEKNGEQVNKIEGLLTFRVPYFVGPLVEREGMQPSDNGENHWMKRKKSGEITPWNFDKMVDKDESGRRFIERLVDTDSYLLGEATLPKNSMLYQEYEVLNELNNVRLSVRSGNRWENRRRQRLGREEKTLLIRNLFMKGGVVTKKAAENLLRKEYGRTYELSGLASESKFMSSMSSYGKLCRIFGAERVNKDSELMEQIIELQTVFEDKETLLHQLRMLDGLSDSDCELLARTHYTGWGKLSRKLLTTKVGECKIGDDFAPQKHSIIEIMRFEDRNFMEIITDKNYGFPEWIDEQNLGADKKQSLESMVDELHVSPKVKRGIIQSVRLIDDISKAVGKKPSRIFLELAGDIQASVRTTSRKNRLLELYKNAGLRKEFSDIYDRLEASDDKGLQDDRWFLYYTQLGKDMYTGEELDIDRLSSDYDIDHIIPQAVTQNDSLDNRVLVSRAANARKTDSFAYLPELVEARRGFWQELLDNRLISQTKFERLVRQNDFGRHEKERFVERSLVETRQIMKNVATLMRRRYGNSSAVIGLNSELTKEMRQYLGFEHKNRDINDYHHAQDALCLGVAGQFAVNRGFFDNGAVSDGAANAYNIYLQDYLRGYREKLKAGDRKHGKAFGFIVGSMASADENKRINPKTGEIAWSEADKDYLRRVMNYRKMLVTQKVGDSFGALYNETRYGAAVKEGHDGIAFDKNKADTSLYGGFSSAKVVYSILVELKGKVRLVNITMQEYSMLGDCPSDEALKKVLVAKKPEYAKAKILLRHIPSMQLIHYKGACMTIKSATELNNARQLWLDCDVYNALDDYLKCGTSKSSIDIMQIWDALFDAVNKHYPLHRVEESTLAKARTKFEKLDLDKQLDVLGMIVVALHADPGRANLSLVGLPSEWKRVRSVSFSDDDEFVFQSPSGLFETKITIAELKKAE

SEQ ID NO: 18040 - protein, 1385 aa, unidentified; identical to SEQ ID NO: 18035
  REGION 1..1385: note = Cas Enzyme sequence

SEQ ID NO: 18041 - protein, 1050 aa, unidentified
  REGION 1..1050: note = Cas Enzyme sequence
MERKYGIGLDIGIGSVGYAVISRTNNLDARIEDIGVRLFDSGENIRQKASNAQERRGYRSTRRLLRRRKHRKERIKKFFLKIKLMNEMQLKAWQEQNGNQNVLQTRIKGLNEKLTPEEILDCIIHICNRRGYREFYGDDSKKDNADKDELQKIEGGLANFDEIYQSGGYKSVAEMLINAPVFKTETSFADYRNHKNAKRYILIKREFVKKELEDILNKQSEYYPQLTANNIRIICDDMVFAQRDFETGPGNEDDKTRRFMGFIDSIGQCMYYKDEKRAYRSTVIADIYALVNCLSQLSFVNTETGEILLPENVAKEIINTSLTNASITENDIKNILKQNKLEMRKPGKLEVTVPDTIRTLKTLKAVLTNAGYKYEELIKENQFDINNPSKLHQLCLLLSENITPARRIRALKAKGWNEKLQKEVIRKKFGGTASVCEKYMVEAIEAFKRGETYGNFQARMLKEREDALPDIEKQKYLAPFDKKVDEELVKNTVVFKAVNETRKILNELIRKYGSPEYINIEVADDLGRSFKERAKIIKRINDNKKEKDKIANKLIELGLRKEGEVKPFDIERYRLWEEQEGKDLYTGEVIPVEKILSGIYDVDHIVPFSLILDDTLQNKALVNLGVNRQQKGQQVPLGYLSSADKEDYLKRVNTLFKKKKISIKKYKYLTLSNLYGNRDLLSEWKSRNINDTRYITRFLVNYLSANLLFSSGKAKNVFGVKGIITSRMRRLWLNKKTWGDEQKNRDNNLHHAADAIVIANLTPAYLEIASDKIKLDRIYKDYHKRISDEYLTYLGKAVNKMVKYYGFNREYTEKLLATPYSRVPAMIRNIADEVDIRLWDNSLEFYKDVSEEQFYKNVKAFYKDDAVFADSIKPVLVSYKQNKKYQGKFTKDNPLKKNETDGAYIKKVDSFGNANVLDTKEYYCAELYKNNKNQTILRGIRYVDLKKKNKKLYLITPYPEDYQEHIMYLFANDYIKIFDNIGNIKFSGYYRGIKNSKANRIYCKNNNCNLMEDKTIGKKDVVKKYYVDILGKIGGEIKCSVPFLSQKDNI

SEQ ID NO: 18042 - protein, 1045 aa, unidentified
  REGION 1..1045: note = Cas Enzyme sequence
  REGION 676..692: note = misc_feature - Xaa can be any naturally occurring amino acid
MERKYGIGLDIGIGSVGYAVISKTNNLDARIEDIGVRLFNSGENIRQKASNAQERREYRSTRRLLRRRKHRKERIKKFFLKIKLMNEVQLKEWQEQNGNQNVLQTRIKGLNEKLTPEEILDCIIHICNRRGYREFYGDDSKKDNADKDELQKIEGGLANFDEIYQSGGYKSVAEMLINAPVFKTETSFADYRNHKNAKRYILIKREFVKKELEDILNKQSEYYPQLTANNIRIICDDMVFAQRDFETGPGNEDDKTRRFMGFIDSIGQCMYYKDEKRAYRSTVIADIYALVNCLSQLSFVNTETGEILLPENVAKEIINTSLTNASITENDIKNILKPYKLEMRKPGKLEVKVPDTTKTLKLLKAILTNAGYKYEELIKENQFDVNNPSKLHQLCLLLSENITPARRIRALKAKGWNEKLQKEVIRKKFGGTASVCEKYMIEAIEAFKRGETYGNFQARMLKERENALPDIEKQKYLAPFDKKVVKNAVIFKAVNETRKILNELIRKYGSPEYINIEVANDLGRSFKERAKIIKRINDNKKEKDKIANKLIELGLRKEGEVKPFDIERYRLWEEQEGKDLYTGDVIPVEKILSGIYDVDHIVPFSLILDDTLQNKALVNLGVNRQQKGQQVPLGYLSSADKEDYLKRINTLFKKKKISIKKYKYLTLSNLYGNRDXXXXXXXXXXXXXXXXXTRFLVNYLSANLLFSSGKAKNVFGVKGIITSRMRRLWLNKKTWGDEQKNRDNNLHHAADAIVIANLTPAYLEIASDKIKLDRIYKDYHKRISEEYLTYLGKAVNKMVKYYGFNKEYAEKLLATPNSRVPAMIRNIADETDIRLWDNSLECYKDVSEEQFYKNVRAFYKDDTVFADTIKPVLVSYKQNKKYQGKVADDTLYKNEEKGYYKKVISDNNKSILDARNYYCLELYKNIDDGISLRGIRYVDLKKQYKKLCINVSCPKDYKNHIMYLFNNDYIAIFDKNNNLKFNGYYKGLKSVNNRFIYVKNNNSNLSEYKTIGKKDIIKKYYVDILGKIGGEIKCSVPFLSLKDNI

SEQ ID NO: 18043 - protein, 1129 aa, unidentified
  REGION 1..1129: note = Cas Enzyme sequence
MDFRKYTLGLDLGSASLGWALVELDDKDNPVRLMDAGVRIFDPGVVGGEAEIQKGRDKSKASERRSARQTRKQTHRRSLRQKKLFRLLQEHGLLPSAENSAQQKFSIQRHEILNALDQRLTSAWRGKATLPGSSMDMADQSLVYLLRQNAVDRKLEPFELGRILYHFAQRRGYRSNRLDADDAGESGNADTGEATESSEGATKKAKRAKEPTEKTLGEVAKGISTLRSEMDAKGTRYLGSYFAMVNPHEKRIRHRWTERAMFEDEFTAIWDKQREFHSELLTDQLEKEVRYWLFFQRPLASSNHLVGFCELEKGERRAPWATLEAQRFRLMQKVNDLRVIECRMQNERRLKKEERERILDHLETKGDLTFKALKELLAPSIIDGANMERGIKDKIEGNRVNIHMLRVFGDRWNALSREDRQKAVEQWRTIESPETLKRVGREQWQLDENAAERWGDARLARPPKDYCNLSRLAISKLLPMMETGCPFKTVEREIYNSRFSGAEPMKLVPRVTDYLPSITNPAVMRALTELRKVANAIIREYGKPYQIRIELARELRRNRKDREKQFLDNKARQEKREKGARWILAQQSKPNPSAQDIRDVPGHMVDKWLLAEECGWKCPYTSDPARAQINYSKLFVYPEFEVEHIIPLSRCTDNSLANKTLCHRDENQRKGGRTPWEAYHEDEDRWAQILKRVSQFANGPKIREHPKLRRFKLRSLEEIEGFTRRQLTDTRYTSKLASRLLMALYGGRDTTVSADDDTAEFFDKTGRRIFASTGGVTHLLRDAWVLHPDVVLNMSSMNDGEKRKGKDRSDHRHHAVDALVIALTNEQQVKAVSLHAASKQEKKWPLDYRDLVRGLKTPWNNRDQFLGDVFHRMLVSHKPEHKLGGKLHIDTIYPEPLRDPNDGKHYVSLRRSIVGITDKQIKAIQGDNIRIAVEQKLQEHGGNSKKFDPDNLATLPVLKSRDGRLIPIKKVRVRESKSPESLMSFPGSRQVESESIHHFEFFARRDRKNREEWTHIPVSIIEAHVRYGRKNPVIAHAHPEDQNAEFVFSLMKGDTVEMDYNGSRDVFKVKKFYSSGQIWFTQINNAQKDEEQKKDKTAWSVNPNPLRLLNPQKVTIDPLGRKYGVNRAT

SEQ ID NO: 18044 - protein, 1192 aa, unidentified
  REGION 1..1192: note = Cas Enzyme sequence
MLMSKHVLGLDLGVGSIGWCLIALDAQGDPAEILGMGSRVVPLTNLGDDKAFSKGKAFTANQKRTARRTMRRGFARYQLRRYRLRRELEKVGMLPDAALIQLPLLELWELRERAATAGERLTLPELGRVLCHINQKRGYRHVKSDAAAIVGDEGEKKKDSNSAYLAGIRANDEKLQDEHKTVGQYFAEQLRQDQSESPTGGISYRIKDQIFSRQRYIDEYDQIMAAQRVHYPDILTDEFIRMLRDEVIFMQRPLKSCKHLVSLCEFEKQEKVMRVQQDDGKGGRQLVERKVKFGPKVAPKSSPLFQLCRIYEAVNNIRLTRPDGSPRDITPEERVKIVAHLQSSASLSFAALKKLLKEKALIADQLTSKSGLKGNTTRVALAAALQPYPQYHRLLDMELETRMMTVQLTDEETGEVTEREVAVVTDSYVHQPLYRLWHILYSIEERDAMRRALITQLGMKEEDLDGGLLDQLYRLDFVKPGYGNKSAKFICKLLPQLQQGLGYSEACAAVGYRHSNSPTSEEITERTLLEKIPLLQRNELRQPLVEKILNQMINLVNALKAEYGIDEVRVELARELKMSREERERMAEGNRRREKENKAIAEKIRECGLFPTKSRIRKYMLWEEAGEQCLYCGQILTLSQCLNGDDMEVEHIIPKSVLYDDSYGNKTCACRRCNKEKGNRTALGYIRAKGWEDEYMERINGLLDKKAISYSKHQRLRWLKEDIPSDFLERQLRLTQYISRQAMAILQQGIRRVSASEGGVTARLRSLWGYDDILHTLNLDRYDSMGETERVSREGETTEKLRIKDWSKRKDHRHHAIDALVVASTRQGYIQRLNRVSSESEREAMSGEIEMQKVTKTDKLSLLERWLTQRPHLSVRAVSDKVAEILISYRPGKRVVTRGRNIYLRHGKKCVQSGLLVPRGPLSKETVYGQITVNGEPQIVCKYDLHSLKAKDVDYVVDLALRKRLKELLAQHGGKEKEAFAGDVYMDEAGTQGPIRSVRCFTGLDRGKMKAVKYDEQGDAVGFVSTQNNHHLAIYRTPKGKLVESIVTFWDAVDRARYGIPLVITHPREVMEQVLQRGDIPESVLSLLPPSDWVFVDSLQQDEMVIIGLSDEELQRALEVQDYRKLSEHLYRVQKVSSLYYVFRYHLETSVTDDKNTLGRIPKFHRVRSLADYEKRNIRKVRVDLLGRISLL

SEQ ID NO: 18045 - protein, 1562 aa, unidentified
  REGION 1..1562: note = Cas Enzyme sequence
MKSSNNSKKYYLGLDMGTDSCGWCVTDDKYNIIRSHKKTYDPDGKLIKKEGCHLWGARLFGPAKTAKNRRLNRTARRRLARRRRRIILLRELFQPEMDKIDPNFFRRLDQSNLWNEDKDKELQMEHNFLFNDKDLTDKEYYKDFPTIYHLRKAMVNGLTINDHYYDPKKQFDIREVYLVLAHMIKYRGNFLMEGDVKDSVVDPTYLKQCFDNIDAILISLNNGEDDENEDDKIDTSECCFNVDEKKASKLANEIFKKINKVSYLEDEEGKLFGKFNSKDIRKKILKLINGGSGVKLKDFLPKEILVAHDGDDEYGDKKIDLSSETLEDDINGYGLPESYIEIILEAKKIYDFRTLAYLLHGQSLLCDAMFNVYEEHKEQLAALKRLYKKYATKEQYYFMFRDSRILDGDDSDDEEDKEESNKEESKDKKKKASYVSYIGYTKTKSKAKHTGAHITSEKNISALIKQIKTDLKFDDLKSKVDDPSQQNELSEQDISDIQCIEEAIESNTFLPRQNSRNNGVFPYQLNLNEMRTIIENQSKYYPFLKDKAPSFPDGKTEEYKIVSLLKFKMPYYIGPLSQPNDYVRDDKRDNHWVQFKGENNQGIINPWNFSQIVDLEGTADKFISNLTNYCTYIFGENTLPKESLIFQAYKVLNDLNNLKVNGSLISKEDKDYIIQNVYLKKKKIKGKDIVNALKNKYKLSDEDPTVTTKGSGKSIGEDEVDLTMFNSSLSSFIDMSNPNAFGPEFYKDSTKFELAEKVIELITIVEDKELLKERLKKLELSDNQVNYLFKQKYSGWAPLSRKLLDGITIDCVNENTGEAYPVTIIDVMRDTPLNFMEIYETKNSQFSGFKEKVAELNDEKNICRDDLIDESYASPAMKRSVRQTFKVIDELKKTLNIDHFDRIFVEATRAPGEAGKMVKSRKKQLQEAYDAAKDLVDQELRDDLEKQTDDQLRRKKVYLYFMQLGKSVYSGEKIDLNELDENYDIDHIIPQAKLKDDSFNNMVLVERELNNKKQDEYPIPSTIISEKGRNWIQKLAKIQDKNKRSYFMPKDKANRLLRPELKKLTSDELNGFINRQLTLTNQSVKAVCDILKMTEKGSEIVYSKANFVSDFRKLCGELKPSYDAFVKVRDINDFHHANDAYLNIVVGNVYYEKFKNFYINNRIDYDNNGKKDLSVLASKLFTKTQTDDKTGIVYWEAHFHNEKETDSNGKERTIKVRDEGTESTFDKIEHYMELNDSLITQMRYTQKGDQGLFGHITLMKKAKIKENNTDKYYPLKQHLRSNGEVMDVNKYGGYSNMITPYFMLVKSEGKKGKHIYSLESIPTIYLKSFKKKEEDTINYLSCKNKLKNPVVISDKLLMRTIVKIPYFKNDSNLSLVKLGISGRTGNNIIYINLSELILPLEWKNYYRKISNLLGTNVSSTKSKDLSKYTEQMKNDPTSTLVDGSNKVEHDKNNRFFSYLINNVINKPIFEGLPQTSCSFIKLESKYDEFCSLNTLEQAKIIATIIKLLSCKSVQMQDLSLLSDLPSKLGGIAQGKKLPCGSKISYESCCGLKEFVLFVVPND

SEQ ID NO: 18046 - protein, 1563 aa, unidentified
  REGION 1..1563: note = Cas Enzyme sequence
MENSNNSKKYYLGLDMGTDSCGWCVTDDKYNIIRIHKKTYGPDGKLIKREGCHLWGARLFGPANTAKNRRLNRTARRRLARRRRRIILLRELFQPEMDKIDPNFFRRLDQSNLWNEDKDKELQMEHNFLFNDKDLTDKEYYKDFPTIYHLRKAMVNGLTINGHYYDPKKQFDIREVYLVLAHMIKYRGNFLMEGDVKGSVVDPTYLKQCFDNIDTILISLNNGEDDENEDDKIDTSECCFNIDEKKASKLANEIFKKINKVSYLEDEEGKLFGKFNSKDIRKKILKLINGGSGVKLKDFLPKEILVAHDGDDEYGDKKIDLSSETLEDDINGYSLPESYVEIILEAKKIYDFKTLAYLLHGKSLLCDAMVNVYKEHKEQLAALKRLYKKFATKEQYYFMFRDSRILDGDDSDDEEDKEESNKEESKDKKKKASYVSYIGYTKTNSKAKHTGAHITSEKNISALIKQIKDDLKFDDLKSKVDDPSQQNELSDEDKLDIQCIEEAIESNTFLPRQNSRNNGVFPYQLNLNEMRTIIENQSKYYPFLKDKAPSFPDGKTEEYKIVSLLKFKIPYYIGPLSQPNDYVRDDKRDNHWVQFRGENNQGIINPWNFSQIVDLEGTADKFISNLTNYCTYIFGENTLPKESLIFQAYKVLNDLNNLKVNGFLISKEDKDYIIQNVYLKKKKIKGKDIVNALKNKYKLSDEDPTVTTKGSGKSIGEDEVDLTMFNSSLSSFIDMSNPNAFGPEFYKDSAKFELAEKVIELITIVEDKELLKERLKKLELSDNQVNYLFKQKYSGWAPLSRKLLDGITIDCVNENTGEAYPVTIIDVMRDTPLNFMEIYETKGSQFSGFKEKVAELNDEKNICRDDLIEESYASPAMKRSVRQTFKVIDELKNTLKIDHFDRIFVEATRAPGEVGKMVKSRKKQLQEAYDAAKDLVDQELRDDLEKQTDDQLRRKKVYLYFMQLGRSVYSGEKIDLDKLDENYDIDHIIPQAKLKDDSFNNIVLVERELNNKKQDEYPIPSTIISEQGRKWIQILANIKDKNKRSYFMPKDKENRLLRPESKQLTSDELNGFINRQLTLTNQSVKAVCDILKMTEKGSEIVYSKANFVSDFRKLCGNLRPSYDAFVKVRDINDFHHANDAYLNIVVGNVYYEKFKNFYINNRIEYDNKGKKDLSVLASKLFTKTQADDKTGNIYWEAHFHNEKETDSNGKERTIKVRDEGTESTFDKIEHYMELNDPLVTQMQYTSSGKQGFFNKITLKTKAKDNEDNSDKLFPLKQHLRSDSNKVMDVNKYGGYSDMITPYFMLVKSEGKKGKHIYSLESIPTIYLKSFKKKEEDTINYLSCKNKLKNPVVISDKLLMRTIVKIPYFKNDSNLSLVKLGTSGRTGNNIIYINLSELILPLEWKNYYRKISNLLGTNVSSTKSKDLSKYTEQMKNDPTSTLVDGSNKVEHDKNNRFFSYLINNVINKPIFEGLPKTSCSFIKLESKYDEFCSLNTLEQAKIIATIIKLLSCKSVQKQDLSLLSDLPSKLGGIAQGKKLPCGSKISYESCCGLKEFVLFVVPND

SEQ ID NO: 18047 - protein, 1318 aa, unidentified
  REGION 1..1318: note = Cas Enzyme sequence
MKKKMNYSIALDIGNTSVGWAVIDENNNLLKHRGRNMWGVRLFEEGQTAATRRNFRATRRRLLRRRQRLDLLQELLAQDVLAKDESFFMKLKESFLVKGNGNKIYNFFNDSDFTDQNFYDKYPTIYHLRYKLITNKEKEDIRLVYLALHHIIKYRGNFLYEGQTFNIQDSTIITDLENLLEYLKENFEYDIEFTKDDLKEVEKILTDSSVIKSDKVKEASEVFKADKDSQKVLKEVFKAVLGNKFDFLVICNLGEAENQEDYKTNLSDEEKEPLFETLLGDHFEVYSLLKNIYSSIILREILGTDEEGKVRLLSQAMINRYDDFKKDLAILKRLIKEHFKGKYNYIFREVDDKTPNYYNYMNRPGKTSQIDFYNFLKKVLNQKREELADNDDYKYCIKRIEDKNFLLRQRIKVNAAIPYQIHKQELIAILENQAPYYETIRKNKDKIISLLEFRIPYYVGPLNYDRNNNKYAWVVRKKNGEKIYPWNFEEVVDVKASAEEFIRRMTNKCTYLPKEDVLPKYSLILMEFNVLDELNKITINGDKLSYELKLEIIEECFKKYKIVRESHLVKVLRKYYKYYNSEKLDIRGYRKEKQFAGSLTSYIDFTNIFGEVNDSNFEMIETIIKWITIFQDKKILKEKIKENYPEITDAQLKKILALNYSGWGRLSRKLIYGITTPDQSGLESTILHIMRKTNQNFMQVINSNKYCFAKKIEKIQKESIQKKEKVTLADVQDIPGSPAIKKAIWQAIKIVNEIIKIMKCDPQNIYIENTRSSGKKERTRSRVTWLKECYKKLKVETDIYNQEVARELNEHLETIDNEKLFLYFIQNGKCMYSGETLDPQRLIDYEVDHIIPRSLIKDDSIDNKVLVLKKYNQLKADRDVLPYDIISKMKPYWEKLKDCGLISNKKFYNLCRKEFNEEDIAGFINRQIVETSQIVKHVVNLLYANYPNTKIHTIRPLLVSILREQLSLYKIRDINDYHHAHDAYLTGCVANFIRIRYPKLEKEILYSEYLRLPTERRKYNSGFIVNSFVRNHIDDTTGEVVWDANEQISKIKKVLNYKDCFITKKVEESTGVFYNQTLVGPNMATAPIRASLDPKIYGGYTNVNIAYMVALEYRKGTQMKKVLAGIPIMFAQRFKRDQEALIEYLKEQFRTNEIIILKPKILKSQLVDFDGHLLYLASSGEFNNAKQLILDYEFNELVYLIDKDKLSESDENHKRLNKFYQVFIEKLEKHYPFYQNIARKFKNATNDFEKLDFTKKCKFVLEMLKITQANSTNAYFKNFGIGKLGDRMDRLNGKSLDFDKTIFIDQSVTGMYEKRYRL

SEQ ID NO: 18048 - protein, 1094 aa, unidentified
  REGION 1..1094: note = Cas Enzyme sequence
MAEKINKNENISIGIDLGVADIGWSVIDLAKKEVIDRGVSFFSQAEKAVDRRNFRNIRRRIKRKNHRIERLYKLFQANNIYYENTIDSKLLEKRIRAIKSGEKLEMQDIINIIIYFARHRGYIPFGDEERVNEFVTELRDKGYMPCEIQKELLNTYGQYRGAAYTITHKDYIQELKTLFGNQKRYYPQVLTDNFLNDVIQILDSKRQFWEGPGAPRLNALTKYGRYKVKEDIEKYELDNNYNKYLYENLVGNCKIYIGEKKVNSSNFYAEYFNFYNDLTNLKFSVDEMNNENLSYFEKIDNTTYKLKTFAIEELKEEILNSVKQIKPLIRKKFKVNVIIGEKTVGSESISTFKTYRSIKKVINNEQLFEELTENIDVYNTAIEIINISPDENTRFDMLETKLPHLSYELLNILKTKEIKSKIENKYQNFSEKAIKKYLSLMKQYNKNSSYIERTYPHEINADTEQYKIEHYINQNIEAGELKYISTNFIDDLVASPQTKKSLRKAITVLNKLFRKYGYPAYICIEATTNILSNDQKKEYEKATLENFRTREEARKKLVDLGYDCTDNNINKYLLLKEMDFKCAYCNAPISLNNCEIEHILPKSITGDDSFSNKTISCYDCNHNKGQRTPLAYLTSINQYEEFEKRIKANKNISNAKKGYLLFTGELIKYEKRFKNRNLNDTAYATNELANQLKLFLKAYENNNEEQLDLKIIKIPGKLTAIIRNRNGVEKDRDKGFHHAVDAGVIASIILLPIGRLMALIQNNPDKYWLSNIVSENRDQLFDMLNLPSKIRDSLKEASFENTRCSMEVKKNPQGKLYDANVQKVIKNKKDNQYYKISEIPNIYVNTSSENNSADNNEIKKTIDNIKKVFHDNTKELLCKKNDPHLYNKLHDILEKYSSGGINPFVAYCLENNVAEGEVFNYNIHGIRRDDKTSSPIVKKLRYLKKVTTPFLLEKKSINKKENTFLMYDSLQQYCSRVFKHKETGKLYIMPIYKVCVDFKTKKVLQDSKYYKTLYNEFIGVDRNELDFYMDLFNNEYIRFVNNDATVHEGFVGDFHKNNAKIIVKNCISITQKKTIEIKKINMDILGLYNLNVPK

SEQ ID NO: 18049 - protein, 1010 aa, unidentified
  REGION 1..1010: note = Cas Enzyme sequence
PRRLARSTRKRLRRRQHRLERLKDLFVALGLIARARREAAFISTKHAPSPWQLREEGLIRVLNPEELARALFHIARRRGFKSNRKSELGEKDVGKLLAGVEENTRLLKQGRYATVGEMFSKAPRFAAKKRNHSAFYGHTVARELLIREVEILFERQRDFGNSAAAKALEEDYLAIFSSQRSYDDGDQINRMRGFCTFESKQLRAAKLSYSAECFVLASKCSNLSFGEEGKARQHLSLEQRRQLTALALQLSKLNYKQLRQKLDIPEASRFVGLNYTKAAKQGKDPEEQVFAELKGFHALKKAIEKKCGKTAWTNLAAKPTELDTIAEILTCWKTDDNRQRELLASGVSQMFIDAVIPLNIFSQFINLSTTAIHRLLPLMEQGMQYHEACRQIYHGYGKPGRGQKQQLLPLIPFDDIRNPVIFRALTQTRKLINGIIRKYGSADRVHIELSEELTKSFQQRKRIESGKGQFRREKEQAQEQFAAVYGQLPNGHELHKFRLHQAQKGRCPYSGQAIDSQRLIELGYVEIDHILPWSRTFDDSLNNKVLVLGAENQQKGNQTPYEYIANQDPASPNWQRFRAEVAQYPQAKRWRLLKQNLDQKEVEAFRQRNGTDSSYIAGYLKRFIEQHLKIAGGNKHPVQTCNGTLSNYLKVRWGLLKDLSESDRYHGIDALVVAGLTPSLIEQLAEASREQELWLTDGLQARDKIHLPQPWEGFSQAVRDYVENDIFVSRMPCRKLTGAAHQETVRSAKHIDKGYAVVKTPLANLTLQNLENLHDKDRNLALYSALKDRLADYKGNGKKAFEEPFYMPPGVKKPKLEKTSPQVKSVKLRTSMNDGVPINKGIAAHDSMIRTDVFVRNGQYYLVPIYVADRVKAELPNRAITQRKAKSDWLEMDDNYQFCFSLYRNDLIEIKHKTKGKLLSYYAGCHSSTGAINITLPDRSLPSCGNSWISDTKLAKMQEKGDREIQGIGVKTGLEYFHKYEVDLLGAISRVRCGGDRLGLANPSEHPDKG

SEQ ID NO: 18050 - protein, 1014 aa, unidentified
  REGION 1..1014: note = Cas Enzyme sequence
MLGIDLGIASCGWAVVEQGEGDGRILAWGVRTFDAPETSKERTPTNQLRRQHRGLRRVTARRRQRMNTVRALFAAHGLLPEVGRHALRVPEADPWTLRAAALERRLDGTELAVALGHIAKHRGFRSNRKRAGNAAKDDSTMLKAIEESRQRLTQYRTVGQMFAQDPLYAARRRNRDGDYSRSVLRADLEHEVRVIFERQRTLGSAHATEALRDAFAEAAFRQRPLADSEERIGHCPFEPAERRTARRAYSFEMFRFLSRLAALRVGGRRTERALTAEEIAAAADGFGTQRGMTFARLRRIIALPEDERFAGVPADEEAKPDVVNRVARNGCMQGSKALRDAMGDAAWKALLATPEKLDGIAAIVSFREEASRIREGLARLGLPDDVAEAVMAAFDRGEFADFSGAGHVSAKACRAIIPHLRGGLVYSDACAAAGYDHARRPETKLADIANPVARKAIGEALKQVRAVIAEHGLPDRIHVELAREVGKSQEKRDEIRAGIEKRTREREKLRAAYVETVGREPRGAEDMLRFELWREQNGRCLYTDRCIPPDALVAEDNSVQVDHILPWSRFGDDSFVNKTLCFAGANQQKRGRTPFEWIGADAARWEGFARAVEAIKAMKGRKKRNYLLRDAASVEDKFKARNLNDTRYAARIVLEHLARLYPKEGARRVLSRPGPLTDRLRRGWGVQDLKKVLEPDGEKRRHDDRHHALDALIVAATSESALQRLTRAFQEAEAAGSHRDFSGLLPPWPGFVEEVRAKFADVFVSRAERGRARGEAHGATIRQVEEGPRGAEVYERKAVDALKEVDLARVKDVERNAALVERLRAWIAAGKPKDAPPLSPKGDPVRKVRLRSREREGVAVRDGAAARGEMVRVDVFRKPDARGAAKYYLVPVYPHQVADRRRWPVPPNRAVVAHKEREEDWTDVTSGFEFLFSLTQRSYIEVVTKDGEHIAGYFMGLDRWGGQISISAPHSAQSMKAGIGARTLLSFEKFTVDRLGRRHRIARETRTWHGVPCT

SEQ ID NO: 18051 - protein, 1151 aa, unidentified
  REGION 1..1151: note = Cas Enzyme sequence
VTNWNLGLDLGTNSLGYAAVEYADGSPERILFAGSIIHTGGQDRQESYKSKAGKARRSRNRYQQLRKNRKDMDRILRDNGFPSGEYVVEDAVDKLVVHDPFDVRAALADGHITDDETRELAVSCAVRHMQQRRGQRNSWVSEAFVKDEATQGYSEMYQALRQRCSELSGEFYGELTPAQLISRTRKAVGAVSTKALAVDFFKDLEASESPKAKDTLDERLSKRRGKLKNDKDRIAFDKQAHRLNTYLTRQGLRRSDFIRELNVIAEVQKLDKDFVNAAASLIIFQEHPGKGVKERVGQDELPLEGKREPRAQRSSLVFQEFRIATTVANLRHVNGEPLSADDRKTVKDFLNTWDDTESLPTWTDVSEQIGVPRVKGHDDLSRPPVNQTLLTVLKSGGVVRDFWTGAGTSDAHRQALLDSISHERVLDISDTTDFLVQKWINTLNEEDILTFDKLKFEPGRAAHSATTMRSLLEHMNNTNCDEHIARREVFGVPDGWRPAPNPLGTTVGNPTVDANIRLVKRVFDKLVFEIGSKPQRVVIESTRDITSSPSTREQTHRDNAKRKSDNDKMLANLMHTYKATDGDVRTRAGKMRLIILTEQNGACLYCGDTLTRSAMEIDHIVPRSRGGGSNRLNLAGVCRGCNHSKGNTPFVEWAGGIKSDVFTSAAARIKTMTLRGPARQQSKWKKTYLAQLKTSEADRPIESLSWAAVEVKNQIAGVLDDPSNALLVSGRISSSVRKMGKIDTEKDPLLLRVPNTEPKGKSRVDRRHHAVDAAVLTTLRQRNITVLSERNILREEASLKAVTNGDTIALPDVVWFEEGKRHQGQWRDYSGATAADRLSFAKLKGNLDTLRELLRDAVGDGTVTVTSPVRWTPRTGGIHEETVRPLNRIRLGDAIPADVIDRASSPQLWTALTRLTDYDPKSGLPADDSRTIRVKEDIIGPDDDVTYFPGNGGALALRGGYADAPTIHHFRVAVTTTPRGQKKYHVIRVYQFDAARLHQTGKNVFSTPLDSSTLSMRDAGLSARAAFHNSEWKVIVPGDELVFTPEQIRESSVTALRSMSELFPDETEYRYRVTSFGGDRPIFTNTVVSVGDVKALFPKVDGDDQFPPLIKSILSETKSVISGLEGVRVDRRDILGQDRNSGSVMLRSYVL

SEQ ID NO: 18052 - protein, 1329 aa, unidentified
  REGION 1..1329: note = Cas Enzyme sequence
MAKVKDTYQIGLDLGVASIGWSVVDDNNKLIRKRGQNLWGVRLFDEANTAAERRGFRRQRRTISKRIWRLSLLKNELKSFVIKEDPVFFDRFSKSQIKPEKYMLFDGKYNDATYMREFPTIFHLRVALQSEKKCREYIKRGIYYRLLFLACHDILKTRGNFLSSSSLGGSTGNSKDSINQLINNLVTVIHEIDENSELDYNFIRKALADHLSSKEKINARKSDKNTTFLKAVLGYKFDLNNIVYFSDEKLNFDFNIETWDEQLTNDESIDGILLELFEIYKNIKLNVLIGEHKSLSYAKVTIYEKHKKDLFTLKKDIKKVDNNLNSNHYDDLFLTDGKKVSYTSYVGKLLIDKQKIKIKKETSREDLVKKLVAIRKEYQDKTNDLKLLSYIEEEDFLIIPTNKDNRLIPYQLHFNELEVILNQFINIANSKEAIEHAKNIKILLKFKVPYYAGPLSNHASDEMSNYWLIKKENHKNSKITPFNFDEVVNKRETNKAFIGKMLRKCTYLTNEICIQQETTLYQTYIFYNTINKVKVNDINLTKEQKQILFNNSKSGKTLTKSRIISMLGLPKNSDLTGFSKTDEDKPLQISLSAIKKFEKIFPEYKNNPFYMSFYDDVVNSISLIDSDELDVRREQIQDIIDSYKTIIISNQQVNELASVKSSKWGNLSSKFLNEVLFDDGEGELRTMLETLKDSNLNMMEILYKGDNQLTLDRLNNNDFNLSDSNGLHEYLKTRYISPQAKRTITQANLIIDEIIKIMNGVKPTKISIEFTREKEIYKKETQSRFKQLSEIYKNLESENIQVINELGNLQKNKEEDKLKSKKIYLYFMQLGKDLYSGKSIDFDLLMSNSKFYDIDHIFPQSRIKDDSLDNLVLTSSVINGEKNNIYPLPKEVQDNNKDLWAYLVNKKLISQKKYERLTRITPLSDYELEDFVNRQKTTLDWINLEIANIFNIKYNETNDKNFIIYSKSRHVSAFRNTFNLLKFRELNDFHHAHDAYLNIVLGKAIQKNLYINSDGKFRTYNYERILENTLEDQIKYIQDIFKHNDILVTKKTKINSQGAFWDQNIVSAKEPGKNDGYAPIKNFLEVDKYGGYNGVKTAFFTILDINGKKVIEAIPTVDCSNFYDEEMFNNQKFEHYIASNYSNATIIIPIIPIGQKVLLEGVPLRIAGKSKNSIIYHNSSQLVLDKNTQEYLRQLFSIQRRFKGKKIEENIWLSAGLTKEMNINAFEIILMKVNRLAETHKLYSKHTIDKINGSGDTLDEFKGYSFIDQIETLIMIITKLLKPNSSNQGRLFGTTYGDMPRNKILTSKGISVVKESVTGFYTKIINIDV

SEQ ID NO: 18053 - protein, 1395 aa, unidentified
  REGION 1..1395: note = Cas Enzyme sequence
MEMQASNQLILSHLKDYPIKDYFVGLDIGTNSVGWAVTNKSYELLKFRSHKMWGSRLFDEGESAIARRGFRSMRRRLERRRLRLKLLEELFADAMAQVDPTFFMRLRESKYHYEDKTTGHSSKHILFIDKNYTDQDYYKEYPTIYHLRTKLMKSGTDDIRKLFLAVHHILKYRGNFLYEGASFDSNASTLDDVLKQALENITFNCFDSTAAIGSIGQILMEPGKTKSDKAKAIERFVDIYIITDEVDTSSKTQKEQVKEDKKRLKSFANLVLGLSASLTDLFGSVEDLDEDLKKLQIIGDTYDERRDDLAKAWGDEIHIIDDCKSVYDAIILMSIKEPGLTISESKVKAFNKHKDDLAILKSLLKADKNIYKAMFKADEKGLHNYVHYIKQGRTEETSCNREDFYKYTKKIVEGLSDSNDKEYILSQIELQTLLPLQRIKDNGVIPYQLHLEELKAILDKCGPKFPFLNEVADGFSVAEKLIKMLEFRIPYYVGPLNTHHNVDNGGFAWAVRKASGCVTPWNFDDKIDREKSAAAFIKNLTNKCTYLLGEDVLPKSSLLYSEFMLLNELNNVRIDGKPLEKAVKEHLIEAVFKQDHKKMIKNRIEQFLKDNNYIPKKYKPEITGLDGEIKNDLASYREMVRILGTNFDVSMAEDIIADITIFGESKKMLRETLRNKFSSRLDDDAIKKLSKLRYRDWGRLSRKLLNGIEGCDKTGDGTPETIIKLMRNFNYNLMELLGDKFSFMERIQEINDKLTDGQVVDPHDIIDDLALSPAVKRAVWQALRIVDEVAHIKKALPTRIFVEVTRSNKAEKKKKDSRQKRLSDLYAAIKKDDVLLNGINNEIFGELKSSLAKYDDAALRSKKLYLYYTQMGRCAYTGEIIELSLLNTDNYDIDHIYPRSLTKDDSFDNLVLCKRTANAQKSDTYPISEEIQKAQKPFWTFLKQQGLISERKYERLTRITPLTADDLSGFIARQLVETNQSVKAATTLLRRLYPDIDVVFVKAENVTDFRHDNNFIKVRSLNHHHHAKDAYLNIVVGNVYHEKFTRNFRAFFKKNGANRTYNLAKMFSYDVKCTNAKDGKAWDVKTSMDTVKKMLASNDVRVTKRVYEQKGQLSDINLTKASKVKADIYLPIKANDPIMSQNMKYGGYSDIKNAYYTIIKYSDKKNNSIKAFIPIPIFIATKTLTKQALLGYIKTVLPKANNLRIIYKKVYNDQLLKIDGFNYYLGGRSNDRFCIDNAIQLIVPLEIQFYIKLVEKFTAIISENKNIALKASSVKSRNPINNQVENITLEYTQKLFDYLVSKFNELIYLKMRGNKLTDVNNIGRKQFIKLSLEERCKALAELLNIFTNMNKKLSLSTINVSASRKVVNFKISSLDEFKIVNESITGLYSNEITIV

SEQ ID NO: 18054 - protein, 944 aa, unidentified
  REGION 1..944: note = Cas Enzyme sequence
MEHYKEYNKDLSLKAQKEFNDQITEFNSYYRLGIDLGDKTGVAIVKDNKIILAKTLIDFHTKKLDDRRKSRRNRRTRLSRKKRLARLRSWVMRQKVGDQRLPDPYKIMHDNKYWSIYNKSNSVNKKNWVDLLIHSNSLSADDFVRGLTIIFRKRGYLAFKYLSRLSDKEFEKYIDNLKPPISKYEYEEDLEELSSRVENGEVEEKKFEGLKNKLDKIDKESKDFQVKQREEVKNELEELVDLFAKSVDNKIDKEKWKRELNSLLDKKVRKIRFDNRFILKCKIKGCNRNTPKRENVRDFELKMALNNARSDYPISDEDLNSFRNEVIDIFQKKENLKKGELKGVTISDLRKQLNKTFNKAKIKKGIREQIRSIMFEKISGRSKFCKEHLKEFSEKPVPSDRINYGVNPAREQHDFRVLNFIDKKVFKDKLIDPSKLRYITIESPEPETERLGKGQISEKSSETLKEKLAKETDGIDIYTGEKLKKDFETEHIFPRARMGPSIRENEVASNLETNKEKADRTPWEWFGQDEKRWSEFEKRVNSLYRKKKISERKREILLNKSNEYPGLNPTDLSRIPSTLSDFVESIRDMFVKYGYEEPQTLLQKGKPIIQVVRGRDTQSLRWRWHALDSDIIPEKDRKSSFNHAEDAVIAACTPPYYLRQKILREEAKIKRKVSNKEKEVTRPDMPTKKIAPNWSEFMKTRKEPVIEVIGKVKPSWKNSIMDQTFYKYLLKPFKDNLIKTPNAKNTYKWIGVNGQTDSLSLPSKVLSISNKKVDSSKVLLVHDKDDGKRNWVSKSIGGLLVYITPKDGPKRIVQVKPATQGLLIYRNEDDKVDAVREFINPVIEMYNNGKLTFVEKENEEELLKYFNLLKKGQKFERIRRYDMITYNSKFYYVTKINKNHRVTIQEESKIKAESNKVKSSSGKEYTRKETEELSLQKLAELISI

SEQ ID NO: 18055 - protein, 1084 aa, unidentified
  REGION 1..1084: note = Cas Enzyme sequence
MWRLALDMGTSSIGWSALDIENPENVKILDMGVRIFPDGREPKTGTPLNEARRDARQMRRQRDRKIRRKKTMLNFLVNNGLMPKEREEQQTVVQLDPYTLRAAALERKLIPFELGRIMMQFSIRRGFKSGRKEQQAENTAEREGMLGGIQSLETELRGLTLGQWLCKQREAGNSVRFKAKMEKTKVIYSFYPSRDMYEIEFAAIRKKQEKYYKEINWDRLHWLIFFQRPLKRPERGRCQFYTEEERGYRAFPSAHRFRILQDINNLRYYNEDNIEEIIPVELKLKLFEALNAQKSLSFDKIRKLLGENYTGSFNLEDNKRDKLKGNETSVEFRKLEFFDTIWDKLDFKKQDEIIEKLMIEDDESVIYDFLKPFGLSEKQIQKISGYNLPVGTTMLSSHFLIDCSEIMLKEWLPYSEAVKKMGLHHSKKDKREMQHSLPYYGKVLTGLVSGAKGENYKGNDEERYGRIANPTVHIALNQLRKLVNALIRRFGNPDQIIMEVARELKLSKTKKDELFREQTKNQKENERIEKELKDLGLLKISSEDKKKYKLWEELAVEGIARLCPYCGKTISAKQLISGDVEIEHILPYSRTLLNSRDNLTVAHRKCNQAKKNQSPFEAFGNNPKGFDWNRIMELAAKLPFNKRRKFYPDAMVRFHEDEGGFIDRQITDTAYLSKASKDYLSAICDSNAIWVSPGRLTAMLRGLWGFNTLLNRGHDTWFKNRSDHRHHALDALVIGLCNRHLIAEAARINSSRGYSEIDAPPCPVKRNDIEEQLKSIIVSYKQDHGKEGKLYAETALAKHSYVEQINPEDLEEKEINRIVPKKIQVDIALLVQKEGFRKAKTLIQKKYKHINIFRDKWVTRAPLESLSERDIPNIADPVIREQIQKFVKSHPVQIGQKLQDVLVRFSKKTGIYSLRYFPKDQIPVSINSCNNKAYMPGDYYRVDIWRIPQPKGKYKYDGVFVSRPEAMRQQLHGDDAVSLQKPHPAAKFIISLCKNDIIVLSNETEQELCRIAGFSTTQNKIDIRPLYASDTIAVWKKDTNINFCSAFWPSNIEGQYYKSINVLFGEYKIKLVKITVDGRQIYRS

SEQ ID NO: 18056 - protein, 918 aa, unidentified
  REGION 1..918: note = Cas Enzyme sequence
LNQRRGFKSNRKLDNAEKDSSRMKEAIKELKQKFKEDGARTLGEYLFNLNITKNREQNRRIPIRIRDHGKEYNLYTERSMYENEFDMIWDKQSEYHSELMEQKKEHLKQIIFFQRPLKPQPKGKCRFELDQPRCPVAFPVYQQFRIYQEVNNLILFDFDRNEHELTSAQRETITQILLKQKSATFKSLRKKLGKEFAGDYVFNLESEKRKDLKGDETSFIMRKADYFDEKWDSFTELEKDEVITRLINEDNDLEIENTLVSWLCDKFKITKENAEKIKDIRLPQGIGSVSKKAINKILPFLKEGTRLYVSQIKAGYTVGRTGEIFDEGNLPYYGKIIPHAVAFGTDDPNDIDEIQYGKIANPTVHIALNQMRKFINALTKKCGAPSQIVVELARELKLGQKRLREIENEQSINRKHNEEIADEIKKLGIENTYQNRLKYKLWEDLDSDPAKRCCPYTGRQIPLNAVKGLFSNRFEIEHILPKSKTFDDRPANKTVSYYQANRFKGERSPFDAFGENPENYNWKKILDRGEKLPRNKRWRFYPDAMKNFQDQGELISRMLTDTQYMSRVAKEYMSYVCGDKNVWAIPGKLTAKFRAKWGLNELLSENKEKNRADNRHHAVDAFVVACTDRAMLQKVARATERTRERFIEEMPSPFYDFSFQDTSEKVDKIVVSYKPDHGNAKAAILRDQTVGQLHDETAYGFVSEDEEKGKITLSIRKPLTSLDSIKNIREIASTKIRNELIKLTDAIPQNEIKAILSQYSEKTGIKRAKIHVEKDAKTVIAIRNKKGEVYKYYLSGSNYCADIYCPSKGKKADKWQVDIIPMFKAHQSNFEPEWHKQNPTAKKVMRLFINDYVAFDEDGERKIRRVRKMTGNIVYLRELNIALKEKGKEDIGEQFRPSTFQAKNARKIGIDILGNVCD

SEQ ID NO: 18057 - protein, 1041 aa, unidentified
  REGION 1..1041: note = Cas Enzyme sequence
MKKYRLGIDLGATSLGWCMIELNEENSPKDLIELGVRIFPDGRDAKTNEPLNVKRREHRSMRRNRDRYLQRRAYLMDILVKYGFMPENEKERKQLEHLDPYFLRVKALDKKITLYEVGRIIFHLNQRRGFKSNRKLDNAEKDSSRMKEAIKELKQKFKEDGARTLGEYLFNLNITKNREQNRRIPIRIRDHGKEYNLYTERSMYENEFDMIWDKQSEYHSELMEQKKEHLKQIIFFQRPLKPQPKGKCRFELDQPRCPVAFPVYQQFRIYQEVNNLILLDFDRNEHELTSAQREMITQILLKQKSATFKSLRKKLGKEFAGDYVFNLESEKRKDLKGDETSFIMRKADYFDEKWDSFTELEKDEVITRLINEDNDLEIENTLVSWLCDKFKITKENAEKIKDIRLPQGIGSVSKKAINKILPFLKEGTRLYVSQIKAGYTVGRTGEIFDEGNLPYYGKIIPHAVAFGTDDPNDIDEIQYGKIANPTVHIALNQMRKFINALTKKCGAPSQIVVELARELKLGQKRLREIENEQSINRKHNEEIADEIKKLGIENTYQNRLKYKLWEDLDSDPAKRCCPYTGRQIPLNAVKGLFSNRFEIEHILPKSKTFDDRPANKTVSYYQANRFKGERSPFDAFGENPENYNWKKILDRGEKLPRNKRWRFYPDAMKNFQDQGELISRMLTDTQYMSRVAKEYMSYVCGDKNVWAIPGKLTAKFRAKWGLNELLSENKEKNRADNRHHAVDAFVVACTDRAMLQKVARATERTRERFIEEMPSPFYDFSFQDTSEKVDKIVVSYKPDHGNAKAAILRDQTVGQLHDETAYGFVSEDEEKGKITLSIRKPLTSLDSIKNIREIASTKIRNELIKLTDAIPQNEIKAILSQYSEKTGIKRAKIHVEKDAKTVIAIRNKKGEVYKYYLSGSNYCADIYCPSKGKKADKWQVDIIPMFKAHQSNFEPEWHKQNPTAKKVMRLFINDYVAFDEDGERKIRRVRKMTGNIVYLRELNIALKEKGKEDIGEQFRPSTFQAKNARKIGIDILGNVCD

SEQ ID NO: 18058 - protein, 1087 aa, unidentified
  REGION 1..1087: note = Cas Enzyme sequence
MKEKERKIYRLGIDMGSTSLGWCMLELDQDSQPCNVINMGVRIFPDGRDDKSKEPLSVKRRTVRGARRNHDRYLLRRKALLNFFDREKWLPQTEPERHEVFLLDPITLRKEALDRQLTLPELARAFIHLAKRRGFKSNRKGNKEDKNFSAYKIAMENLENKIKESNARTLGEYLWLRNKDLPSSLQHQRKSIKFRYEKSFADEERIFPTRKMVTDEFDLIWDTQAAFNPLLTPSLKAELKNIIFYQRDLQPQEVGNCLFEIEEKRAPKASPIFQEFRLRQDINHLKLIKKEGFEVRELNNEEREKLFQKLNMKKEVAFAALRQAILGKDEYDKYRFNLEEESKPKKGKKESNPEAGEEEKKSKGKLKGNLTNYSFLRFKQLGAYWMHLEQDKQDRIISLLLDDSLTDEACVMLLQEEGMPGDLARQALDVDLPSGYGSLSKKAMLKIMPFLRQGMIYSEACSAAGYNHSGFYNGEVFDQGNLPYYGELLTRYMQKVNRKTYDEAADQYGKINNPTVHIALNQLRKLINALTLRYGAPAEIHVELAREVKLNAEQNKEINNRIKKNREENERIAKELEKAGLEASKENITKYKLWQELSPDPFDKRCVYCGRQISFLDLFTPEIHIEHILPKSRTYDDSYANKTISHLSCNIDKGEKSPWEAFGNMTGKYDWQSICIRADNLPENKKWRFLPDAMDRFADENELIGRMLNDTRYMTRIAAEYLQYVTGKLPVAVNGKLTSDLREKWKLNSLLGEGDAKERTDHRHHAIDAFVIALTDRSMVKRYADAVKRDTIASNNHSKRFLQDLGDPYPNFNRQRLQSMIDKLVVSYKPDQPNPSLLRSRRQTGGALLEETAFGYLGPDPKNPKYSLYSVRKKVSELEMKDIETVISKELRESLLNLANTCSNDKEFKAKLPAWAEEHKVKKIKTMVTANPKTMIPIKDKNGRIYKYYQAGENLFADIYQIYLPKKNLNKWGIEICNSYAVHQPDFMPEWKKLYPMAKLIMRVYKNDIVAFTNEEGKRELRRVKKMTKDQIYLRELNIAKKPKGKEDIGEAFSPNQLRLKNAAKAGIDIMGRWFDPLGGKNASDRN

SEQ ID NO: 18059 - protein, 1087 aa, unidentified; identical to SEQ ID NO: 18058
  REGION 1..1087: note = Cas Enzyme sequence

SEQ ID NO: 18060 - protein, 1209 aa, unidentified
  REGION 1..1209: note = Cas Enzyme sequence
MKKDYILGLDIGISSVGWGLLELDDNNNPYKIIDVGSRIFTPGEVEKTGDSRAKERREKRGARRIARRREFRLDRVKNLLYENGYLKGNINSNIVSEKNEELSIIFNNMINNYYNGKNTNPYILKVEALDRKLTDEELSIILVHYAKKRGYKSNREEASDKESGKVLTAIKENEKIMKDNNYRTISEMYIKDDKFKNKIKNSPNDYKISVTNEMYLEEINKVLDSQIKFGLITDDFKNQYLEIYNSRRSYAKGPGGNSPYGGDLIERMTGKCNFDGNPRAPKRAFSSEIYVALTKLVNLKYKVNDGEYIKLSEKEIKNIIEKAKEKKSISYKDLTKMIGNNIDFKDLTLSKKEYIKLIEELKKKLNIKKDTKININELSSEDKELYNKLCNDKLLSKTLIELKGYHILKDSVIKAYSKDIWDEVKDNMYLLDDLALYCTNYKVNEDILNKIKESENIDNIFNDIHFVELLPNFKDHLMLSTELIRKLIPIMYGGNTYDKAMNILGYNHSDINGDKEKKDLLVPICVDDNITNQRVIRSLTQTRKVINSIIKKYGMPKIINIETARELAKSRQERNEIAKNNVEKQAENEKIKNQLVELGLFVSTDKISSTDLLKYKLWKEQNEFCGYSMKKISIEDLFGNNIVQIDHILPYSRTYNDNYLNKTLVYTKENQEKGNRTPYEWFGKTDKWDEYETYINNLTISQKKKDNYLLKKLDFDTEREMRSQNLNDTKYISKELSSLIKAYLNVEKVNMYPGAITAKLRARWGFNRLTHSYLSKNYILPKNIKEDINKDRDNHLHHAMDALVIASITPSLQQKITLYEKFSRYIDGLTELQIKNISYIKIEDSEGQYYNDDTGEVETIDIREYIKQQLAENNIYYNRHNISKLEFPLPYENFDKEAKLRVYEQDLDTLKWNLKSYNTYTQKDIDNVHTLIPSIAKTKVSGKMHEETYYGIKEIGKDEDKKIYKTLRTPIEKVKRKDLDNIPDRLSGSKDVYESLVEWFGDYEVGEEVLKANGNKYPVSKSDKEHKEIKKLKLYSEYKNTGHMINKSNVEKGGIYRIDVFKSKDKEDDKLYFAAYDILEIKKINTLKEKNRVDDNFNIKLDYGQGKNSKIMSYTDIINNYDLYISLNKNDLIKITTNDGKESVAYVVGCSSGMLEVKSKLGDGYDIIKTDLNENNIFNKKLDRYQITVSTIKEIKKLSISVLGEISGL

SEQ ID NO: 18061 - protein, 1089 aa, unidentified
  REGION 1..1089: note = Cas Enzyme sequence
MIIIILIDVGSRIFTPGEVEKTGDSRAKERREKRGARRIARRREFRLDRVKNLLYENGYLKGNINSNIVSEKNEELSIIFNNMINNYYNGKNTNPYILKVEALDRKLTDEELSIILVHYAKKRGYKSNREEASDKESGKVLTAIKENEKIMKDNNYRTISEMYIKDDKFKNKIKNSPNDYKISVTNEMYLEEINKVLDSQIKFGLITDDFKNQYLEIYNSRRSYAKGPGGNSPYGGDLIERMTGKCNFDGNPRAPKRAFSSEIYVALTKLVNLKYKVNDGEYIKLSEKEIKNIIEKAKEKKSISYKDLTKMIGNNIDFKDLTLSKKEYIKLIEELKKKLNIKKDTKININELSSEDKELYNKLCNDKLLSKTLIELKGYHILKDSVIKAYSKDIWDEVKDNMYLLDDLALYCTNYKVNEDILNKIKESENIDNIFNDIHFVELLPNFKDHLMLSTELIRKLIPIMYGGNTYDKAMNILGYNHSDINGDKEKKDLLVPICVDDNITNQRVIRSLTQTRKVINSIIKKYGMPKIINIETARELAKSRQERNEIAKNNVEKQAENEKIKNQLVELGLFVSTDKISSTDLLKYKLWKEQNEFCGYSMKKISIEDLFENNIVQIDHILPYSRTYNDNYLNKTLVYTKENQEKGNRTPYEWFGKTDKWDEYETYINNLTISQKKKDNYLLKKLDFDTEREMRSQNLNDTKYISKELSSLIKAYLNVEKVNMYPGAITAKLRARWGFNRLTHSYLSKNYILPKNIKEDINKDRDNHLHHAMDALVIASITPSLQQKITLYEKFSRYIDGLTELQIKNISYIKIEDSEGQYYNDDTGEVETIDIREYIKQQLAENNIYYNRHNISKLEFPLPYENFDKEAKLRVYEQDLDTLKWNLKSYNTYTQKDIDNVHTLIPSIAKTKVSGKMHEETYYGIKEIGKDEDKKIYKTLRTPIEKVKRKDLDNIPDRLGGSKDVYESLVEWFGDYEVGEEVLKANGNKYPVSKSDKEHKEIKKLKLYSEYKNTGHMINKSNVEKGGIYRIDVFKSKDKEDDKLYFAAYDILEIKKINTLKEKNRVDDNFNIKLDYGQGKNSKIMSYK

SEQ ID NO: 18062 - protein, 1145 aa, unidentified
  REGION 1..1145: note = Cas Enzyme sequence
MKWDNTWDREQALETWKNHPFYTSAVVLGIDIGLGGIGLYLRKGNECLFRRTLQYDVPKAAPLETRRGHRAARHARQSAKKRERLLKEWVVKYGLLTQDEIQSIWKNPKVFERAFLHRLRGLEPKGLSSSHALVVCIRHILGLRGYDYHLYFEDALDSSFPWGSDWKIADIRKWAKNGSLEKEYGLELKQMIQNGLVEESLQSKFDDEACELIDQAIERGKGDPIRKMLETHFSQNKQNLREPARGHNFSREQVKAHLRQICENHQHFFPASLFDQAMLELIGDRDSHGKEIYDTKKESIIDYHRKTADDAKKLWERKVKDCTVADFLKKNELLSDSVKTKCAKNEDVDVRLWKLLSFLIERRVDFTDGTRAPLNEAAIGALLDFVREDAAALAAKTKRPKKPPTKTVVKAYQGVMHTSKDSELNAAFDSQITDLLKPKASILNQRANICSASAKILLDLATDNGDHLDASQAKKNLHDYYRYRKNNSSVLGLYPQVEFLLGAPGQYDDDQQSKDKENRKDGQPQEHGILRRLFSDQLVLDTKEHIRIKQLLDGKTRPDYVIIESVGDQPRNTEDRKKITKDQKDRKEAKRKIVAEYKYDIETISPNQVQRIMLFDQQKNPDGKTICPYTGKDLGEDPLAQGLEVEHIFPASRGGISIMENLALTWHEVNQDKGNQTPYEFLGDQTDRYISGMKWNKRKREIFFNKTFEIPDWENMTRTAQLARNLKAQIIQWLQLKDNDMDDTAQAKETRRRICCPTGGMTAACREAWEDHMPADFFYVKNINGTDKKIKNRGNLRHHMWDAAVVSYIAPGNGLNSIYHGGIFESHQTQKGVPKMKPLPELAPPLDEIHKNGGVTCYVSKLRSKSSKSSRTDTTILSPPNKNGKMLSRFKNEVSKSCKDGLVTAFNPGKTEDEFIAHIRYVGITAENLPDKVIRNWLNTPDDKSLRQLDGTPVKKLQLPAGKSPNKFSRFPHYKTIPDFHPGDPNFGKDRTKTLIGFKAASEVNDCLEIYEYTNKNGKADYRSRVIPTPRNLEVYRRTHGKDYQVEQVPPNSKWVAVIRNGDLLLADFDYKRNWVPSPEKAHASVWMRVTAIPTTGQIQTSMAEYSEIKASPYKHFENMNKMKWAPKSASMIYHSYVRSNEAIK

SEQ ID NO: 18063 - protein, 1180 aa, unidentified
  REGION 1..1180: note = Cas Enzyme sequence
MGSRVVPLNNATDAADFSIGKAFTANQERTARRTMRRGFARYQLRRYRLRRELEKVGMLPDAALIQLPLMELWKLRERAATAGECLTLPELGRVLCHINQKRGYRHVKSDAAAIVGDEGEKKKDSNSAYLAGIRANDEKLQDEHKTVGQYFAEQLRQSQNESPTGGISYRIKDQIFSRQRYIDEYDQIMAAQRVHYPDILTDEFIRMLRDEVIFMQRPLKSCKHLVSLCEFEKQERVMRVQQDDGKGGRQLVERKVKFGPKVAPKSSPLFQLCRIYEAVNNIRLIRPDGSPRDITPEERDKLVAYLQTYEAPKPPKRKPAKAKPVKLAHPKLDLDKLKELLCIEEELFADKLLEEGLKGDTTRIALSIILQPYPQYHHLLDMELETRMMTVQLTDEETGEVTEREVAIVTDSYVRQPLYRLWHILYSIEERDAMRRALITQLGMKEEDLDGGLLDQLYRLDFVKPGYGNKSAKFICKLLPQLQQGLGYSEACTAVGYRHSNSPTSEEIAERTLLEKIPLLQRNELRQPLVEKILNQMINLVNALKAEYGVDEVRVELARELKMSREERERMTRQNGQRKEANDKVAERIRQCGLYPTKPRIQKYMLWEEAGKVCLYCGRSIEEEQCLNGDDMEVEHIIPKSVLYDDSYGNKTCACHECNQTKGNRTALEYIRAKGWEAEYMERINDLLKEKKISYSKHQRLRWLKEDIPSDFLERQLRLTQYISRQAMAILQQGIRRVSASEGGVTARLRSLWGYGKILHTLNLDRYDSMGETERVSREGEATEELHITNWSKRMDHRHHAIDALVVACTRQSYIQRLNRLSSEFGRGNKKMEDLEAQEQQAKETGRFSNLERWLTQRPHFSVRTVSDKVAEILISYRPGQRVVTRGRNIYRKKTADGREVTCVQRGVLVPRGELMEASLYGKILSQGRERIVKRYPLHDLKGEVVDPRLRELIAVYNQEITSKVKAKGTPLYLDAAEKQEVRSVRCYVDKPSVAKAIPIRFDECGRAITFVKSGSNHHLALYRTPHGKLEESIVTFWDAVDRARYGIPLVITHPREVIEQVLLRGDVPESVLRLLPPSDWVFVDSLQQDEMVVIGLSDKELQRALEVQDYHKLSEHLYRVQKMSSRDYWFRYHLETSVADDKNTSGRIPKFHRVRSLSDYEKRNIRKVRVDLLGRISLH

SEQ ID NO: 18064 - protein, 1213 aa, unidentified
  REGION 1..1213: note = Cas Enzyme sequence
MSKHVLGLDLGVGSIGWCLIALDAQGDPAEILGMGSRVVPLNNATDAADFSIGKAFTANQERTARRTMRRGFARYQLRRYRLRRELEKVGMLPDAALIQLPLMELWKLRERAATAGECLTLPELGRVLCHINQKRGYRHVKSDAAAIVGDEGEKKKDSNSAYLAGIRANDEKLQDEHKTVGQYFAEQLRQSQNESPTGGISYRIKDQIFSRQRYIDEYDQIMAAQRVHYPDILTDEFIRMLRDEVIFMQRPLKSCKHLVSLCEFEKQERVMRVQQDDGKGGRQLVERKVKFGPKVAPKSSPLFQLCRIYEAVNNIRLIRPDGSPRDITPEERDKLVAYLQTYEAPKPPKRKPAKAKPVKLAHPKLDLDKLKELLCIEEELFADKLLEEGLKGDTTRIALSIILQPYPQYHHLLDMELETRMMTVQLTDEETGEVTEREVAIVTDSYVRQPLYRLWHILYSIEERDAMRRALITQLGMKEEDLDGGLLDQLYRLDFVKPGYGNKSAKFICKLLPQLQQGLGYSEACTAVGYRHSNSPTSEEIAERTLLEKIPLLQRNELRQPLVEKILNQMINLVNALKAEYGVDEVRVELARELKMSREERERMTRQNGQRKEANDKVAERIRQCGLYPTKPRIQKYMLWEEAGKVCLYCGRSIEEEQCLNGDDMEVEHIIPKSVLYDDSYGNKTCACHECNQTKGNRTALEYIRAKGWEAEYMERINDLLKEKKISYSKHQRLRWLKEDIPSDFLERQLRLTQYISRQAMAILQQGIRRVSASEGGVTARLRSLWGYGKILHTLNLDRYDSMGETERVSREGEATEELHITNWSKRMDHRHHAIDALVVACTRQSYIQRLNRLSSEFGRGNKKMEDLEAQEQQAKETGRFSNLERWLTQRPHFSVRTVSDKVAEILISYRPGQRVVTRGRNIYRKKTADGREVTCVQRGVLVPRGELMEASLYGKILSQGRERIVKRYPLHDLKGEVVDPRLRELIAVYNQEITSKVKAKGTPLYLDAAEKQEVRSVRCYVDKPSVAKAIPIRFDECGRAITFVKSGSNHHLALYRTPHGKLEESIVTFWDAVDRARYGIPLVITHPREVIEQVLLRGDVPESVLRLLPPSDWVFVDSLQQDEMVVIGLSDKELQRALEVQDYHKLSEHLYRVQKMSSRDYWFRYHLETSVADDKNTSGRIPKFHRVRSLSDYEKRNIRKVRVDLLGRISLH

SEQ ID NO: 18065 - protein, 1034 aa, unidentified
  REGION 1..1034: note = Cas Enzyme sequence
MSGFIIGLDLGVASIGSCAILNKRIDSAAVSIFPEGVNVSPLGKESSRNTTRREKRQIRRQLFRKNKRRKLLTEILQSLGWFPEHILDVNELMQLDPYPLRAKGVSNALTREEFGRVLFHLSKRRGFKSSRKSGGTEEGVLFEGDKTGTKKGIAELQEEMHKNGFKTVGQYLAALNPHEVRIRNRYLLREDLVDEYELLWETQLKFHPEWKKPDNFEEIIQKHFNIKYHDKLLESDLPTFLRDYVIYYQRKLKSQKGLVSPCKLEPKAKRAPASCLLFQEFRILQKLHDIRLIGKGKTNESLTQKQVENAFEWLNISPDKNFKQLKKELKISDDELNFKETDKIKGNRTAYELSKVFGKLVWNSFSEKEQFNRWRILYDAEDDDWLTNYGKQKWGLTAAETDKLLKVSLEKDYAELSQTAMKKLVPLMKSGGLDYTDAAKKAGYDHGLNTKKETLSDILGEPQNLRNPIVQQGLFELRKTVNAIIKDYGAKPDKIRIEFARELKMPKKKREGLSNANKNREKERDEIRNILFDEFNIKEPSRTDILKYQLWLETNKQCLYTGEFIGKEELFSPNIEIEHIEPLSRSLNDSQSNKTLSIKRFNNLKGNDLPFEMMEKGKITTSEYDEIVERAKILVRKGGYNKFRRFLKKSIDADMVSRQLNDTAWLAVEARKYLQTICPNVEVIAGQATAELRHLWGLNRILNRHGLDIKNRDDHRHHAVDAVVVACTDIGMIQQLSKLHEKGRKATNERFPPPWEGFRNDVKDAVNQILIKHKVRSRVRGQLHDETIYGPVKGFQQQQLTNERGLPVFKSRKELTALSEAMIDKIGDKKIKEIVKNRIREHGVEPTGKFKIPANAFSEPLYLPTKKGGKIPIRRVRIHDVATSKIKLKTGKYVDSGNNHHIVIFSKPDGKKDGIVVSLFEVAQRKRNKQPIYQTDVGEENTFLMTLQINELVLLNGEHFEAAEINWNNVSNEELSPYLYRIQMLTDGKVTFRHHLTSVLKNDSNVEIGRAIKTPNSFNGIKVTVNESGEIRPA

SEQ ID NO: 18066 - protein, 1034 aa, unidentified
  REGION 1..1034: note = Cas Enzyme sequence
MSGFIIGLDLGVASIGSCVVLNKRIDSAAVSIFPEGVNVSPLGKESSRNTTRREKRQIRRQLFRKNKRRKLLTEILQSLGWFPEHILDVNELMQLDPYPLRAKGVSNALTREEFGRVLFHLSKRRGFKNSRKSGGTEEGVLFEGDKTGTKKGIAELQEEMHKNGFKTVGQYLAALNPHEVRIRNRYLLRKDLVDEYELLWETQLKFHPEWKKPDNFEEIIQKHFNIKYHDKLLESDLPTFLRDYVIYYQRKLKSQKGLVSPCKLEPKAKRAPASCLLFQEFRILQKLHDIRLIGKGKTNESLTQKQVENAFEWLNISPDKNFKQLKKELKISDDELNFKETDKIKGNRTAYELSKVFGKLVWNSFSEKEQFNRWRILYDAEDDDWLTNYGKQKWGLTAAETDKLLKVSLEKDYAELSQTAMKKLVPLMKSGGLDYTDAAKKAGYDHGLNTKKETLSDILGEPQNLRNPIVQQGLFELRKTVNAIIKDYGAKPDKIRIEFARELKMPKKKREGLSNANKNRGKERDEIRNILFDEFNIKEPSRTDILKYQLWLETNKQCLYTGEFIGKEELFSPNIEIEHIEPLSRSLNDSQSNKTLSIKRFNNLKGNDLPFEMMEKGKITTSEYDEIVERAKILVRKSGYNKFRRFLKKSIDADMVSRQLNDTAWLAVEARKYLQTICPNVEVIAGQATAELRHLWGLNRILNRHGLDIKNRDDHRHHAVDAVVVACTDIGMIQQLSKLHEKGRKATNERFPPPWEGFRNDVKDAVNQILIKHKVRSRVRGQLHDETIYGPVKGFQQQQLTNERGLPVFKSRKELTALSEAMIDKIGDKKIKEIVKNRIREHGVEPTGKFKIPANAFSEPLYLPTKKGGKIPIRRVRIHDVATSKIKLKTGKYVDSGNNHHIVIFSKPDGKKDGIVVSLFEVAQRKRNKQPIYQTDVGEENTFLMTLQINELVLLNGEHFEAAEINWNNVSNEELSPYLYRVQKLTSGGVTFRHHLTSVLKNDSNVEIGRAIKTPNSFNGIKVTVNELGEIRPA

SEQ ID NO: 18067 - protein, 1096 aa, unidentified
  REGION 1..1096: note = Cas Enzyme sequence
MDCVKSFRYRLGVDVGVASLGIAILALKDDLHSKTGEPDYFIHSGSVRTYPIPEGAAERRTKRSIRRNIERRKRRLDRLSDLLADNGIGYRRKDVPKKTLNLSPIKIRAKASREKVALAHLARALLHMARHRGSSAFRESAIKDDKDARQTAEGIKCLRDEMVAKGFSTYGQYLRQREKKNLPTRIKQEKMANGKDGYAYYPSREMLQEEFETIWNKQANFFTGTLTDSLKEKVKDELFFQRAITSPPPGKCPYFPEEFRLPRASRLFQMRRIYEETNHLKFSGKSREPIPYGMAERDKVVARLMAGEDLTFAEIKKTIGLKKTDKVSLEDTQTRKGIAGYPFERELGAREVLGDAWLQADENTQDKILEVLATVHDDDKAKKALSDILDGDREAAKRALEAHLPSGWGRMGQTATVKILKELKDDVVPARVAEDRAGLFHVMTPDGVVYDRLPYYGEILVGHTVSPMWVSDYRRLTDSPPATNPEEEEFGRIPNPVVHLALNQIRHTVNAVIRKYGLPDSIHIELARDLNKSAEARDEAAKQNEKNRKASDEAAEELKKIEVIEVKVNHLNIQKYKLWKQQGCACVYTGQALSLNDLYCGHVDVDHILPRSKTYLDSMANKVVCLRSANAEKSNRAPYDAFANNENYDWDAILRRVDKLPNNKKWRFEADAMKNFEEAPEAYRARYGTDNSYIARVARQYLACLCGEPSKVVAVSSYIVSLLRGKWGLTKILGSRGGGKKNRDDHRHHFIDALTAACATRGMVQRIQREAARCEKEGLDDFVDTIAPPFGTPKEFSNAAREATLERVSLSRKADHSTAGQLHEDTLFGIVDGSDKNGSYVCCKRKKLADYNTLEKLEKPKIKATLPDLPEIEKARDELEAIKASIRNFVTQATRELEEKRNRDIALGKKEKTISKSAVFSRAVELHKAAGGKTQFTLYEKNKLVNIRRAKDGNRPTGGYISGRNHRKDFYLDGKGKLRWQIISMMDANDKHFTPEAKKPGNELLWSAHKDDILEMDDPDSGGKRIRVAVAKFSEGKMTLLPISEARDSKTRYEWKEKGLKFLYQHAAQRIVTDSLGDITWRFPALPRTGKAEPSP

SEQ ID NO: 18068 - protein, 1094 aa, unidentified
  REGION 1..1094: note = Cas Enzyme sequence
MKMQKQSFRYRLGVDVGVSSLGIAVLKLKDGGKPDSEEPNYDIFTGVVRVYPIPEGAAERREKRAMRRNIERRKRRLDRLSDILATHGIGTPRKDVPKKILDLSPIKLRAKASREKIELAHLSRALLHMARHRGSSAIRESTIKDDDKEARQVAGGIKALRKEMADKGFATYGQYLRWLEKNNRATRINQQKLASGKDGYAYYPSREILREEFKIIWDRQAGFYPETLTDALKAKVAGELFFQRAITSPPPGKCPYFLSEDRLAKASRLFQVRRIYEESNHLRFSKRYGEIIGYGIVERDQIVARLMAGEDLTFAQIKTILDLKKTDKVNMEGTRTRKGIAGYPFDRGLGDSDGLGDTWLKADESKQDEILRILSVVHDDDRAIEALSEALNGDREAALRALKVPLPSGWGHMGLTATQKILVELQKDVVPARQAEDLAGLFHASTADGVVYDRLPYYGEILVGHTVPPMWVSDYRRDTDKPPHTDPQEQKYGRIPNPVVHLALNQIRQSVNAIIEQYGMPESVHIELARDLNKSAEARDEQAKQNKKNQLASEEAAKALASIDETPNRLKIQKYKLWKEQGGICVYTGNCLALTDLYSGNADIDHILPRSITYSDSMANKVVCTSGSNADKSNKAPYAAFADDPKYDWPAIQRRVEKLPENKQWRFRADALKRFEEDPEQFRSRYGIDNSYIARVARQYLSCLYGEPHNVVSVSSYIVSLLRGKWGLQNILGSKKDGRKARDDHRHHFIDALVTAFATRGMVQRIQTEAARCERANLENFVETIAPPFGGVKEFCNAVKTATFERVLLSRKPDHAKGGQLHEDTLLGILSGPDKNGSYVCRVRKKLSDYTTLAAFEKPKIQDTLPDLAEINQAGEELNSLKISVRGFIGQAMEELEVERAADKAEGKKGRNISDMAVFSRAIELHKYAGGQSRFTLYEKKKLVNLRRARDGNRATGGYVSGRNHRKDFYLDSSGVLCWQLVSMLEANDQNFMPMAELPGNELLWSAHKEDTLLIDHPDGDGRRIRVVVAKFDGPKMGVVPDTDARDAKQREMWEFGLKFFSGQRAQRIVLNALGEITWLFPPLPATGKRALPS

SEQ ID NO: 18069 - protein, 1093 aa, unidentified
  REGION 1..1093: note = Cas Enzyme sequence
LINYRLGLDVGTNSLGWCVLQIDKDKQPVSMLDWGVRIFDDGREPAKKDIPGESSAVQRRVARGMRRRYDRLIMRRKNTIKQLVKFGLFPEDKNARKELEKLNPLQLRNDAIEKKLTPYETGRALFHLQQRRGFKSNRKDAQKDGNNELAGMKGAIADLEQILESQYTLGQFLYKQNIERKPIRFRSKVNEKGKAEYNFYPSRQMAEDEFKSIWETQQKHNPTIFTEDARKAIHKAIFHQRPLKPQPKGKCSIFSTDTRMDWALPSAQKFRIIKEVNNLAFTAPYSMRGQKLNGEQRNKLYTELSLKNHLTFTQIKKALGSSEYQFNLEVPGRDKIEGDRTAKIMRDEKRFGKEWDKLTLEQQDDIISKIIIDDEKHPDYMDDETLENWLCENYKITHEQANKVVNAPLPDGCASFGKTVISAILPKMEEGMLEYEAIAACGWNHSNDNTGEIYDILPYYGEILEKHVVKNEKSSDPMVRKYGRIGNPTVHIALNQIRRLMNKLKERYGCWPQEIVIEMARNLKNGTKEISKIVKEIDKNTKQREKWKEEIEACKSGAKATKDDYVKMKLWTELATDPTQRKCVYTGKTISQSMLFSGNQVQVDHILPKSRTLDNTSANLVLVTSEGNQIKKNRTPYEAFKNRDDECSYEKVLERSNSLPKSKRWRFFEDAMEIFDSKAKTIVRKSSIDGGEIVIDTCLEPFAARQLNDTSYIAKIGKKYLAYACENGESSVIATPGTLTGLLRKSWGLNDLISTDGEKNRNDHRHHAIDALIVALTTRSMVQRVSTAAAREEKERIKIEKILGEQKPWAGFEWEGLQKRLDEIVVSHKPDHGSPAQKGGGTSGRMHEDTYYGYAGEGKKKGTIAIVVRKPLSSITKFSDLDSVRDLALQDALKNFIGDRDDIANTLQEFSSAETINGEPNIWKGIQRIRMLSERTSNVLVNVQKKPDGSPSKIAVGGNNYKADIYRTKEGKKAGKWQIEFIKTFDINKSNFIPNWKKEFPDAEFIMSLYKGDVVAYEDNGQLVIRKIIILPNSGQISLIPCNLSKSETKTPPSIKVGGMEERRFRKLYIEIDGSVYDPLGILTTKPKEYDAA

SEQ ID NO: 18070 - protein, 1199 aa, unidentified
  REGION 1..1199: note = Cas Enzyme sequence
MENTNKKYVLGLDIGISSVGWGLIELNENNEPYKIKDTGVRIFSPGENVKTGESKNIARREKRGTRRILRRRKFRINRIRYLLAEYNFLKKSNKNVISDIYEDLKEQYNILIDNYYKEKDINPFELKTEALNRKLSNEELAIILVHYAKHREYKSNRDEDNDDSGKVKSSIKENEKIMHEKNYRTISEMFALDEKFNDRIHNTTGDYRMSVNREMVLNDIENVLNCQIKFGLIDEKFKEEYIKIWSSQRHYSKGPGGNSKYGGNLIEKMTGICKYTGEPRAPKQAPSTEIFNALTLMVNLRYKSNENYEKLTEEEINKILELALTKDSVTYKNLKEILDKETITIKGLELSKKEWIDCLNNFKVKILKLGKNDEVNLNELTKEEQEKFYKIKQEKLFSKKFVELKTTSAFRKEFSRAFGKNIWEKLLDNIKILDEIAVILTNYKTKEDIIEQVENSEIIDNNLIECILHLPNLKDHNNLSLSLIRNLNKLMKTGMLYNEAMSELGYNFSDLTINKEKFDILLPINSENEISNQRVIRSLAQTRKIINAIIKKYGMPYKINIETARELAKSLDERKKIKRNQEENKENNDKIKKELCELLPNKFQNENKVSSFDLLKYKLWKEQQNICPYSLEKITIEELYDNGIVQVDHILPYSRTFDDSYFNKTLVKAKENQIKGNRTPYEWFKSDRERWENYPMYKSYINSLNIPDKKKDNYLLTNLTQEIENEMRNQNLNDTKYITRYLTSFLKAYLNVPLVDSVNGTITSKLRTRWGLNNITHSLQSPSYYIKDVDIENDIKKNRENHLHHAMDACIIACSNKSIIQKITNYEKYKRYFENKVDVSIESLLKNNYIYKSEETDDYIDEETGEIIKTESLEEYYKDLIDNNYLVKNNKNRYTVLFPQPYENFTNELKAKIFERNESQQKFMLEGLHTYTEDELKEVAPLIPVFAKNKVKGSLHGETLYGYKKENDNEFITKRASVISKSFKQDDLENIINKDNGSKEVYETLKEWLSNYDNGEEAYKNSGYPKDKTEKIIKKVKLQLLYEGKGHNINNKIVDKENIQKILVFKDIETNTLYFCGLDRFDILNLKKNKDYEITLWKSQGVSLKESYNKLNTKYTKLLELAKNDFVEIEKNNGNKCYCYINGFTDGKLDIKSYIGDNYDIVGNNKLFNKFYSGGQYQISTTSIKNIIKIKLNTLGKIE

SEQ ID NO: 18071 - protein, 1197 aa, unidentified
  REGION 1..1197: note = Cas Enzyme sequence
MKNDKFVLGLDIGISSVGWALVNIDDDGKPTKIKDVGVRIFTPGENVKTGESKTQDRRLKRGVRRVLRRRAFRVNCIRMLLAENNFLPKPKSNIQSEKFNELKVFYDKIVNDYYKSKDTNPFILKVEALDRKLSGEELSIILVHYAKHRGYKSNRDENDSDTGKVKSAITENEKLMSEKKYRTVSEMLIKDDKFKDKIHNTSDDYKMSVTRSMIEEEINKVLDSQIKFGLITEDFKSKYLETWSSQRHFSEGPGGNSKYGGDLIARMTGLCKFTNEPRAPKQAPSSEIFVALTKLVNTKIKINNEEEYRPLTEEEIDKILNSALKKKTFTYNDIRKCLNTETLVVNNLDLTTKEFTKVLKEFKNKILKRDDEERVDFSLISDENKAVFEEMKSKEKLNKKFIEFKSISEFKSKFNAFGSEEWNNLLNNIEVLDEIAVILTNNKTEESVKKAVKDSNLIDNKYIETILSLPNLKDHMNLSLSLIRKLNKIMINGITYDKAMEQLGYNHSDLINEENKKNLLVPVNINKDLRNQRVIRSLSQTRKVLNAIIKKYGMPYKINIETAGELAKDKKERDRIKKRNEDNKDNNEKLKKQILELKSNTIFKSESDISGFDLLKFKLWNEQQGICAYSGKTISIDELFDNNIVQVDHILPYSRTYDDSYNNKTLVLTKENQDKKNRTPYEWLKNTERWEKFKKYINSLETINEKKKNNYLLTNLTPDIENQMRNQNINDTKYITRYLTSFLKAYLNVPVVDSVNGIITAKLRARWGFNNITHSLQSTTYYIKDVDENNDVNKNRENHLHHALDACIIACTNKSLIQNITNYEKYKNYIESQAFHNANNNIDNEFITKIDDKYVDVETGEIIETSQFKEYYNELLEKNYIIKNNNKVRVMFPKPYDDFDIDVRARIFERNPEQLKFMLEGMKKYSEKEINEITPIIPSFAKNKVSGSLHEETLKGVKTINDVKYSTLRTSVLSLTDKNIEKIFDKENGNKVIYKSLKEWLNGYKTGEEAYKQKGYPKDTDGNIIKKVKLQEEFSNKGHKVGTSIAEKGNIYKILMFKDRSNGSLYFAGLDLFDILNIKKNKDYEITVWKSRTQKDVIKYADASVLYEYNDNYLMKNDFVEIIKNDNKCAFCYITGFSQGKIEISSYLGDAYDLIGNNKLFTNFYAGGQYPITISTIKSIKKINLSVLGKITKSKTE

SEQ ID NO: 18072 - protein, 1325 aa, unidentified
  REGION 1..1325: note = Cas Enzyme sequence
MKNFNNDYYAGFDIGTDSVGYAVANIDYNLCKFKGNAMWGVDLFEESNSAAERRTLRSARRRGLRKRNRIEWLQMLFDEEISKVDNAFYQRLKESCLYLDDKSSNVPYAVFADGNYTDKEFHTDYPTIYHLRKELIKSSQPHDVRLVYLALHHIIKHRGHFLFDNMGSDFESESSFETLFDDLKLYLKEEYEIEFECNDSLRFSEILKDKTLKKTAKSSESYMLFGYSKRNNPYETALIDLMCGRKVKFSDMFGDKSFDSEEVNGITFESGYDDNENTYRDLLQEKFDLIEKAKAVYDWAILADILNGEKYISFAKVKTYEEHSSDLKMLKDFVKERCKSLYGEIFRITKDKLDNYTAYCGKYKENGRNGVIQYRTNQADFCKYLKKRFEKLDKTGYEEMFDKIENGTFMPKIVVKDNGVIPMQVNRSELKAILKNASTYLEFLNKKDENGISVSDKIVKIFEFRIPYYVGPLNNHSLKFWIVRSDEKIYPWNFDSVVDIEQSAENFINNLTSKCTYLPTKDVIPKNSILYSAFTVLNELNNLRLDGKKPDVSLKQAIFNDLFMTHKKVRRKDLLNYLKSEKGITPDITGIDGDFKSSMRSAIEMSQFNLTDSEKEDAIKAITVFGDDKKLLRKRLKRQLGSKLSDEDIMRISKLKYKDWGRLSKEFLTEVYNVDKNTGELQFNIIHALWQTNDNLMELLGSKYGFEQSRQNYLDGIQTGQSLEKMVENLYISPAVKRPVYQSLKIMHEINKIQGHAPKKIFVEMTRKDGVKGDKGRKESRKTKLVDLYKKCGEDSGELWESLEKTPDDEFKRDRLYFYYTQFGKCMYTGEPINLSELYNQNIYDVDHIFPRSKVKDDSLDNRVLVKKQVNAHKDNTYPLDSYIREKMKGFWHFLMDKGLISKKKYERLTRATELTDSELSDFIARQIVETSQSTKAVASLFKELYPDTEIVYVKASTVSEFRHEYDFLKCREVNDFHHAKDAYLNIVVGNVYNERCTHNKSIFIEGLKTKAYSLNKMFSFNTPNAWSIDDNKSIKIVRKTMNKNNIRFTRYAFTKNGELFKRKPLKKGRGQAPLKQNSPLSDISKYGGYDKPTSSYFSFVKYEGKKGKEMRRLVAIDSYIKAQYEANPEKYLSETLGLKNPVVLIPVVKYNACIEIDGFRMHISAKTDKRIQYKPAMQLTVSYDTEKYIRNVVKLNSKPENYNITELDKVSTDENLKLFDILTSKMTDTILKVKFGDMGVKIASHRDAFEKLDVRKQCFVLAEILKIIHCNILEGDLTFIGGAKQSGSIKMSSVISGIKGVKSIYLVHQSVTGLFEKKIDLLHM

SEQ ID NO: 18073 - protein, 1386 aa, unidentified
  REGION 1..1386: note = Cas Enzyme sequence
  SITE 389: note = misc_feature - Xaa can be any naturally occurring amino acid
MKKQNNYYIGLDLGTNSVGWAVTNEKYELLHLKRKPAIGVNTFEKAKTAEQRRNYRSTRRRLARRKQRVLLLQTFFAEEVAKKDPTFFLRLNNSPYFKEDKHHSLQDTKFSLFNDKDFTDKDFHKKYKTIYHLQNDIISQPDKKFDIRLVYLAVHHLIKYRGNFIKQDENINVAEFTNSLVTDAFQELAHYFEDTDLIAAQNFFVNENVRKYEAIVSDKTNGGLKRATDKIFEQFEIKDKTLKTLLSLALGKVTRLNQIFSDEIVDDEQGKITIDFKSISYEEKYNDIKTVIGEVNIVLIDELKRLYDYFVISRLMDGKTLVAEAMVEKYEKHRSDLALLKKIFREHASKEDYRKVFTTLYTTDDKGKKKVITDVNYPRYIGKKSPYVXVKKGDYADFKKFLNKMFKDLGLLSLNDVIKVQEGLDDETFLPLINSKDNATIPYQFNEYQLRLILENQSKYYKFLNEKVDESSLTTLEKIMSIISFKIPYYIGPLVAEDNHPFAWVKRKSFEKVTPWNFSDVIDEATSASRFIERMTNKCTYIPTEDVLPREAILYQEYLALDVLNNLKINGEAIDNYAKQTLLTALYSNKTPLTKKRIATILAKNKNDVVAVSGIDDDVKLAFTSLHKFKAILGENQDLTIEDMEKIIFYRTIFTEQKMFNKKVDELLGHRLSEELCKKIKQLKFKEWSRFSNAFLTGFSKTLNKPVLFDEKTGEVISIIDIMRNNVLSLQQVIHHEKYGVLEALNKYNESMKTNENAFEDVYNLYLSPSVKRPVIKAIHLVDEIIKANDNKLPKKIFLEVTRHDDFARKGTKTISRKKQLDNLYKIAVKESKDLKDLMDELNKKTDADLRSRKLYLYFLQHGKCLYTGNPIALENLVMGDYDIEHIIPQSLITDDSLNNICLVESNINKAKGDVYPLPRTIVNVEKMKPFWERLMKRGFMSESKYQRLIRMSELTEEERFSFINRQLVETSQANKAVAKILEDRYGKGSVVYSKAQRVSDFRHKFKLLKQRDLNKAHHAHDAYLNIVVGNYNDAQTRLAYINKQTGKNFKFNPATAFEEKSFLDVWDKKSNLATIKAVLSRKNILFTQGTYISKGEFYDQQLSPAGEGKLTPVKESGPLSDTTKYGGYSSLNTSHFALVEIPKKRGSERRLIQVTRLHFAKIASGKMTLEEYLITYVGLENPKVIIDVIPLNSLIKRGKTIRSISGFDSGNTLIAHNHQEPFFSKDIEDSYYYLNRYLREIELREKEDTELLTSNEPYTIIIGNRNEKEKVQKIVISKESNEKTYLELAMHFAKDIYEHIFRGVNDTLLSNLDNFKTKSIYEQANIIKQLVMLLQTGALPASINLTSVGLNKSINRNRNINLIEKGDKLLIQSITGLYDKEICLA

SEQ ID NO: 18074 - protein, 1386 aa, unidentified
  REGION 1..1386: note = Cas Enzyme sequence
  SITE 389: note = misc_feature - Xaa can be any naturally occurring amino acid
  SITE 1129: note = misc_feature - Xaa can be any naturally occurring amino acid
  SITE 1207: note = misc_feature - Xaa can be any naturally occurring amino acid
MKKQNNYYIGLDLGTNSVGWAVTNEKYELLHLKRKPAIGVNTFEKAKTAEQRRNYRSTRRRLARRKQRVLLLQTFFAEEVAKKDPTFFLRLNNSPYFKEDKHHSLQDTKFSLFNDKDFTDKDFHKKYKTIYHLQNDIISQPDKKFDIRLVYLAVHHLIKYRGNFIKQDENINVAEFTNSLVTDAFQELAHYFEDTDLIAAQNFFVNENVRKYEAIVSDKTNGGLKRATDKIFEQFEIKDKTLKTLLSLALGKVTRLNQIFSDEIVDDEQGKITIDFKSISYEEKYNDIKTVIGEVNIVLIDELKRLYDYFVISRLMDGKTLVAEAMVEKYEKHRSDLALLKKIFREHASKEDYRKVFTTLYTTDDKGKKKVITDVNYPRYIGKKSPYVXVKKGDYADFKKFLNKMFKDLGLLSLNDVIKVQEGLDDETFLPLINSKDNATIPYQFNEYQLRLILENQSKYYKFLNEKVDESSLTTLEKIMSIISFKIPYYIGPLVAEDNHPFAWVKRKSFEKVTPWNFSDVIDEATSASRFIERMTNKCTYIPTEDVLPREAILYQEYLALDVLNNLKINGEAIDNYAKQTLLTALYSNKTPLTKKRIATILAKNKNDVVAVSGIDDDVKLAFTSLHKFKAILGENQDLTIEDMEKIIFYRTIFTEQKMFNKKVDELLGHRLSEELCKKIKQLKFKEWSRFSNAFLTGFSKTLNKPVLFDEKTGEVISIIDIMRNNVLSLQQVIHHEKYGVLEALNKYNESMKTNENAFEDVYNLYLSPSVKRPVIKAIHLVDEIIKANDNKLPKKIFLEVTRHDDFARKGTKTISRKKQLDNLYKIAVKESKDLKDLMDELNKKTDADLRSRKLYLYFLQHGKCLYTGNPIALENLVMGDYDIEHIIPQSLITDDSLNNICLVESNINKAKGDVYPLPRTIVNVEKMKPFWERLMKRGFMSESKYQRLIRMSELTEEERFSFINRQLVETSQANKAVAKILEDRYGKGSVVYSKAQRVSDFRHKFKLLKQRDLNKAHHAHDAYLNIVVGNYNDAQTRLAYINKQTGKNFKFNPATAFEEKSFLDVWDKKSNLATIKAVLSRKNILFTQGTYISKGEFYDQQLSPAGEGKLTPVKESGPLSDTTKYGGXSSLNTSHFALVEIPKKRGSERRLIQVTRLHFAKIASGKMTLEEYLITYVGLENPKVIIDVIPLNSLIKRGKTIRSISXFDSGNTLIAHNHQEPFFSKDIEDSYYYLNRYLREIELREKEDTELLTSNEPYTIIIGNRNEKEKVQKIVISKESNEKTYLELAMHFAKDIYEHIFRGVNDTLLSNLDNFKTKSIYEQANIIKQLVMLLQTGALPASINLTSVGLNKSINRNRNINLIEKGDKLLIQSITGLYDKEICLA

SEQ ID NO: 18075 - protein, 1072 aa, unidentified
  REGION 1..1072: note = Cas Enzyme sequence
  SITE 140: note = misc_feature - Xaa can be any naturally occurring amino acid
  SITE 363: note = misc_feature - Xaa can be any naturally occurring amino acid
  SITE 430: note = misc_feature - Xaa can be any naturally occurring amino acid
  SITE 823: note = misc_feature - Xaa can be any naturally occurring amino acid
MKKQNNYYIGLDLGTNSVGWAVTNEKYELLHLKRKPAIGVNTFEKAKTAEQRRNYRSTRRRLARRKQRVLLLQTFFAEEVAKKDPTFFLRLNNSPYFKEDKHHSLQDTKFSLFNDKDFTDKDFHKKYKTIYHLQNDIISXPDKKFDIRLVYLAVHHLIKYRGNFIKQDENINVAEFTNSLVTDAFQELAHYFEDTDLIAAQNFFVNENVRKYEAIVSDKTNGGLKRATDKIFEQFEIKDKTLKTLLSLALGKVTRLNQIFSDEIVDDEQGKITIDFKSISYEEKYNYIKTVIGEVNIVLIDELKRLYDYFVISRLMDGKTLVAEAMVEKYEKHRSDLALLKKIFREHASKEDYRKVFTTLYTXDDKGKKKVITDVNYPRYIGKKSPYVIVKKGDYADFKKFLNKMFKDLGLLSLNDVIKVQEGLDDETFXPLINSKDNATIPYQFNEYQLRLILENQSKYYKFLNEKVDESSLTTLEKIMSIISFKIPYYIGPLVAEDNHPFAWVKRKSFEKVTPWNFSDVIDEATSASRFIERMTNKCTYIPTEDVLPREAILYQEYLALDVLNNLKINGEAIDNYAKQTLLTALYSNKTPLTKKRIATILAKNKNDVVAVSGIDDDVKLAFTSLHKFKAILGENQDLTIEDMEKIIFYRTIFTEQKMFNKKVDELLGHRLSEELCKKIKQLKFKEWSRFSNAFLTGFSKTLNKPVLFDEKTGEVISIIDIMRNNVLSLQQVIHHEKYGVLEALNKYNESMKTNENAFEDVYNLYLSPSVKRPVIKAIHLVDEIIKANDNKLPKKIFLEVTRHDDFARKGTKTISRKKQLDXLYKIAVKESKDLKDLMDELNKKTDADLRSRKLYLYFLQHGKCLYTGNPIALENLVMGDYDIEHIIPQSLITDDSLNNICLVESNINKAKGDVYPLPRTIVNVEKMKPFWERLMKRGFMSESKYQRLIRMSELTEEERFSFINRQLVETSQANKAVAKILEDRYGKGSVVYSKAQRVSDFRHKFKLLKQRDLNKAHHAHDAYLNIVVGNYNDAQTRLALLINKRARILNSILQLHLRKKVFLMFGIRKVI

SEQ ID NO: 18076 - protein, 1386 aa, unidentified
  REGION 1..1386: note = Cas Enzyme sequence
  SITE 140: note = misc_feature - Xaa can be any naturally occurring amino acid
  SITE 221: note = misc_feature - Xaa can be any naturally occurring amino acid
  SITE 363: note = misc_feature - Xaa can be any naturally occurring amino acid
  SITE 823: note = misc_feature - Xaa can be any naturally occurring amino acid
  SITE 1207: note = misc_feature - Xaa can be any naturally occurring amino acid
  SITE 1273: note = misc_feature - Xaa can be any naturally occurring amino acid
MKKQNNYYIGLDLGTNSVGWAVTNEKYELLHLKRKPAIGVNTFEKAKTAEQRRNYRSTRRRLARRKQRVLLLQTFFAEEVAKKDPTFFLRLNNSPYFKEDKHHSLQDTKFSLFNDKDFTDKDFHKKYKTIYHLQNDIISXPDKKFDIRLVYLAVHHLIKYRGNFIKQDENINVAEFTNSLVTDAFQELAHYFEDTDLIAAQNFFVNENVRKYEAIVSDKTXGGLKRATDKIFEQFEIKDKTLKTLLSLALGKVTRLNQIFSDEIVDDEQGKITIDFKSISYEEKYNYIKTVIGEVNIVLIDELKRLYDYFVISRLMDGKTLVAEAMVEKYEKHRSDLALLKKIFREHASKEDYRKVFTTLYTXDDKGKKKVITDVNYPRYIGKKSPYVIVKKGDYADFKKFLNKMFKDLGLLSLNDVIKVQEGLDDETFLPLINSKDNATIPYQFNEYQLRLILENQSKYYKFLNEKVDESSLTTLEKIMSIISFKIPYYIGPLVAEDNHPFAWVKRKSFEKVTPWNFSDVIDEATSASRFIERMTNKCTYIPTEDVLPREAILYQEYLALDVLNNLKINGEAIDNYAKQTLLTALYSNKTPLTKKRIATILAKNKNDVVAVSGIDDDVKLAFTSLHKFKAILGENQDLTIEDMEKIIFYRTIFTEQKMFNKKVDELLGHRLSEELCKKIKQLKFKEWSRFSNAFLTGFSKTLNKPVLFDEKTGEVISIIDIMRNNVLSLQQVIHHEKYGVLEALNKYNESMKTNENAFEDVYNLYLSPSVKRPVIKAIHLVDEIIKANDNKLPKKIFLEVTRHDDFARKGTKTISRKKQLDXLYKIAVKESKDLKDLMDELNKKTDADLRSRKLYLYFLQHGKCLYTGNPIALENLVMGDYDIEHIIPQSLITDDSLNNICLVESNINKAKGDVYPLPRTIVNVEKMKPFWERLMKRGFMSESKYQRLIRMSELTEEERFSFINRQLVETSQANKAVAKILEDRYGKGSVVYSKAQRVSDFRHKFKLLKQRDLNKAHHAHDAYLNIVVGNYNDAQTRLAYINKQTGKNFKFNPATAFEEKSFLDVWDKKSNLATIKAVLSRKNILFTQGTYISKGEFYDQQLSPAGEGKLTPVKESGPLSDTTKYGGYSSLNISHFALVEIPKKRGSERRLIQVTRLHFAKIASGKMTLEEYLITYVGLENPKVIIDVIPLNSLIKRGKTIRSISXFDSGNTLIAHNHQEPFFSKDIEDSYYYLNRYLREIELREKEDTELLTSNEPYTIIIGNRNEKEKVXKIVISKESNEKTYLELAMHFAKDIYEHIFRGVNDTLLSNLDNFKTKSIYEQANIIKQLVMLLQTGALPASINLTSVGLNKSINRNRNINLIEKGDKLLIQSITGLYDKEICLA

SEQ ID NO: 18077 - protein, 1369 aa, unidentified
  REGION 1..1369: note = Cas Enzyme sequence
VGWAVTNEKYELLHLKRKPAIGVNTFEKAKTAEQRRNYRSTRRRLARRKQRVLLLQTFFAEEVAKKDPTFFLRLNNSPYFKEDKHHSLQDTKFSLFNDKDFTDKDFHKKYKTIYHLQNDIISQPDKKFDIRLVYLAVHHLIKYRGNFIKQDENINVAEFTNSLVTDAFQELAHYFEDTDLIAAQNFFVNENVRKYEAIVSDKTNGGLKRATDKIFEQFEIKDKTLKTLLSLALGKVTRLNQIFSDEIVDDEQGKITIDFKSISYEEKYNDIKTVIGEVNIVLIDELKRLYDYFVISRLMDGKTLVAEAMVEKYEKHRSDLALLKKIFREHASKEDYRKVFTTLYTTDDKGKKKVITDVNYPRYIGKKSPYVIVKKGDYADFKKFLNKMFKDLGLLSLNDVIKVQEGLDDETFLPLINSKDNATIPYQFNEYQLRLILENQSKYYKFLNEKVDESSLTTLEKIMSIISFKIPYYIGPLVAEDNHPFAWVKRKSFEKVTPWNFSDVIDEATSASRFIERMTNKCTYIPTEDVLPREAILYQEYLALDVLNNLKINGEAIDNYAKQTLLTALYSNKTPLTKKRIATILAKNKNDVVAVSGIDDDVKLAFTSLHKFKAILGENQDLTIEDMEKIIFYRTIFTEQKMFNKKVDELLGHRLSEELCKKIKQLKFKEWSRFSNAFLTGFSKTLNKPVLFDEKTGEVISIIDIMRNNVLSLQQVIHHEKYGVLEALNKYNESMKTNENAFEDVYNLYLSPSVKRPVIKAIHLVDEIIKVNDNKLPKKIFLEVTRHDDFARKGTKTISRKKQLDDLYKIAVKESKDLKDLMDELNKKTDADLRSRKLYLYFLQHGKCLYTGNPIALENLVMGDYDIEHIIPQSLITDDSLNNICLVESNINKAKGDVYPLPRTIVNVEKMKPFWERLMKRGFMSESKYQRLIRMSELTEEERFSFINRQLVETSQANKAVAKILEDRYGKGSVVYSKAQRVSDFRHKFKLLKQRDLNKAHHAHDAYLNIVVGNYNDAQTRLAYINKQTGKNFKFNPATAFEEKSFLDVWDKKSNLATIKAVLSRKNILFTQGTYISKGEFYDQQLSPAGEGKLTPVKESGPLSDTTKYGGYSSLNISHFALVEIPRKRGSERRLIQVTRLHFAKIASGKMTLEEYLITYVGLENPKVIIDVIPLNSLIKRGKTIRSISGFDSGNTLIAHNHQEPFFSKDIEDSYYYLNRYLREIELREKEDTELLTSNEPYTIIIGNRNEKEKVQKIVISKESNEKTYLELAMHFAKDIYEHIFRGVNDTLLSNLDNFKTKSIYEQANIIKQLVMLLQTGALPASINLTSVGLNKSINRNRNINLIEKGDKLLIQSITGLYDKEICLA

SEQ ID NO: 18078 - protein, 1386 aa, unidentified
  REGION 1..1386: note = Cas Enzyme sequence
MKKQNNYYIGLDLGTNSVGWAVTNEKYELLHLKRKPAIGVNTFEKAKTAEQRRNYRSTRRRLARRKQRVLLLQTFFAEEVAKKDPTFFLRLNNSPYFKEDKHHSLQDTKFSLFNDKDFTDKDFHKKYKTIYHLQNDIISQPDKKFDIRLVYLAVHHLIKYRGNFIKQDENINVAEFTNSLVTDAFQELAHYFEDTDLIAAQNFFVNENVRKYEAIVSDKTNGGLKRATDKIFEQFEIKDKTLKTLLSLALGKVTRLNQIFSDEIVDDEQGKITIDFKSISYEEKYNDIKTVIGEVNIVLIDELKRLYDYFVISRLMDGKTLVAEAMVEKYEKHRSDLALLKKIFREHASKEDYRKVFTTLYTTDDKGKKKVITDVNYPRYIGKKSPYVIVKKGDYADFKKFLNKMFKDLGLLSLNDVIKVQEGLDDETFLPLINSKDNATIPYQFNEYQLRLILENQSKYYKFLNEKVDESSLTTLEKIMSIISFKIPYYIGPLVAEDNHPFAWVKRKSFEKVTPWNFSDVIDEATSASRFIERMTNKCTYIPTEDVLPREAILYQEYLALDVLNNLKINGEAIDNYAKQTLLTALYSNKTPLTKKRIATILAKNKNDVVAVSGIDDDVKLAFTSLHKFKAILGENQDLTIEDMEKIIFYRTIFTEQKMFNKKVDELLGHRLSEELCKKIKQLKFKEWSRFSNAFLTGFSKTLNKPVLFDEKTGEVISIIDIMRNNVLSLQQVIHHEKYGVLEALNKYNESMKTNENAFEDVYNLYLSPSVKRPVIKAIHLVDEIIKVNDNKLPKKIFLEVTRHDDFARKGTKTISRKKQLDDLYKIAVKESKDLKDLMDELNKKTDADLRSRKLYLYFLQHGKCLYTGNPIALENLVMGDYDIEHIIPQSLITDDSLNNICLVESNINKAKGDVYPLPRTIVNVEKMKPFWERLMKRGFMSESKYQRLIRMSELTEEERFSFINRQLVETSQANKAVAKILEDRYGKGSVVYSKAQRVSDFRHKFKLLKQRDLNKAHHAHDAYLNIVVGNYNDAQTRLAYINKQTGKNFKFNPATAFEEKSFLDVWDKKSNLATIKAVLSRKNILFTQGTYISKGEFYDQQLSPAGEGKLTPVKESGPLSDTTKYGGYSSLNISHFALVEIPRKRGSERRLIQVTRLHFAKIASGKMTLEEYLITYVGLENPKVIIDVIPLNSLIKRGKTIRSISGFDSGNTLIAHNHQEPFFSKDIEDSYYYLNRYLREIELREKEDTELLTSNEPYTIIIGNRNEKEKVQKIVISKESNEKTYLELAMHFAKDIYEHIFRGVNDTLLSNLDNFKTKSIYEQANIIKQLVMLLQTGALPASINLTSVGLNKSINRNRNINLIEKGDKLLIQSITGLYDKEICLA

SEQ ID NO: 18079 - protein, 1386 aa, unidentified
  REGION 1..1386: note = Cas Enzyme sequence
MKKQNNYYIGLDLGTNSVGWAVTNEKYELLHLKRKPAIGVNTFEKAKTAEQRRNYRSTRRRLARRKQRVLLLQTFFAEEVAKKDPTFFLRLNNSPYFKEDKHHSLQDTKFSLFNDKDFTDKDFHKKYKTIYHLQNDIISQPDKKFDIRLVYLAVHHLIKYRGNFIKQDENINVAEFTNSLVTDAFQELAHYFEDTDLIAAQNFFVNENVRKYEAIVSDKTNGGLKRATDKIFEQFEIKDKTLKTLLSLALGKVTRLNQIFSDEIVDDEQGKITIDFKSISYEEKYNDIKTVIGEVNIVLIDELKRLYDYFVISRLMDGKTLVAEAMVEKYEKHRSDLALLKKIFREHASKEDYRKVFTTLYTTDDKGKKKVITDVNYPRYIGKKSPYVIVKKGDYADFKKFLNKMFKDLGLLSLNDVIKVQEGLDDETFLPLINSKDNATIPYQFNEYQLRLILENQSKYYKFLNEKVDESSLTTLEKIMSIISFKIPYYIGPLVAEDNHPFAWVKRKSFEKVTPWNFSDVIDEATSASRFIERMTNKCTYIPTEDVLPREAILYQEYLALDVLNNLKINGEAIDNYAKQTLLTALYSNKTPLTKKRIATILAKNKNDVVAVSGIDDDVKLAFTSLHKFKAILGENQDLTIEDMEKIIFYRTIFTEQKMFNKKVDELLGHRLSEELCKKIKQLKFKEWSRFSNAFLTGFSKTLNKPVLFDEKTGEVISIIDIMRNNVLSLQQVIHHEKYGVLEALNKYNESMKTNENAFEDVYNLYLSPSVKRPVIKAIHLVDEIIKANDNKLPKKIFLEVTRHDDFARKGTKTISRKKQLDDLYKIAVKESKDLKDLMDELNKKTDADLRSRKLYLYFLQHGKCLYTGNPIALENLVMGDYDIEHIIPQSLITDDSLNNICLVESNINKAKGDVYPLPRTIVNVEKMKPFWERLMKRGFMSESKYQRLIRMSELTEEERFSFINRQLVETSQANKAVAKILEDRYGKGSVVYSKAQRVSDFRHKFKLLKQRDLNKAHHAHDAYLNIVVGNYNDAQTRLAYINKQTGKNFKFNPATAFEEKSFLDVWDKKSNLATIKAVLSRKNILFTQGTYISKGEFYDQQLSPAGEGKLTPVKESGPLSDTTKYGGYSSLNISHFALVEIPKKRGSERRLIQVTRLHFAKIASGKMTLEEYLITYVGLENPKVIIDVIPLNSLIKRGKTIRSISGFDSGNTLIAHNHQEPFFSKDIEDSYYYLNRYLREIELREKEDTELLTSNEPYTIIIGNRNEKEKVQKIVISKESNEKTYLELAMHFAKDIYEHIFRGVNDTLLSNLDNFKTKSIYEQANIIKQLVMLLQTGALPASINLTSVGLNKSINRNRNINLIEKGDKLLIQSITGLYDKEICLA

SEQ ID NO: 18080 - protein, 1386 aa, unidentified
  REGION 1..1386: note = Cas Enzyme sequence
MKKQNNYYIGLDLGTNSVGWAVTNEKYELLHLKRKPAIGVNTFEKAKTAEQRRNYRSTRRRLARRKQRVLLLQTFFAEEVAKKDPTFFLRLNNSPYFKEDKHHSLQDTKFSLFNDKDFTDKDFHKKYKTIYHLQNDIISQPDKKFDIRLVYLAVHHLIKYRGNFIKQDENINVAEFTNSLVTDAFQELAHYFEDTDLIAAQNFFVNENVRKYEAIVSDKTNGGLKRATDKIFEQFEIKDKTLKTLLSLALGKVTRLNQIFSDEIVDDEQGKITIDFKSISYEEKYNDIKTVIGEVNIVLIDELKRLYDYFVISRLMDGKTLVAEAMVEKYEKHRSDLALLKKIFREHASKEDYRKVFTTLYTTDDKGKKKVITDVNYPRYIGKKSPYVIVKKGDYADFKKFLNKMFKDLGLLSLNDVIKVQEGLDDETFLPLINSKDNATIPYQFNEYQLRLILENQSKYYKFLNEKVDESSLTTLEKIMSIISFKIPYYIGPLVAEDNHPFAWVKRKSFEKVTPWNFSDVIDEATSASRFIERMTNKCTYIPTEDVLPREAILYQEYLALDVLNNLKINGEAIDNYAKQTLLTALYSNKTPLTKKRIATILAKNKNDVVAVSGIDDDVKLAFTSLHKFKAILGENQDLTIEDMEKIIFYRTIFTEKKMFNKKVDELLGHRLSEELCKKIKQLKFKEWSRFSNAFLTGFSKTLNKPVLFDEKTGEVISIIDIMRNNVLSLQQVIHHEKYGVLEALNKYNESMKTNENAFEDVYNLYLSPSVKRPVIKAIHLVDEIIKANDNKLPKKIFLEVTRHDDFARKGTKTISRKKQLDDLYKIAVKESKDLKDLMDELNKKTDADLRSRKLYLYFLQHGKCLYTGNPIALENLVMGDYDIEHIIPQSLITDDSLNNICLVESNINKAKGDVYPLPRTIVNVEKMKPFWERLMKRGFMSESKYQRLIRMSELTEEERFSFINRQLVETSQANKAVAKILEDRYGKGSVVYSKAQRVSDFRHKFKLLKQRDLNKAHHAHDAYLNIVVGNYNDAQTRLAYINKQTGKNFKFNPATAFEEKSFLDVWDKKSNLATIKAVLSRKNILFTQGTYISKGEFYDQQLSPAGEGKLTPVKESGPLSDTTKYGGYSSLNTSHFALVEIPKKRGSERRLIQVTRLHFAKIASGKMTLEEYLITYVGLENPKVIIDVIPLNSLIKRGKTIRSISGFDSGNTLIAHNHQEPFFSKDIEDSYYYLNRYLREIELREKEDTELLTSNEPYTIIIGNRNEKEKVQKIVISKESNEKTYLELAMHFAKDIYEHIFRGVNDTLLSNLDNFKTKSIYEQANIIKQLVMLLQTGALPASINLTSVGLNKSINRNRNINLIEKGDKLLIQSITGLYDKEICLA

SEQ ID NO: 18081 - protein, 1346 aa, unidentified
  REGION 1..1346: note = Cas Enzyme sequence
NTFEKAKTAEQRRNYRSTRRRLARRKQRVLLLQTFFAEEVAKKDPTFFLRLNNSPYFKEDKHHSLQDTKFSLFNDKDFTDKDFHKKYKTIYHLQNDIISQPDKKFDIRLVYLAVHHLIKYRGNFIKQDENINVAEFTNSLVTDAFQELAHYFEDTDLIAAQNFFVNENVRKYEAIVSDKTNGGLKRATDKIFEQFEIKDKTLKTLLSLALGKVTRLNQIFSDEIVDDEQGKITIDFKSISYEEKYNDIKTVIGEVNIVLIDELKRLYDYFVISRLMDGKTLVAEAMVEKYEKHRSDLALLKKIFREHASKEDYRKVFTTLYTTDDKGKKKVITDVNYPRYIGKKSPYVIVKKGDYADFKKFLNKMFKDLGLLSLNDVIKVQEGLDDETFLPLINSKDNATIPYQFNEYQLRLILENQSKYYKFLNEKVDESSLTTLEKIMSIISFKIPYYIGPLVAEDNHPFAWVKRKSFEKVTPWNFSDVIDEATSASRFIERMTNKCTYIPTEDVLPREAILYQEYLALDVLNNLKINGEAIDNYAKQTLLTALYSNKTPLTKKRIATILAKNKNDVVAVSGIDDDVKLAFTSLHKFKAILGENQDLTIEDMEKIIFYRTIFTEKKMFNKKVDELLGHRLSEELCKKIKQLKFKEWSRFSNAFLTGFSKTLNKPVLFDEKTGEVISIIDIMRNNVLSLQQVIHHEKYGVLEALNKYNESMKTNENAFEDVYNLYLSPSVKRPVIKAIHLVDEIIKANDNKLPKKIFLEVTRHDDFARKGTKTISRKKQLDDLYKIAVKESKDLKDLMDELNKKTDADLRSRKLYLYFLQHGKCLYTGNPIALENLVMGDYDIEHIIPQSLITDDSLNNICLVESNINKAKGDVYPLPRTIVNVEKMKPFWERLMKRGFMSESKYQRLIRMSELTEEERFSFINRQLVETSQANKAVAKILEDRYGKGSVVYSKAQRVSDFRHKFKLLKQRDLNKAHHAHDAYLNIVVGNYNDAQTRLAYINKQTGKNFKFNPATAFEEKSFLDVWDKKSNLATIKAVLSRKNILFTQGTYISKGEFYDQQLSPAGEGKLTPVKESGPLSDTTKYGGYSSLNTSHFALVEIPKKRGSERRLIQVTRLHFAKIASGKMTLEEYLITYVGLENPKVIIDVIPLNSLIKRGKTIRSISGFDSGNTLIAHNHQEPFFSKDIEDSYYYLNRYLREIELREKEDTELLTSNEPYTIIIGNRNEKEKVQKIVISKESNEKTYLELAMHFAKDIYEHIFRGVNDTLLSNLDNFKTKSIYEQANIIKQLVMLLQTGALPASINLTSVGLNKSINRNRNINLIEKGDKLLIQSITGLYDKEICLA

SEQ ID NO: 18082 - protein, 1191 aa, unidentified
  REGION 1..1191: note = Cas Enzyme sequence
MGEIMNIETEKFYENIKNKLKDNEYRLGLDLGVGSIGWAILSLKKEGEKYVSGEIVASGSRIFEASAGAEDRRLKRLQRNAHRHKRERLFYLWKFLGDKNLALKAPDKIEKENPLDGDTSKKRFPEKTLKKDPYVLRAKALEEKLELYDLGYVIYHIANHRGTSSVRTFTDDDETKKKEIKELQEKATKTLDLLKNNKYKTYGELIYKEKIKPFNDRVEEYKKNNKKIDFKKVQIRNSSNMNDFIITRDLALKEIREILNKQREFYGEDKKKTEKNFIIDDDFTNKIVELVNFEYEKLVPAPGRCPYFQEEYKLPKSHPLSEERRIWESLNNVRVIEPVLKVDEVISYKERDLTQGEKNKLFEVLKQQKELSEGKIKKLLGYNEKYELTLQGRNKENQKLKGYRNIDLEKMSFWSRLDEEQKDSFFYDWISTVGDDELKNKLQNKYNLSEEEANDALKKVELVKGYSPIGKKATLIINEYIKKGLSFGESIDEAVKDGKISLNEVKIYDTLPYYGEVLSDLTQPVICKALFEKFKNKNYKKPHTDPNEEKWGRIANPVVHQTLNELRKLINEVVKATGKKPCEINLEVARELKKSAEERDYIIREQDLNEKKRDEIYEKYCKGREQLPQNAMLKFRLYEEQDKKCPYCGEIISPDDIYNSRVDIDHIFPISESLDNSRNNMVLSHNTCNGNGEKGKRSPYQAFYGTDRWNTILGYLNECKGMKNKKWRFMEGSYEEFLKNLPIKKRFSSDTSYISKSAARYLSCLFDKKSRVVCYKGGLTAQLRLSWDINGLLVPHIKELLYDQEKETFKKYDSLNIKLRSDHRHHALDAIVLAYADRNYSNLLNRLSAKGHNIDFNEKNWLSKILIPPDNKELEEFKEEILNKIKEIFTSIKQDHNPNGELIKETYYRVYLVNGKYLLCSKKMVKDIKADCIDDIEKELNKGRREIENSENKELKSMFQKNINVLNRIKDNFEIAKTELEKENEKAKENGKKIDDINEKKIIKKDIEITGGFYYSFQPNKEKGKFYILKEPTENKSGCGYDTGENLCLDLYYDKNGKLCGEIIRKIDIMRNLEPEYKKKGYQLFERIYQGDVLECDLSQEKKALSVSSPNAVNKRVFVKVTTFTELPKYYDGKLDQIQIHFINLNRVENKPDDSFYISSMKRYHPRKVVLTSMGAIKYRSKILEDYVANH

SEQ ID NO: 18083 - protein, 1352 aa, unidentified
  REGION 1..1352: note = Cas Enzyme sequence
MSEYFIGLDIGTESIGWAVTDPEYNIQKRYGKALWGVRMFPEAQKAADRRIFRTARRRIERRTQRIEMLRQIFAKEIAKKDPAFFLRIDESKFLEEDKRLAEGGLPLGKYTLFADKDYCDRDYHKQYPTIYHLRKALIREDGPFDVRLVYLAVHHILKNRGHFLFDEVSLETVTFERCFDDLKSHLLDEYELPFDLSNPAEFRLTLMNRELGISAKKKLLKKHAGTGRADAQQNAICDLLAGGKAKLSDLYGREFDKEENISFSFRDDYESKEPVLSEILGEEMRLISGIKRVYDWSLLETIKSGCEFISESKVLTYDKHKQDLKELKKLFSANQALKNEMFREEKDKLDNYPAYSGHTKANYRCDYGKFSAFCRKKLKELEASLDEAGKQKAASILERLENEAFLRKQTDKDNGVLPHQVHEQELSLILEKAGAYLPFLKETDESGLTKAEQILAIFRFRIPYYVGPMNASSLHSWVVRTDEKIYPWNFDKVVNLEASAEKFITRMTAVCTYIGEPVLPKDSLLYTKFVALNMINKLRINGHDISVETKKRIYTECLTTKGKATRKTILDFLKAEGLMTKNDELSGIDETFKVQLTGYKVFENILARGDNTYMVEDIIKHCALFAEDKRLFEGWLKKEYGAQLTPEDLSYISRNRTRFSGWGNLSREFLTKIEHIDPKTGEVRSIIDQMWETNFNLMELLSDRFSYIESMEKYRAQKFGADKPTLESRLMEYYASPGIRRAIHQTMDLVSEIEGIMKCAPKRIFLEVTRSEGEKARTVSRKKQLDELYAHCKKEAPKVFEKLQSLEEPDLRSTRLYLYFTQMGKCMYSGESIDFERLHTDYDIDHIYPQKLVKDDSITNRVLVKRQLNAKKSDSYPIAPYIRESMKDFWKLLKEKKLISEEKYRRLTRNTSFTDMELSGFIARQLVETSQSCKIAAELLKERYPDGDRVVYVKAGNVSAFRQDQLILPDGTQLQAGQAKNIQAKQDPLFVKCREVNDFHHAKDAYLNIVVGNVYHMKFTRSPLNFIKSSQTYNLNRMFDYEVTRNGECAWKPGNDGSISAVRRMMRKNNILFTRFAHEVKGGFYKQTILKKGSGEAAIKTSDPRMTIEKFGGYTERAVAYFAFVEHGDKKRIRSFESIIILDKEKYENNKINYLKNTLNLVNPRILIDKIKIGSLISMDGFRMYISGKDGNRILYRNANQLIVSPDQVRYIKQLSKYLARSRTQKTDLQITVFDGISSEKNLELFYVLKEKLKMQPFREIRSKITKILINKQNEFEQLTMLNQCIILIQLLNLFSTTKDSSDLRIIGEEQRAGRIRITKNLQEKKYSSILLIHQSVTGVFEKEIDLLGDNL

SEQ ID NO: 18084 - protein, 908 aa, unidentified
  REGION 1..908: note = Cas Enzyme sequence
MERKYGIGLDIGIGSVGYAVISKTNNLDARIEDIGVRLFNSGENIRQKASNAQERRGYRSTRRLLRRRKHRKERIKKFFLKIKLMNEVQLKEWQEQNGNQNVLQTRIKGLNEKLTPEEILDCIIHICNRRGYREFYGDDSKKDNADKDELQKIEGGLANFDEIYQSGGYKSVAEMLINAPVFKTETSFADYRNHKNAKRYILIKREFVKKELEDILNKQSEYYPQLTANNIRIICDDMVFAQRDFETGPGNEDDKTRRFMGFIDSIGQCMYYKDEKRAYRSTVIADIYALVNCLSQLSFVNTETGEILLPENVAKEIINTSLTNASITENDIKNILKPYKLEMRKPGKLEVKVPDTTKTLKLLKAILTNAGYKYEELIKENQFDVNNPSKLHQLCLLLSENITPARRIRALKAKGWNEKLQKEVIRKKFGGTASVCEKYMVEAIEAFKRGETYGNFQARMLKEREDALHDIEKQKYLAPFDKKIDEELVKNIVVFKAVNETRKILNELIRRYGSPEYINIEVADDLGRSFKERAKIIKRINDNKKEKDKIANKLIELGLRKEEEVKPFDIERYRLWEEQEGKDLYTGEVIPVEKILSGIYDVDHIVPFSLILDDTLQNKALVNLGVNRQQKGQQVPLGYLSSADKEDYLKRINTLFKKKKISIKKYKYLTLSNLYGNRDLLSEWKSRNINDTRYITRFLVNYLSANLLFNSDKAKNVFGVKGIITSRMRRLWFNKKTWGDEQKNRDNNLHHAADAIVIANLTPAYLEIASDKIKLDRIYKDYHKRISEEYLTYLGKAVNKMVKYYGFNKEYTEKLLATPYSRVPAMIRNIADEVDIRLWDNSLECYKDVSEEQFYKNVKAFYKDDAVFADSIKPVLVSYKQNKKYQGKFTKDNPLKKNETDGAYIKKS

SEQ ID NO: 18085 - protein, 1005 aa, unidentified
  REGION 1..1005: note = Cas Enzyme sequence
ILKPTKNANKKEKWDIWLIRKQALERKLTDIELFRVLYHIAKHRGFYFHTKAEEVQKEDAGSETGKAKAGLARISKKLEDGKWETVGQMFWGEFKQTNPENKRKRNAKDKYENSIHRLLLKKEIETIFKKQQAFGNMQAKEELKQRYIDEVLMYEEGIDDERLQKMMSRCEFVTGAMCAPKESYTSERFSLFNRLNSLSLIDTKNKGQNLPLDGQRGKIEALAYKNAKVTFAQIRTELGLQDDLHLRFNLCSYSEKNPEYNKKLECEIKNGQPQFDEKHKVPVVDIHTGEVTILDKEIKDIFNSKKLWANSKKIHVYYLDIRKQLNLSGDFRFKDLSGYTKSAAEFGSEAKYVKQFENDTFVELKGYHKIKKTIEEKCGSEKWEQISKDIAKLDAIAEALTYCKSDETRAAYLKEHGITDEKVIEAVLTTNMKQIATFSKEAMSNLLKHMSDGTLFNEAKEKCGYGKIDHKKQARLDPYSGFFEKNPVVARVIAQTRKLVNAIVRKCNDKYPIDQIHIEVATELANSEKRKNEIAQGQRRYQEDKKRAEERCREFKIDPEEGQNLLMFRLAEQQNNFCPYTGKAITFYPTSADNEIYIQDCEIDHIIPMSRSFNDSLNNKVLCTQQANQNKMDRIPFEWFEDTHGKDSQQWADFARRVEKMYGMPYPKRKNLVRKSWTEEDKEKFISRNLNDTRYAARHIADYLRKYFDFSKSKRDDIKDVSRIQLRGGGVTAFLRHMWGLNKDREENDLHHALDALVVACSTYGHVYLVSNLSKEIERKGKNWYKHFGRDKFRPWNNIREDIQKVVEKVFISRMPRHKVTAEAHKDTITSLKEAAIAKRVIMINGGYAEMGDMVRADVFTDDKDKNYVVPIYSTDIFANKPLPDKYVPDDRLLPYEQWPSVLNNAMNFKFSLFKDDLISINDKMYYVSFFEATTANVNVKNIDGSIFPDKKDSNDPKTKKIGYRPKGKTRKCVLKKYSVDMLGNYKEVKEEKRLGNKFQNEKLV

SEQ ID NO: 18086 - protein, 1126 aa, unidentified
  REGION 1..1126: note = Cas Enzyme sequence
LNCQEKFLIGEKMSNEKVVLGLDIGVASIGWGLVKLTEEKYIDEKPDGTIEEKHKISDGEIIGTGIREFQLPQDRQRKSLALIRGSARRTRRTIKRKSQRLKRLVKLAKEFNLIAEDFNSDQILKPTKNANKKEKWDIWLIRKQALERKLTDIELFRVLYHIAKHRGFYFHTKAEEVQKEDAGSETGKAKAGLARISKKLEDGKWETVGQMFWGEFKQTNPENKRKRNAKDKYENSIHRLLLKKEIETIFKKQQAFGNMQAKEELKQRYIDEVLMYEEGIDDERLQKMMSRCEFVTGAMCAPKESYTSERFSLFNRLNSLSLIDTKNKGQNLPLDGQRGKIEALAYKNAKVTFAQIRTELGLQDDLHLRFNLCSYSEKNPEYNKKLECEIKNGQPQFDEKHKVPVVDIHTGEVTILDKEIKDIFNSKKLWANSKKIHVYYLDIRKQLNLSGDFRFKDLSGYTKSAAEFGSEAKYVKQFENDTFVELKGYHKIKNAIEKCGDGQWEHISKDIAKLDTIAEALTYCKSDETRAAYLKEHGITDEKVIEAVLTINMKQIATFSKEAMSNLLKHMSDGTLFNEAKEKCGYGKIDHKKQARLDPYSGFFEKNPVVARVIAQTRKLVNAIVRKCNDKYPIDQIHIEVATELANSEKRKNEIAQGQRRYQEDKKRAEERCREFKIDPEEGQNLLMFRLAEQQNNFCPYTGKAITFYPTSADNEIYIQDCEIDHIIPMSRSFNDSLNNKVLCTQQANQNKMDRIPFEWFEDTHGKDSQQWADFARRVEKMYGMPYPKRKNLVRKSWTEEDKEKFISRNLNDTRYAARHIADYLRKYFDFSKSKRDDIKDVSRIQLRGGGVTAFLRHMWGLNKDREENDLHHALDALVVACSTYGHVYLVSNLSKEIERKGKNWYKHFGRDKFRPWNNIREDIQKVVEKVFISRMPRHKVTAEAHKDTITSLKEAAIAKRVIMINGGYAEMGDMVRADVFTDDKDKNYVVPIYSTDIFANKPLPDKYVPDDRLLPYEQWPSVLNNAMNFKFSLFKDDLISINDKMYYVSFFEATTANVNVKNIDGSIFPDKKDSNDPKTKKIGYRPKGKTRKCVLKKYSVDMLGNYKEVKEEKRLGNKFQNEKLV

SEQ ID NO: 18087 - protein, 1106 aa, unidentified
  REGION 1..1106: note = Cas Enzyme sequence
MGEIMNKEKVVLGLDIGVGSIGWGLVKITEEEYCDEKDDGTIDKKHRITDGTIIDTGVRAFQIPQDRQKKSLALQRGTARRSRRTTRRKAQRLKLLIKLAKEFNLIDNNFYRDEILKPKKGDKECDWDIWFIRKKALEEELSDAELFRVLYHIAKHRGFYFHTKSEEIQEEDKKSETGEVKKGLVRIRKKLEDGGWETVGQMFCEEFKQTNKENKRKRNAQDKYGNSIHRSLLKEEIEKIFEKQQKLGNNKTKEELKKRYIDEILMYEEGIDENKLRKMMSHCEFTGDLCAPKESYTAERFILFNRLNTLELVDTQDKDRHLLLDDDKQRKKIEALAYKNSKVTFAQIRTELELQDNLHIRFNLCSYSEKTPEYNKKLVCNIKDGRPDFEEKHKVSIVDIYTGEVKVLDAEIKNIFNRKTLMPNSKKIYVYYSDIRKQLKLSSDFRFKDLSGYTKSAVEFGSEAKYVKQFENDTFIELKGYHKIKKAIEDKCGKEKWEHISSNITKLDTIAESLTYCKSDETRTEYLHQHNIIDKEIIDAVLKINMKQVASYSREALEKLLENMEKGDLFQEAKEKANFPKSEYEKRAILKPYSGFFENNPVVARVISQARKLVNALVRKYQKQYLINQIHIEVATELANSEKRKNQIAQGQKRYKDDKEAAEERCREFNLDPEEGQNLLMFRLAEQQLNKCPYTGKTITFYPTAASNEVYIKDCEIDHIIPMSRSFNDSLNNKVLCSPEANQNKTNRIPFEWFEETYGKNSQRWAEFENTVKKMYEMPYPKRKNLLRKSWTDKDKEKFLSRNLNDTRYAARHIADYLRKYFDFSKSKRDEIKEVNRIQLRSGGVTAFLRHMWGLNKNREENDLHHAIDALVVACSTYGHVYLVSNLAKEIERKGKNWYKHFGRDKFKPWGNIREDVQAAVDKVFVSRMPRHTVTAAGHEETIISKEKISKNRTIKIRGGYAEMGDMVRADVFVDNVGKNYVVPIYSVDIFSNKPLPDKYLHKNDAPYDQWPSVKESKLKFKFSLFKDDLISINGQMYYVDYIRATRSKISVKKTDGSFIDNIKEEKTKEIGYKNMELKKYSVDMLGNYKEVKQEKRLGNRFKSGV

SEQ ID NO: 18088 - protein, 1106 aa, unidentified
  REGION 1..1106: note = Cas Enzyme sequence
MGEIMNKEKVVLGLDIGVGSIGWGLVKITEEEYCDEKDDGTIDKKHRITDGTIIDTGVRAFQIPQDRQKKSLALQRGTARRSRRTTRRKAQRLKLLIKLAKEFNLIDNNFYRDEILKPKKGDKECDWDIWFIRKKALEEELSDAELFRVLYHIAKHRGFYFHTKSEEIQEEDKKSETGEVKKGLVRIRKKLEDGGWETVGQMFCEEFKQTNKENKRKRNAQDKYGNSIHRSLLKEEIEKIFEKQQKLGNNKTKEELKKRYIDEILMYEEGIDENKLRKMMSHCEFTGDLCAPKESYTAERFILFNRLNTLELVDTQDKDRHLLLDDDKQRKKIEALAYKNSKVTFAQIRTELELQDNLHIRFNLCSYSEKTPEYNKKLVCNIKDGRPDFEEKHKVSIVDIYTGEVKVLDAEIKNIFNRKTLMPNSKKIYVYYSDIRKQLKLSSDFRFKDLSGYTKSAVEFGSEAKYVKQFENDTFIELKGYHKIKKAIEDKCGKEKWEHISSNITKLDTIAESLTYCKSDETRTEYLHQHNIIDKEIIDAVLKINMKQVASYSREALEKLLENMEKGDLFQEAKEKANFPKSEYEKRAILKPYSGFFENNPVVARVISQARKLVNALVRKYQKQYLINQIHIEVATELANSEKRKNQIAQGQKRYKDDKEAAEERCREFNLDPEEGQNLLMFRLAEQQLNKCPYTGKTITFYPTAASNEVYIKDCEIDHIIPMSRSFNDSLNNKVLCSPEANQNKTNRIPFEWFEETYGKNSQRWAEFENTVKKMYEMPYPKRKNLLRKSWTDKDKEKFLSRNLNDTRYAARHIADYLRKYFDFSKSKRDEIKEVNRIQLRSGGVTAFLRHMWGLNKNREENDLHHSTDALVVACSTYGHVYLVSNLAKEIERKGKNWYKHFGRNKFKPWGNIREDVQAAVDKVFVSRMPRHTVTAAGHEETIISKEKISKNRTIKIRGGYAEMGDMVRADVFVDNVGKNYVVPIYSVDIFSNKPLPDKYLHKNDAPYDQWPSVKEGKLKFKFSLFKDDLISINGQMYYVDYIRATRSKISVKKTDGSFIDNIKEEKTKEIGYKNMELKKYSVDMLGNYKEVKQEKRLGNRFKSGV

SEQ ID NO: 18089 - protein, 1106 aa, unidentified
  REGION 1..1106: note = Cas Enzyme sequence
MGEIMNKEKVVLGLDIGVGSIGWGLVKITEEEYCDEKDDGTIDKKHRITDGTIIDTGVRAFQIPQDRQKKSLALQRGTARRSRRTTRRKAQRLKLLIKLAKEFNLIDNNFYRDEILKPKKGDKECDWDIWFIRKKALEEELSDAELFRVLYHIAKHRGFYFHTKSEEIQEEDKKSETGEVKKGLVRIRKKLEDGGWETVGQMFCEEFKQTNKENKRKRNAQDKYGNSIHRSLLKEEIEKIFEKQQKLGNNKTKEELKKRYIDEILMYEEGIDENKLRKMMSHCEFTGDLCAPKESYTAERFILFNRLNTLELVDTQDKDRHLLLDDDKQRKKIEALAYKNSKVTFAQIRTELELQDNLHIRFNLCSYSEKTPEYNKKLVCNIKDGRPDFEEKHKVSIVDIYTGEVKVLDAEIKNIFNRKTLMPNSKKIYVYYSDIRKQLKLSSDFRFKDLSGYTKSAVEFGSEAKYVKQFENDTFIELKGYHKIKKAIEDKCGKEKWEHISSNITKLDTIAESLTYCKSDETRTEYLHQHNIIDKEIIDAVLKINMKQVASYSREALEKLLENMEKGDLFQEAKEKANFPKSEYEKRAILKPYSGFFENNPVVARVISQARKLVNALVRKYQKQYLINQIHIEVATELANSEKRKNQIAQGQKRYKDDKEAAEERCREFNLDPEEGQNLLMFRLAEQQLNKCPYTGKTITFYPTAASNEVYIKDCEIDHIIPMSRSFNDSLNNKVLCSPEANQNKTNRIPFEWFEETYGKNSQRWAEFENTVKKMYEMPYPKRKNLLRKSWTDKDKEKFLSRNLNDTRYAARHIADYLRKYFDFSKSKRDEIKEVNRIQLRSGGVTAFLRHMWGLNKNREENDLHHAIDALVVACSTYGHVYLVSNLAKEIERKGKNWYKHFGRDKFKPWGNIREDVQAAVDKVFVSRMPRHTVTAAGHEETIISKEKISKNRTIKIRGGYAEMGDMVRADVFVDNVGKNYVVPIYSVDIFSNKPLPDKYLHKNDAPYDQWPSVKEGKLKFKFSLFKDDLISINGQMYYVDYIRATRSKISVKKTDGSFIDNIKEEKTKEIGYKNMELKKYSVDMLGNYKEVKQEKRLGNRFKSGV

SEQ ID NO: 18090 - protein, 1050 aa, unidentified
  REGION 1..1050: note = Cas Enzyme sequence
AQRLKRFIKLAKEFNLIDDNFDRDAILKPKKGDNESNWDVWTIRKEALERELTDTELFRVLYHIAKHRGFFFHTKAEEIQKEDSKSEEGKEKAKVKAGLSRIRKKLKDGGWETVGQMFCEEFKQTNKTANRKRNAQDKYENSIHRSLLQEEIETIFERQQRLGNNKAAEGFKQRYIDEVLMREKGIDEDKLQKMMGECKFTGERCAPRESYTAERFTLFNRINTLRLIDTGDKERTLQLDDEQRKKVEALAYKNAKVTFAQIRQALKLENDLDKRFNLCSYKEQDPEYNKKLICEIKDGRLDFEGKHKLKIVDIDTGEIKNIGEDTKEIFRKRKAAWPKAKKLYVYYSYIRKQLNLSDNFRFADLKGYAKSAKELKREAQAKAEKKGKSLEHFDGKAAYIKQFEGKDVFVELKGYHKIKKAIEKYCGDSKWDELSADKGKLDVIAEALVYHKSDKTRTKYLQEKGIVDEEIISAILTINMKQIDNHSKDALTKLLGYMEKGDLFNEAKEKCGYGKIEYEKHAILQPYSGFFENNPVVARSFSQTRKLVNALVRKYQKQFAIDQIHIEVATELANSKKRKREIWQGQNRYREAKEAAAERCRENRLDPQEGQNLLMFRLAEQQNLFCPYTNTKISLYPTGAVNEVYIKECEIDHILPMSRSFNDSLNNKVLCTQKANQEKRDRIPFEWFEDNYGKDSRQWADFERRVKKMYVIPYPKRRNLIRKSWTEKDKEQFLSRNLNDTRYAAKEIANYLRKYFDFSESKRDDIKEVNRVQLRSGGITAFLRHMWGLNKNRSENYLHHSLDALVVACSTYGHVYLVSNLSRRIERKGKNWYKHFGRDKFRPWGNIRNDIQDAVSKIFVSRMPRHTVTSAAHKDTINSKQMKPGKRTIKVNKGYAEMGDMVRADVFVDKVSKNYIVPIYSVDIFSKKPLPDKYIPDDNTVPYEQWPSAKDDNLKFKFSLFKDDLISVNDKVYYVSFFDATTPNVNVENIDGSIFPDKKDAREPYKKKKCYRPKRKGRKCVLKKHSVDMLGNYKEVKQEKRLGNKFGNKR

SEQ ID NO: 18091 - protein, 1046 aa, unidentified
  REGION 1..1046: note = Cas Enzyme sequence
QRRMKDIRKLLVSSGVLTQDAMDRVSKTVGEHTPWEYRVEGLDRLLKPDEWTRVLIHMAKRRGFKSNRKEAPEGVQKADKNDDEGKMKAGVAENSLILKTGNNGRGYRTVAEMFVMDPKFGEHKRNKDGQYINTVLRAEIEAEVQELFKRQRSLGNPFAGEDLEKTYLEIFNRQLPFASGDIIEKMVGHCTMEPEELRAPKASWTAERFILLSNIRNMRVVVDGRTGELGPEKSAKLLQYCYDHTKVTYKQIRNLLDPAPKKSKKKGHPEEQQPQQAPNWHFAYIPAAKKKVSRKKAADKDAENPQAESTQEYDPEEATFAELKAFHEFRKAVTKALGEKYWTDLTANNPRVMDDLAFALTFRKNEEDIRNCMAERNVPKELIEAVIGLNFKGTVNLSLKAMTKLIPFMEEGSDFTEACGQAGYSSFDPRSGSNRSILLPVPDQGKVRNPVVFRAITQTRKVINEIIRKYGSPERVQIELAKELAKPIEVRKAIKERNDENYRQKQVLRDEFENRFSHRPSDSQLEKYRLWKEQDGYCPYTGEQISLDMLFSVKSGTYADIDHIVPYSRSFDNSWTNKVLVMTHANRDKKDMTPYEYFGQDSEQWNTFLKNVEKYIPDKSKARRLMTKDRDFDEIKLRCLNDTRSITKYVADWIESSLVFSDPEIRNPVVRINGQATATIRKQWGIESCKRRDESDLHHALDACVVAAATPAIIDRISKYSAADELGELREEDPTDSRKRLPEPWKDFAREVRARISEDPAGLIKSYGITSYTEEELQELRPIFVSRMPDRKARGEVHEATVRSLRYADEGKGTVVKVPLKKIKLKRLENMVGKDRDKILYEALRKRLKEHADKPLKAFAEPFYKPSKDGTPGRIVKSISLFDASVCGLKIREGMSGNGNGSMVHVNIYRKDGKHYIVPYYIEDIARKRTRMHAIVAGKPESEWLEIDNTYEYMFSLYPNDILRVKNNNGEEIFGYYRGCHRTTGGIGIISHDSAKTEKMIGIRNAAVLEKYTVDVLGEYHKVKSEKSACGKLFRKAEKKKARTAA

SEQ ID NO: 18092 - protein, 1116 aa, unidentified
  REGION 1..1116: note = Cas Enzyme sequence
MGQKGDNTMKKRKKKKDKKDCHYTLGLDIGIASIGWAVLGNDEDGTPNRIIDLGVRVFESAEVQKTGESLAAPRRDARSARRRLRRHRHRLERIRYLLVQQGVLTQEEMTHLYDKSDLVSPYQLRTEGLDRLLNAQEFSKVLIHLAQRRGYQSNSTAEEAKNEKENGVIKSAILENQQRMEQGGYRTIGEMMYRDGAFWETINGIRYHCTRNKAGDYRFTVDRASILAEVSLLFEVQRRLGSPWASREMEDAYTAILSSQRSFDEGPGGDSLFRKGIVDRVGNCTLEPTEQRAAKADVTFERFKLLQDLNHMRLVDNNGSHPLTPQQRDDLETAAFHTANLTYGQLRKKLGLSDEMRFAGLYYGTDPIEKAEKRKWAQMQSYHKIRTALDKVSKDAFRALTQDQDRLDAIGEILTAYKADAARIEHLQSAGIPKEYHNALLSLSFSKYGKLSCCAMRKLIPLLQQGMRYDEACREIYQDHRTKEASERKQRLSLNDIDEITNPVVRRAVSQTIKVVNAVVRIYGNPDAVRIELAREMSHSFDERNKMKKRQEDGRQKNEQVKAQILETKAGDRVTGLDIVKFKLYREQDGVCLYSGKGLDLQRLYEPGYADVDHIIPYSRCFDDSYSNKVLVLASENRQKGNCTPYEYFGENEQRWHEFSVRVGASVRDFKKRQKLLNTSFGEEQGKDFIQRNLNDTQHITRIVYNYLRNNLEFADSAYAKAPVQAVNGAVTAMLRGRWGIEKMRGNGDLHHCKDAVVIAATSRSMIQRLSDYYKEEEQLFMGKPHFVDPATGEVLTRKEFPQPWPRFREELEARLDPVNPKEALMALNLSTFEVDPEEKIPPVFVSHMPKHTVTGAAHEETIRRKTETGTVVKKPLTDLKLNKNGEIEGYYNPQTDPRLYQALVERLRQFDGEGKKAFAEPFYKPRKDGTPGPRVDKVKIAEKASLSVSTGRGVADNGEMIRMDVFRVPNERKPDDSYYFVPIYVADTKKATLPSKAVVQGKSPEAWKQMKPEHFLFSIFKGDLIYVESKKGISLALAKEAVGEKTIQPKSGLFYFCGANISNGSIEIETHDRRYGKESLGIKELKAFEKRQVDVLGKVSKVRLPETRLEFRGRK

SEQ ID NO: 18093 - protein, 1097 aa, unidentified
  REGION 1..1097: note = Cas Enzyme sequence
MAYAIGLDIGIASVGYAVVALDYEENPWGIINMGSRIFDAAENPKDGASLAAPRREARTGRRRLRRRKHRIERIKNLFLNTQLLTKEQLEKLYEGVLSDVYELRVKGLDEKLTAEEVARVLLHLAHRRGFKSNRKAEKTDKENGALLTAVSENQKRMKDKQYRTIGEMFHKDELFAEYKRNKGGTYLTTVAREMIADEAKYIIATQRSFGNKTLTIEFEESYLDILLSQRNFDEGPGGNSPYGGDQIERMIGNCTFEKSEKRCAKSCYSFEYFNLLQKINHLRLLVDGVKVELDGSQKSKVINLAKTKADLKYSQIRKELGLGSQVLFNALVYNSDVEEVEKKSKFNFMPAYHQIRKELDTVVKGRIEAIDIDTLDEIGRILSTYKSDAKRIEAFSNLNITSKDMEALLNINGLRKFGHLSLKALKKITPFLEQGMIYNEACTAAGYEFRGHSGYEKTFLLPSQTEEMENVTSPVARRSISQSIKVINAIIREQGESPLYINVELAREMAKDFDERKKIKKETDENQARNERLIEKIRNEFHKQNPTGLDLVKLKLWEEQDGVSPYSQKQIVIERLFEPGYVDVDHIVPYSISFDDTMKNKVLVFASENREKGKNLPVEYLARKKGQKAVDDFKVWVTSNVRNYKKRLNLLKSEVTEEDLNKFKERNLQDTKTISRFMYNYISDHLIFAPSETGKKKRVTAVNGAITSYLRKRWGINKVRADGDKHHAVDALVIACTTDKLIKDLSYHSRYLEMEYEAGEKESLWVNRNTGEIVKRFPYPWEDFRAELMARLSDAPEVALRKLQLLYYQDKDLSKIKPIFVSRMPRRKITGAAHKATVRGARYVDKGIVISKKSLSELKLNKGGEIENYFAPESDRLLYEALKEQLKKFNGNAKKAFEQGFYKPKADGTPGPKVNKVKVYDKSTLNVAVQQGTGAADNDSMVRVDVYKVEGDGYYLVPIYVADTLKKELPNKAIVQGKTYEQWKEMSPEDFVFSLYPNDLIKITHKKEINFSRVSEDSTLADSYKTKEEFVYYKKTSISTASISIINNDNTYTIPSLGVKTLASLEKYQVDILGNYTKVGKEKLQTFAAYQQAKKKP

SEQ ID NO: 18094 - protein, 1123 aa, unidentified
  REGION 1..1123: note = Cas Enzyme sequence
MKYGIGLDIGIASVGWAVVALDGQEMPCGILGMGARVFSAAEQPKTGASLAAPRREARSARRRLRRHRHRNARIRNLLLQFGLISQEQLDNLFSGCLEDIYALRVRALDELITAPEFARILIHLAQRRGFRSNRKNASTKEDGELLAAVNENKRRMEENGYRTAGEMFLKHPDFAEHKRNKGGNYLATVKRDEVEAEAHAIFSAQRNFGAVFANAELEEAYVAILLSQRSFDEGPGGNSPYGGNQIEKMVGICTFFQEEREPRAAKATYSFEYFSLLEKVNHIRLIQGGESIPLTDDQRKRLIALAHETENLDFSKIRKKLPIPPEYTFNMVRYFEDSCDDSEKKTKFQHLTAYHQMRKAFDKLSKGYLSRMSIVHRNAIGTALTLYKTSARITDYLTNAGLSPEEIQVAEGIGSFSKFGHLSVRALDAITPYLEQGLRYNDACEAAGFQFRGHEDGEKTMFLRPNEDTYADITSPVARRAISQSIKVINAIIRKQGQSPTFINIELAREMAKDFSERKQLEKHITENQKRNEQIDQRLRQEFGVEHPTSQDRLKLWLYEQQGGVCPYSQKQISLPRLFEPNYAEIDHIVPYSISFDNTKANVVLVLAAENRDKGPRLPLQYLTGKRRDNFIVWVNSSIRDRRKRQLLLKEAFTDEDDKKFRQRNLQDTQTMAVFLMNYIRDNLLFADSSKGRKKRVTAVSGSVTSYLRARWGITKVRANGDIHHAVDALVIACATDGMIQQISRYSRYKECQYTHTEDMAYAVDGATGEVLKSFPYPWPQFRRELDGHLSSNPTQFLMDQRLPMYASGEIMPPQKPIFVSRMPTRKVRGAAHEATILSPKQPAENWTVAKVPLTSLKLRDGEIVSDKAYAIVPKSPSMKAPLLSDPVLYEALKQKLMLHDGNGETAFADGFRKPRKDGLDGPWVKHVKLLQKTSLSTAVNHGNGRAKNDSMVRVDVFYIKNDGYYLVPIYVADTLKPELPNKACTSGKPYSQWKEMRKEDFLFSLYKDDLLYIEHREQLIFHVPKKLKSRSTLEDPYPLKRSFAYFVGMDIDGAKINCDFHHGAYELHSLGVKRLLSMQKYTVDILGEYHPVGREVRQNFFTMKRDPNKKKEADNGIPESDD

SEQ ID NO: 18095 - protein, 1095 aa, unidentified
  REGION 1..1095: note = Cas Enzyme sequence
LRYAIGLDVGIASVGYAIVELNEKDLPYKIHKLGSRIFESAENPKDGSSLALPRREARSMRRRIRRRRHRKERVRNLIVTSGLLTREQLDGLFDQKGLPDIYWLRTEALDRKLGCEEFARILIHLSQRRGFKSNARREKGEDGKLKAAINENIAAMLDKGYRTVGEMLFKDVRFADYKRNKSNYLNTVTRDMVEAEVRMIFTRQQEFGNTAASPEIMEAYLEILLSQRSFFEGPGKPSPYSFDESLIAEKIGYCQFEKEERRAPKAAYSFEYFRLLQTLNNLRLTKQDGQSIPLTQEQRNIVIELAHKHEKVAFGQIRKKLKISDEYIFNLARYRSGESLETSEKSIFVQMPAYHKIRSAVGNDRITLISPPQRDEIARLFTVLRNEGKIRDGLEKAGLEETDISALMDKLDSFNQFGHLSVKALRNIIPHLEKGLKYDEACAAAGYVHTGHSDSSRSATISLRDLAYAMENRITSPVVRRAVSQTVKVLNAIIREMGQSPVYINIELAREMSKDKAERVKLDKSMEENRRQNERYKEQIAEYKSVEARGQDIVKFKLWNEQGGVCPYSQKQLSIERLFEPGYVDVDHIIPYSICFDDSYNNKVLVLTEENRQKGKRLPLEYLSGERRDKFIVWVSNSHLPYRKKQKLLKEKITQEEINDWKQRNIQDTQTIASFLHSYIKDHLDFADFAEKRERHVTPVNGAITYVLRKRWGLNKIRDDGDLHHALDAAVVACTTQGMINEISRYFENEEMLYQRGDGDGFAISARTGEVKAKFPMPWNHFADELEARLSRDPLRIIMDLVRERKLTAYDLEAISQVAPVFVSRMPRRKVTGAAHKETIKSLRRDGTVVRKVALTELKIKEGEIEDYYEPESDRLLYDALKTRLLAFGGNAAKAFSEPFYKPKSDGTQGPPVKKVKLKERPTLVVPLQNGKAAADNDSMIRIDVFCVEGDGYYIVPVYVADTLMDKLPNKAIVAAKPRDRWKEMCDSDFMFSVYPDDLLYFESKTPKTFTKTQKDSSLPDKYEARSEFVYFKKANISSACITVATHDDTYTISSLGVKTLHKLEKWQVGMLGNKSKVGREKRMGFRKSGCDGVS

SEQ ID NO: 18096 - protein, 1149 aa, unidentified
  REGION 1..1149: note = Cas Enzyme sequence
MTNNTITRTILGLDIGKASCGWSIVKIDEKIIENEAMVKYINPETLHQEELEYKTIPVFSQVIGGGVRVWDIPENKDGQSLAKIRGESRRARRTIRRKSKRMEDFLKYCQEIKLLDDSVDIKNKESLYKTLFKNDPEIYFLRNKALAEKLNNIELVRVIYNILKHRGFYWTSKADNTDKDKGKVKTGIEGIKNKLEENGYKTIGQMFHLHHDYNKQKRNSKDNYTNSIARELLEQELKEIFKVQKIYFSNIITSKFEDKIIHLLYKTAEINENQIIDMLANCELEKEEKVAPSKSYAHEYFAIVSKLNNIIIRTYAEQEQKNTIERCLTRQEIDLLTKKIFDSAKLTYTQARKLLNLAENERFNMVKYSIANPEYKEKIILKDAKEKEDKKSEVKNSIDVMNESTDVCDTIDFNKNDKLIEYMEKNSKKDKIEISYYFLRGILGLDTKQLFVDLEKKDKYEKSLIKCNNMNEYLKQFEKDTLFEAKGYRELYKAFDNPDSLKLWEEIKTNPNILNKIAKVLAYYKEDNHREKHFKLEGLENLIANETLKNALLSISFDGTSAHSFKALEKITPLLQQINPNTNKFYKYMEAKKYLGYKVTSHETTSTNKYLKHLQKEYAIHLKNPWVARIYSNVRKLVNAINREYSKLDPNFCIDQINIETAKELKHSKKQAENITKLINENKNENEIAKEHAQELLGSSKGYHKLKFLKQQNNCCIYCNKALLKDTMENNNAEIINAIEVDHIWPISRSMMNDQNNKVSVCKACNQSKSNQTAYEFMNKKGEQAFNEYVARVNANKSLPYVKKQRLLKNITKEDTDKFLSRDLINTAYASKFIIKYLRDNFDFTKSTRDDIKNKIQVRSGRITAMLRNSWLSYEYKKDRDENNLHHYMDALILAHSTQGLVSFISSQVENAEKQPNRSIEKYLHKYLKPFAMEDDKFDTWKQDLVKSIDNIFVSKAPRRKTTKNYHKDTISAKSKFKVEDLADKFKVRKGYAEKGEMVRADMFESLLDKNKGNLFMVPIYSTDLSWSKNKKPFPNTTIDGITMDENYKFKFSLYKDDLISYSSKNNPETKFYYVSYVRADGSVVNVENIDNSPFKFNKDGKPVKAIEKGLQTAKIKKYQIDLLGNKQEIKEEKRVFNITKNPKHKVKK

SEQ ID NO: 18097 - protein, 1053 aa, unidentified
  REGION 1..1053: note = Cas Enzyme sequence
MKILGVDLGIASVGWALVDDKKNEIIDSGVRIFTQSTNKDGKTLASVRREFRGGRRALNRKKQRLIQLKKLFISNKLLSKSEFMHLFNSEKRLDIWQLRAKGLERQLDNKEWARVLYHIAKRRAYQSNRKAEESGNTDKKKVLSAIKTNQEKMKQGGYQTIGEMIYSETKHPSSGRVRRNKKDNYTWSVSRIFLREEIDVLFEKQAELGNQFTTDELKQKYKQIVFTQRPIQFKADLVGKCTFEQGKYRGAKNCFSAEKSVLLNKINNTDLIDENTGEIKRLFEFSALDKLLDIFYKTKEVKYATLRKQLEISGNFEFKQLDYHQNFEYKTNIKAKIVDFYKLEDWLTPEQKEKLEKQVLDDKKEKFKRYKYSSIRSILSLQDSQKFKGVKYDTKVEDTVFGKLNGYHSIKKELNQKVFDLLFTSKIKFNKIAEIITYQKDDKSATQDLEEQVFKNLDLDEIAINEAIDGLLNISFSGFNNLSVQALDKIIPHQEEGLKYHNAIKEVYEHHSHFKNTNPQQYLRPLNKEENYQITNPTIKRVFSQFRKVLNAVIRKHGSFDVMHIEMARELKNSKKRKFEIVTGQKEYQQEKAAIKAQFLEIFVYEGTGRELLKLRLYEQQHGKCIYSRQSIEIDRLLEDGYVEIDHILPWSRTFDNSLNNKVLCLKVENQNKTNQTPFEYLANGEKNNSEWQEYKNYINSFVNIKQAKRNKLLNTNLPKRRGNDLTDNDIENPESGFLARNLNDTAYASKFIKNFVERNLAFLENSEIKQKVKTRNGALTSQLRYNWGVEAKNRDNNLHHAEDAIILAFSTQGEVQRMSTISAKREDFKYQTTDERLVKFTPPFVNFKNALDQSINDIFVSFAPRRKVAGAAHKATIKSKNIGGKYKFSVNQGVAENGVIQRVDVFKNAKNKYQFVVFYPADFYKDDFPKLDLSGKEIDEDSKFLFSLFKDDLIKFETKGNKKNPSRDLLAYFKYIQSDGKIAYQRHNKAEIERKKSDNKKGFIDILLATKSDLQSIKKYQVSILGDYQEVINEKRLPLIKQMRKNKSKQQK

SEQ ID NO: 18098 - protein, 1186 aa, unidentified
  REGION 1..1186: note = Cas Enzyme sequence
VSLVAGVITKTRTSRKDENFMENGFTYRLGLDIGIASVGAAVVQTNSFDNPCHLTEPDVRKFTAAECRENGKYYGKSAAVPRRECRSTRRRIRRKQLRMNCIKQALQKADLIDIDEFMKRYSDGTLPNVYQLRYEGLDRLLTDDEFAQILIHIAKHRGFLSTRRADKKDKESGAILAATSANQKLMMEKGYRTVGEMMYLDESFHTPCSNNEQGFIVTPRNKAKDYKHTIYRSMLVDEVHALFDAQRKLGNTKATETLESEYLEIMTRQRSYDLGPGLQADGTKSPFAMDGYKSNAGECTFYKNETRAAKGTYTAELSMTLQKINNLKLVDRYGDGRFLTDEEKQKILEYISKHKTMKYKTVKTLLGIDSMIRFNLLNYGKKKKTKKESEDKTKDDSTKKKGTKKSKTKAETGEKTDKDSNKDETELERINRIEDTVFVSMEFTLSYTDCLKTRIKTLSETEKRDLFDEVGELLTSYKTDAARIEKLSNLGLTSEEIDHLLDLNPKGYARLSHKAMKEIETYLVQGLTYDKACAAAGLDFQVTYTGEKMKYLKGPEINNIINNIQSPVVRRSVAQTVRVINAIIRKYGSPQAVNVELSREMSKSFLERKKAETAMELRHKENVKFCEEIKKLGINSPNGEDITRYRLWKDQNGICLYSGEKIPARTMFSKEYEIDHIIPYSISLDDRYQNKVLVKAKENQTKGNRLPYEYFGHDKTRWAAYENRVESLIKSDGKKAHLLKKNYTKEDQREFTERNLNDTRYATTVVYNMILQYLYLEPYNCDRKTKQVYAVNGAVTAYLRKRWGLNKKDRTNDRHHAMDAVVIACCTDEMIAKVTKYMQDRETAYSKNFRIADEETGEILTRSNFTREQYDEAYGVRFPVPWETFREEIDLRIFNDDPFGYLMKDRNLQIKIDYPDWMYGEEESPVAKGKYINYIRPMFVSVACSHKATGRAHEETIRSAKYHDSDSLVISKRALKDLKLNKDNEIKDYYNKECDPLLYEALRNRLLEYGGDGKKAFAEEFHKPKADGTDGPVVKSVKVIEKKTTGVQINHGLAGNGNMVRVDLYQKEGKYYAVPIYISDMVKKEIPRKAATGGKQYKDWRVMNPDDFLFSVYPRDLLHLKKGKPFNDGLSNDIYMYFAGLDPASASFAVTAHDSSISLRGIGIQNLELIEKCQVDMLGEIHVCRQ

SEQ ID NO: 18099 - protein, 1186 aa, unidentified
  REGION 1..1186: note = Cas Enzyme sequence
VSLVAGVITKTRTSRKDENFMENGFTYRLGLDIGIASVGAAVVQTNSFDNPCHLTEPDVRKFTAAECRENGKYYGKSAAVPRRECRSTRRRIRRKQLRMNCIKQALQKADLIDIDEFMKRYSDGTLPNVYQLRYEGLDRLLTDDEFAQILIHIAKHRGFLSTRRADKKDKESGAILAATSANQKLMMEKGYRTVGEMMYLDESFHTPCSSNEHGFIVTPRNKAKDYKHTIYRSMLVDEVHALFDAQRKLGNTKATETLESEYLEIMTRQRSYDLGPGLQADGTKSPFAMDGYKSNAGECTFYKNETRAAKGTYTAELSMTLQKINNLKLVDRYGDGRFLTDEEKQKILEYISKHKTMKYKTVKTLLGIDPMIRFNLLNYGKKKKTKKESEDKTKDDSTKKKGTKKSKTKAETGEKTDKDSNKDETELERINRIEDTVFVSMEFTLSYTDCLKTRIKTLSETGKRDLFDEVGELLTSYKTDAARIEKLSNLGLTSEEIDHLLDLNPKGYARLSNKAMKEIEPYLVQGLTYDKACAAAGLDFQVTYTGEKMKYLKGPEINNIINNIQSPVVRRSVAQTVRVINAIIRKYGSPQAVNVELSREMSKSFLERKKAETAMELRHKENVKFCEEIKKLGINSPNGEDITRYRLWKDQNGICLYSGEKIPTRAMFTREYEIDHIIPYSISLDDRYQNKVLVKAKENQTKGNRLPYEYFGHDKTRWAAYENRVESLIKSDGKKAHLLKKNYTKEDQREFTERNLNDTRYATTVVYNMILQYLYLEPYNCDGKTKQVYAVNGAVTAYLRKRWGLNKKDRTNDRHHAMDAVVIACCTDEMIAKVTKYMQDRETAYSKNFRIADEETGEILTRSNFTREQYDEAYGVRFPVPWETFREEIDLRIFNDDPFGYLMKDRNLQIKIDYPDWMYGEEESPVAKGKYINYIRPMFVSVACSHKATGRAHEETIRSAKYHDSDSLVISKKALKDLKLNKDNEIKDYYNKECDLLLYEALRNRLLEYGGDGKKAFAEEFHKPKADGTDGPVVKSVKVIEKKTTGVQINHGLAGNGNMVRVDLYQKEGKYYAVPIYISDMVKKEIPRKAATGGKQYQDWRVMNPDDFLFSVYPRDLLHLKKGKPFNDGLSNDIYMYFAGLDPASVSFAVTAHDSSISLRGIGIQNLELIEKCQVDMLGEIHVCRQ

SEQ ID NO: 18100 - protein, 1055 aa, unidentified
  REGION 1..1055: note = Cas Enzyme sequence
MRILGVDLGIASVGWALVDDKKQEIIDSGVRIFTQSTNKDGKTLASVRREFRSGRKVLSRKKQRLTQLKKLFIGHKLLSKSEFKYLFNSKDRLDVWQLRAKGLERQLNNKEWARVLYHIAKRRAYQSNRKSEESGNIDKKKVLSAIKTNQDRINQGGYQTIGEMIYKETKHPSSGRIRRNKKDDYAWSISRDFLRQEVDKLFEVQRSFGNKFATDELKQEYEYIAFKQLRIKFKADLVGKCTFEEDEYRGAKNCFSAEKSVLLSKISNTDLVDKDTGEIMRLFEYATLESLLDVFYNTKEVKYTTLRKQLKISDNFEFKQLDYQQNFEYKTNIKAKIEDFYKLEYWLSPEQKEILERQVLDDKKEKFKRYKYSSIRSILSLSESQNFKGVKYNTNVEATIFGKLTGYHTIKDELNSEMFNLLFSNKDEFNKIAEIITYQKDDKSAMQDLRKQVFNNLNLNESIIDEAISGLLNISFSGFNHLSIEALDKILPYQQQGLKYHKAVEKVYGHHSNFKNTKLQQYLRPLSKEENCQITNPTVKRTFSQFRKVLNAVIRKHGSFDAMHIELARELKNSKKRKFEIETGQKEYQQEKEAIKTKFLENFGYEGTGGDLLKLRLYEQQHSKCIYSKQEIKINRLLEDGYVEIDHILPWSRTFDNSLNNKVLCLAEENQNKTNQTPFEYLANSDKNSEAWQEFKQYVNSVHGIKIAKRNKLFNTTLPERRGNDLSTDDIENPGSGFLARNLNDTAYASRFIKKFVEQNLVFSENTEIKQKVKTRSGALTDQLRYNWGIKEKNRGNNLHHAEDAIILAFSTQSEVQRMSTISAKREDIRYQTAGERPIKFTPPFVDFKNALDKSIKNIFVSFAPRRKIAGAAHKATIKPSNTGGKYKFPVNKGVAENGIIQRVDVFVNDKNKYKYQFMALYPADFYKDNFPELDLSGNKIDENSQFLFSLFKDDLIEFKTKGNKRNKSRHLQSYFKYIQSDGRIAYQQHYKAEIERKKSNNKKGFVDVLLATKSDLQFIKKYQVSVLGDIQEVINEKRLPLIKQMRKDKFKKKK

SEQ ID NO: 18101 - protein, 1055 aa, unidentified
  REGION 1..1055: note = Cas Enzyme sequence
MRILGVDLGIASVGWALVDDKKQEIIDSGVRIFTQSTNKDGKTLASVRREFRSGRKVLSRKKQRLTQLKKLFIGHKLLSKSEFKYLFNSKDRLDVWQLRAKGLERQLNNKEWARVLYHIAKRRAYQSNRKSEESGNIDKKKVLSAIKTNQDRINQGGYQTIGEMIYKETKHPSSGRIRRNKKDDYAWSISRDFLRQEVDKLFEVQRSFGNKFATDELKQEYEYIAFKQLRIKFKADLVGKCTFEEDEYRGAKNCFSAEKSVLLSKISNTDLVDKDTGEIMRLFEYATLESLLDVFYNTKEVKYTTLRKQLKISDNFEFKQLDYQQNFEYKTNIKAKIEDFYKLEYWLSPEQKEILERQVLDDKKEKFKRYKYSSIRSILSLSESQNFKGVKYNTNVEATIFGKLTGYHTIKDELNSEMFNLLFSNKDEFNKIAEIITYQKDDKSATQDLRKQVFNNLNLNESIIDKAISGLLNISFSGFNHLSIEALDKILPYQQQGLKYHKAVEKVYGHHSNFKNTKLQQYLRPLSKEENCQITNPTVKRTFSQFRKVLNAVIRKHGSFDAMHIELARELKNSKKRKFEIETGQKEYQQEKEAIKTKFLENFGYEGTGGDLLKLRLYEQQHSKCIYSKQEIKINRLLEDGYVEIDHILPWSRTFDNSLNNKVLCLAEENQNKTNQTPFEYLANSDKNSEAWQEFKQYVNSVHGIKIAKRNKLFNTTLPERRGNDLSTDDIENPGSGFLARNLNDTAYASRFIKKFVEQNLVFSENTEIKQKVKTRSGALTDQLRYNWGIKEKNRGNNLHHAEDAIILAFSTQSEVQRMSTISAKREDIRYQTAGERPIKFTPPFVDFKNALDKSIKNIFVSFAPRRKIAGAAHKATIKPSNTGGKYKFPVNKGVAENGIIQRVDVFVNDKNKYKYQFMALYPADFYKDNFPELDLSGNKIDENSQFLFSLFKDDLIEFETKGNKRNKSRHLKSYFKYIQSDGKIAYQQHYKAEIERKKSNNKKGFVDVLLATKSDLQFIKKYQVSVLGDIQEVINEKRLPLIKQMRKDKFKKKK

SEQ ID NO: 18102 - protein, 1087 aa, unidentified
  REGION 1..1087: note = Cas Enzyme sequence
MQDAVSVPLYRLGLDVGATSIGWCMLPLTQKREPQAIMAMGVRIFSDGRDAQSGEPLAVERRTARGMRRNRDRTLSRQQHLMQVLTDIGLMPAERDQRKALLDETGALENNPYAIRARALDEAVPLHHLGRALFHLGQRRGFQSNRRADGKSKDDDKSLMKGAFSKLANAMIETKARTYGAFLYQRLKAGDGVRIRPVKKNNKNDYAFYPQRSDYQHELTMLWQAQQRHYPALLTEENHAKVFDAIFYQRPLMKPDVGYCQFEEGEKRAPKAHPVFQKFRILEDVNHLMINTLTGEKLPLSQKQRDEILKLLNKKKDVTFDTLRKNKTLGFSQNTTFNLETEERTKLKGNTTASRLSGNDAFGEQWFAFSDTQQAEIVTNLLEEDNEDTLIAWLQQHHNLSQDTAEHVSKIALEAGYGRLSLKAMKEILPHLEYGMTYDKAVAEVYPHHSDFRPTDLLDELPYYGKAMRKRVMPAPKATDPHEKRYGKINNPTVHIGLNQIRKLINELIQCYGRPTQIVVELARELKENQEQANLSAKRRKENQKLNEEAEREIARLGYTPTNRNKEKYKLWVAQAKDASQRQCPFTGQQICLEDVFREDSPFEIEHLLPFSRSYNDSLANKVLACRTANRKKTNQSPYEAFGGHATRYADMMERVKLLPYEKRWRFQPDAWDIARGKGEDVIARLLNDTKYLSRLTKEYLSHICQDVYVVTGGMTALLRGKWGLNDWLGDKDQTKERKDHRHHAVDAFVIACISRGMMQRISAAAQYAESQFSHRLVDQMPPPFEGFHWEEGKRKVEKIIVSHKPDHGNARRAINPPQGQRPYTTGKLHEETAYGLVNPKNADGDIELVTRVPLASLESLKHIREIRDVAIRDRLLDHMQDVPVDAKGKPAKTDIPQWQDKLQQFGDIHNIRRVRIVIAKTPNTVIGMATPEEKQRAAAENRFPLPYKYYPTGGNDCAEIYCPDRGKKAGQWQVEIISSFDAHQKGFVPLWKRQRENATAKLIMRLKINDMVAYEENGETVIARVKKMTSGMIYLREHSIASEKADTLSWAASAKQLQLKNARKIHVDILGRVHDPLSKTDQKAGA

SEQ ID NO: 18103 - protein, 1104 aa, unidentified
  REGION 1..1104: note = Cas Enzyme sequence
MQDAVSVPLYRLGLDVGATSIGWCMLPLTQKGEPQAIMAMGVRIFSDGRDAQSSEPLAVERRTARGMRRNRDRTLSRQQHLMQVLTDIGLMPAERDQRKALLDETGALENNPYAIRARALEEAVPLHHLGRALFHLGQRRGFQSNRRADGKSKDDDKSLMKGAFSKLANAMIETKARTYGAFLYQRLKAGDGVRIRPVKKNNKNDYAFYPQRSDYQHELTMLWQAQQRHYPALLTEENHAKVFDAMFYQRPLMKPDVGYCQFEEGEKRAPKAYPVFQQFRILEDVNHLMINTLTGEKLPLSPEQRLGIIALLNKKKDVTFDTLRKNKTLGFSQNTTFNLETEERKGLKGNTTASRLSGKDAFGEPWFALSAAQQGEIVTNLLEEDNEDTLIAWLQQHHNLSWDTAEHVSKIALEAGYGRLSLKAMKEILPHLEYGMTYDKAVAQVYPHHSDFRPTDLLDELPYYGKAMPKRVMPAPKATDPHEKRYGKINNPTVHIGLNQIRKLINELIQCYGRPTQIVVELARELKENQEQANLSAKRRKENQKLNEEAEREIARLGYIPNHRNREKYKLWVTQAKDATQRQCPFTGQQIRLEDVFREDSPFEIEHLLPFSRSYNDSLANKVLACRTANREKTNQSSYEAFGGHVTHYADIMERVKLLPYEKRWRFQPDAWDIARGKGEDVIARLLNDTKYLRRLTKEYLSHICQDVYVVTGGMTALLRGKWGLNDWLGDKDQTKERKDHRHHAVDAFVIACISRGMMQRISAAAKYAESQFSHRLVDQMPPPFEGFQWDEGKHTVEQIVVSHKPDHGNARRAINPPQGQRPYTTAKLHEETAYGLVNPKNADGDIELVTRVPLASLESLKHIREIRDGAIRTRLLDYMQDVPVDAKGKPAKTDIPQWQDKLQQFGDIHNIRRVRIVIAKTPNTVIGMATQEEKERATAENRPPLPYKYYPTGGNDCAEIYCPDRGKKAGQWQVEIISTFDVHQKDFVPQWKRQRENATTKLVMRLKKNDMVAYEEHGETVIVRVKKLNIDGRMFFEKHSVAKAIKEPNATSAKQLQLKNARKIHVDILGRVHDPLAQTHVNRVQIDVDDGYVRSARGDGDGA

SEQ ID NO: 18104 - protein, 1029 aa, unidentified
  REGION 1..1029: note = Cas Enzyme sequence
MLEKILGLDLGISSIGWAVIEYDKELSKKEDFSSNKIIKSGVRIFTAAENPKTGESLALPRRLSRGARRTTKRKSQRIYAIKKICLKNLEISENNLFSQDNIFKEKHLKDVWLLRAKALRRILEPKEFARVLIHIAKRRGYKSNRKVDKVGDNEGEKVLSAIEENEKLLTSYLTIGEAIYENTKKNKIRRNKKDDYKYSISRAMLENEVKIIFEKQREFANSSATKKFEQEYLDTFLKQRDFASVDKMVGFCTLEKKPNKRAPKASYLAQEFVTLTKLINTKIIDKDGIERGFTKKELELALNLCKESKKPSYLKLKKELQLSEEEYFKGIVFYEIDKNTGEFTKKATTFKSAFEQYFKLKDKISKNSSEDIWKIISKDTTLLDNLGEIFSYHKSDTKIKVELEKLDFKGLNQNEKSNLIEVLINNISFDKFLNLSLKALSKIVPLMKEAKRYDEAIQELGYKKETLENKSKFLRALNKDENFELTNPVVKRAIAQSRKVINALIRTYGSFDKIHIELTRDIKKSHKDRNKIQKAQDEYQKVKSGIVAEFIEDFGREPKGNELLKFRLWKEQGGYCAYRGYQGAKGYLEPSLIIKDANYAQIDHILPFSRSLDDSMINKVLCFSGENQNKSNNTPYEYFMTSDSKKQDWDKYEIFIKSLKGLKQGKKNRLLKKNFDENSQKEFRARNANDTAFMSRFIKDFIEENLLLTSKDSNKVLSRNGMLTSLLRHSWHIGKKDRNNHLHHGADAIIIAFATQSEVQRLSTISAKVEGFSYTSAEKKDKKTKFNPPMEDFRDIVSKSLDDIFVSFAPRKKITGEAHEQTIFSPKNLRANKKQEKPSLLSGGSVIRNIKLNHNTKLAKQSLMPRIDIFRHKTKMKYYVVPIYTYNFVEDTLPNKAIVSGKNKDGSPKPWLEMDEEYEFIISIFKNELIEIKTKKEIIRGYFVSAHSGTGALELKSHNNKENDIFKIDKSSILSTKSAGIQNAIYVKKFQVDALGNISEIKHEKRIGTRKELKKEELKKEELKKNLKK

SEQ ID NO: 18105 - protein, 973 aa, unidentified; identical to SEQ ID NO: 16300
  REGION 1..973: note = Cas Enzyme sequence

SEQ ID NO: 18106 - protein, 1051 aa, unidentified
  REGION 1..1051: note = Cas Enzyme sequence
MTYRLAIDMGATSLGWCILDLNDKGQVCDVLDMGVRIFPDGRNAKSREPLAVSRRGTRGSSRRHDRYKNRRKRLMAFMIENGLMPRDEAERKALELENPYELRSRAAAEKISLHELGRALFHINQRRGFKSNRKADSKSNESGAIKTGIAELEHAMLASDSKTLGQFLYEKHKNKESVLARPETKGSKNEYDYYPARDMYEQEVDFILNKQKEFHPELTEDICEKLKEIIFYQRPLKPQPVGWCTFESEENRARLASPIVQKFRILQEVNNLEIDGLTETDPKLKPEDRQKIIAELQNKKEVKFNRIRKMLGLGDDITFNLEALESRAGLDGNTTNFILSKPECFGDRWGEFASEQQESIIELLMTEPDPEKVIESLIRDYDVSVEQAQKISNNPLKEGHGRLSMKAIHNIMPHLEQGYRYHDACKLAGYHHSDFRTGEIFDQLPYYGEALQTAVIGGSYAEEDKNNPEKFYGKINNPTVHIALNQLRKLVNALIEIYGKPQEVAIELARELKYGQKRLQEHNKNQNENRARNEKINAELEKLGKTPNYKNRLQYKTWEELATDPTKRCCPFTGKQIGANDIFSGEFEIEHLLPFSRTFNDSPANKVLSHRSANRIKGNKSPYEAFGHTAQWSEILARAENLPFNKRWRFKEEAWDIAKGNNEDMIARQLTDTQYMTRIAKKYLSFVVEEQKGQSRVYGIPGQLTALLRRKWGLNNVFDDSLDKKDRSNHRHHAIDAFVVGCTTRSMLQAISRTNENEREKIEIPEPFPNYREIVKEKAENMVISYKPDHGNARNAIKHGKTVSGLHKATAYGFVKDTDAKKGKALFVTRKPINGFKKRTDIENVIDPVWKQKLLNAVEESKDGSTEFKAALDVFSESNNVRRMRVYDESSLNTMIPVYHPDEKGKDGAKAYKYYSLGGNYCAEIYCPNKGKNAGKWGIEIISNYHAHQKDFIPQWQKDNPTAKLVMRLQINDMVAYEDEGETKISRVKKMDNTGRVCLRDHRVAKEDGDKLSWTAYIGSLQKKNARKISVDITGRVKDPKKLTENQDIAA

SEQ ID NO: 18107 - protein, 1069 aa, unidentified
  REGION 1..1069: note = Cas Enzyme sequence
MKTRLGLDMGTNSIGWCLYEGDVIKDIGVRIFSDGRDPISGASLAVNRRDARAMRRRRDRFIGRRSALLREFIAHGLLPADKTAAKALEVADPYALRVKALDEPLDPHEIGRALFHLNQRRGFKSNRKADRVAKPGEEGKIASGTKALDAAMQIVGARTLGEFLNGRDVKRVRPDSGEEDGSYAFYPDRKHYLAEFEAIWTKQAEFNPTLISNAAKTGIHRVIFHQRDLKPQVVGKCTFAGWGGVPDDETRLPKAHPLFQQRRLYEEVNQLEIVTAGASSRKLTMDERDTLILKLRDKAKVSFSSLGKAIKLPEGARFNKESENRKELIGDEVRASLGHKDRFASRWGGFPTEAQCTIIDRLLNEESTEKLLDWLKVSYTLDAETAEAVANVRLPDGHGRFGLTATTKLLEQLKDGQDADGHPLTYAAAADKAGFHHSNFRTGECHDVLPYYGEILAREIAPGKDNYGNALERKWGKITNPTVHIGLNQLRKLVNAIIRQYGRPDYIFVELARELKLNEKQKAEHKRKIKQNTDAAKQRGEKLEALGEHDSGGNRMRLRIWEELNPGNPLDRRCPYSGEIISIEMLMNGTAEVEHIIPYSRCLDDSAANKVMALTTWNRDKGNKTPWEKWGGTPQWDVIQDQVTRLHKSKQWRFAPDAMERVERDGGFIARQLTDTQYLSRIAAKYLGALYPEKGERHVYAVTGRMTAMLRRIWGLNELLPDHNNVENPHSNAAKNRLDHRHHAIDAAVVGATTPAMIAEIAKAAGRAEAQALDKLFVDLPEPWNGFRDELRNRLSATIISHKADHGRKGVAKAGKDVTAARLHNDTAYGLTGRTNAKGVPIVTVRKPLLSLQPKDLTDPERMSDKELQSRLYSATQGATGKDFETALRAFAKRDGDYKGIRRVRLSEALNVIPIYDKEGRAYKGVKGDANARFDVWRLPDGKWVSKWTDRDGMERSGVVSMFNAHQKGKAELKPHPAAKRVLSLRQNDLVAVERDGGAREIMRVVKFASKGEITFALHKEAGPLKARNELPDDPFRYFTSSASGLKKSNARQIRIDELGHVFDPGPRD

SEQ ID NO: 18108 - protein, 1105 aa, unidentified
  REGION 1..1105: note = Cas Enzyme sequence
LGVDLGPTSVGWAVLDHDRNKIEALGVRLFPGAENPKDGSSLAEARRLARGARRSTRRKQRRMKDIRKLLVSSGVLTQDAMDRVSKTVGEHTPWEYRVEGLDRLLKPDEWTRVLIHMAKRRGFKSNRKEAPEGVQKADKNDDEGKMKAGVAENSLILKTGNNGRGYRTVAEMFVMDPKFGEHKRNKDGQYINTVLRAEIEAEVQELFKRQRSLGNPFAGEDLEKTYLEIFNRQLPFASGDIIEKMVGHCTMEPEELRAPKASWTAERFILLSNIRNMRVVVDGRTGELGPEKSAKLLQYCYDHTKVTYKQIRNLLDPAPKKSKKKGHPEEQQPQQAPNWHFAYIPAAKKKVSRKKAADKDAENPQAESTQEYDPEEATFAELKAFHEFRKAVTKALGEKYWTDLTANNPRVMDDLAFALTFRKNEEDIRNCMAERNVPKELIEAVIGLNFKGTVNLSLKAMTKLIPFMEEGSDFTEACGQAGYSSFDPRSGSNRSILLPVPDKGKVRNPVVFRAITQTRKVINEIIRKYGSPERVQIELAKELAKPIEVRKAIKERNDENYRQKQVLRDEFENRFSHRPSDSQLEKYRLWKEQDGYCPYTGEQISLDMLFSVKSGTYADIDHIVPYSRSFDNSWTNKVLVMTHANRDKKDMTPYEYFGQDSEQWNTFLKNVEKYIPDKSKARRLMTKDRDFDEIKLRCLNDTRSITKYVADWIESSLVFSDPEIRNPVVRINGQATATIRKQWGIESCKRRDESDLHHALDACVVAAATPAIIDRISKYSAADELGELREEDPTDSRKRLPEPWKDFAREVRARISEDPAGLIKSYGITSYTEEELQELRPIFVSRMPDRKARGEVHEATVRSLRYADEGKGTVVKVPLKKIKLKRLENMVGKDRDKILYEALRKRLKEHADKPLKAFAEPFYKPSKDGTPGRIVKSISLFDASVCGLKIREGMSGNGNGSMVHVNIYRKDGKHYIVPYYIEDIARKRTRMHAIVAGKPESEWLEIDNTYEYMFSLYPNDILRVKNNNGEEIFGYYRGCHRTTGGIGIISHDSAKTEKMIGIRNAAVLEKYTVDVLGEYHKVKSEKSACGKLFRKAEKKKARTAA

SEQ ID NO: 18109 - protein, 984 aa, unidentified
  REGION 1..984: note = Cas Enzyme sequence
GFKSNRKEAPEGVQKADKNDDEGKMKAGVAENSLILKTGNNGRGYRTVAEMFVMDPKFGEHKRNKDGQYINTVLRAEIEAEVQELFKRQRSLGNPFAGEDLEKTYLEIFNRQLPFASGDIIEKMVGHCTMEPEELRAPKASWTAERFILLSNIRNMRVVVDGRTGELGPEKSAKLLQYCYDHTKVTYKQIRNLLDPAPKKSKKKGHPEEQQPQQAPNWHFAYIPAAKKKVSRKKAADKDAENPQAESTQEYDPEEATFAELKAFHEFRKAVTKALGEKYWTDLTANNPRVMDDLAFALTFRKNEEDIRNCMAERNVPKELIEAVIGLNFKGTVNLSLKAMTKLIPFMEEGSDFTEACGQAGYSSFDPRSGSNRSILLPVPDQGKVRNPVVFRAITQTRKVINEIIRKYGSPERVQIELAKELAKPIEVRKAIKERNDENYRQKQVLRDEFENRFSHRPSDSQLEKYRLWKEQDGYCPYTGEQISLDMLFSVKSGTYADIDHIVPYSRSFDNSWTNKVLVMTHANRDKKDMTPYEYFGQDSEQWNTFLKNVEKYIPDKSKARRLMTKDRDFDEIKLRCLNDTRSITKYVADWIESSLVFSDPEIRNPVVRINGQATATIRKQWGIESCKRRDESDLHHALDACVVAAATPAIIDRISKYSAADELGELREEDPTDSRKRLPEPWKDFAREVRARISEDPAGLIKSYGITSYTEEELQELRPIFVSRMPDRKARGEVHEATVRSLRYADEGKGTVVKVPLKKIKLKRLENMVGKDRDKILYEALRKRLKEHADKPLKAFAEPFYKPSKDGTPGRIVKSISLFDASVCGLKIREGMSGNGNGSMVHVNIYRKDGKHYIVPYYIEDIARKRTRMHAIVAGKPESEWLEIDNTYEYMFSLYPNDILRVKNNNGEEIFGYYRGCHRTTGGIGIISHDSAKTEKMIGIRNAAVLEKYTVDVLGEYHKVKSEKSACGKLFRKAEKKKARTAA

SEQ ID NO: 18110 - protein, 1101 aa, unidentified
  REGION 1..1101: note = Cas Enzyme sequence
MKYTLGLDIGTSSVGWAVINNEKNRIEDLGVRLFESAENQKDGESLAKPRRDARGMRRRLARRGYRLDKIKTIFETEKLLTREQMEGIHSRPNNPYEIRARGLDKPLTPEELFIAVYHLAKRRGYKSNRKKVIEGEGEKANENKAVLGSIDNNKKLLAHGGYRTVGEMLFKDKNFESEKRNKQGSYLHACSREMLQEELEKLLKTQQTLGNKDITDKLIVELSEPKTGAFGYQRHYAQGEQIKKMIGTCTFEPTEMRAAKATFSFQYFNVLQRLNNLRIINKDDQSERPLTKEEREKVLSRVFSTKEVKYSQIRKDFGLKPSERFNMVQYFIRQKDAIGKTDEEIVDLIENKTKFPSMTKYYELKKALNENDWEILKKQPTVLDAIATALTVYKTDEDIKKELETIALDNGDKLSEKIITGLLALSFSEFGHLSLVALRKIIPSMEKGMLYDDACRQVYPDHKGYKTERSNKLRPLDVNDHSITNPVVRRSISQTIKVVNAVIDKFGAPTEVHLELGRELAKNHKERTQDHKKQKENADRNEKAKAQIEELGIQTRGGQDIIKFKLWMEQGNKCAYSGNRIDELRLFEDGYTEIDHIVPFSRSFDDSYNNKVLVLKKENQEKGNRIPYEVIGNDADAWVRFENIVNSMNINPRKRQNLLLKKYTGGDITTRSLNDTRFASRYLKNYIADTLLFAENAPKQKVVTVNGQATAYLRKRWGLNKDREENNRHHAQDAVVVAVTTQGLVQKVMRYSKTGEIVDYLHAHKGAKIIDPETGKEFDDETKREVNEQYIAQHNRRIKFVEPWTNFTKELDARMKDDVIERLKLLKHTLGLDGYPETEDMNFVRPIFISKMPRHKVTGRAHQETLRSPKRFKDEESVVRKQLSGLTLKTLESMAGKESDAKLYEILKARLTTHGDDPKKAFAEPVHKPMKDGTDGPIVRSIKIVSEGQKSGLLVNEGKALADQDTMVRIDIFSKESKKGKKQFYIIPVYAYHFAKRILPDKFITPGKAEKDWEINDDSFKFEFTAYPNDLIKIIKGDDVRFGYYSGCNRALGAIHILPHDQNQPLVNNGVKTLDNIEKYSIDILGNYHLVRNEKRQEITK

SEQ ID NO: 18111 - protein, 1079 aa, unidentified
  REGION 1..1079: note = Cas Enzyme sequence
MIALNNTKKGVFMALVFGLDIGIASVGWAAIDASQEIPLLGLGSRIFVSAEVPKTGESLAKPRREARGMRRRIRRRAHRMARIRRLFYRVGLINDVVPEVLADSTADDLTPWLLRADGLERKLNQRDWARTLLHIAKHRGFKSNRKSEVSDEKSEGGKLLKGVTGNAKLLIDKGYRTVGEMVWKDVKFADHKRNKGGDYSHTVARDDLLQEIQSLFEAQRNLGNSHTSKDFEAEYTKIFASQRPVDDGEIAEMVGDCTFEVGEKRAAKATYSAERFVLLSRLNNLMLIDAGERRVLDTEQRKIIETMAYKSAKVKYSQIRKALELPESIRFNLVQYKSGEIDKAEDTTFAELKAYHHMRLAITKACGELVWGNLTNQPDKLDAIATALTWYKSDDKIREILAPEQLEPTLLDAVLGLSFDKAVALSLKALRNINPFLAQGLRYDEAALAAGYDHSAPTEAQPQQFLPYIPTDEVRNPVVLRALTQARKVINAMIRRFGSPTQINIELSRELSQPYSERKDIEGKQKEFQAEKERTVKQFNDTFGRDPRGDEFTKFRLWREYNYCAYCGVYLEPARLLEEGYAEIDHILPYSRSMDDSLNNKVLCTSKANRDKGNKTPYEYLNGASQSQLWHEYKVRIETHKAFRQAKRNRLLRVDFEEKAEQEFRERNLNDTRYIARYLQEFVKTYLQFAPSENKIKVQTRNGAVTSFLRAHWGLLKVRADGDLHHALDAAIVACTTQGFVKKVSDYSRKKELWFSDLKSSDKKLGDNSRNLEIIDTQTGEITATNYQKKDGRDFPLPWENFRVDVKDALLDVFVSRAPTRKATGGVHDEKIRSTKKLMSDFITSSKMNLADFKIDSKKYKTTEALIKLLDGIPEKETRNANLYQALKKRIETGGKEPFAKPFYLGKNGEESDAFGRLIKGVKLERTTKTGVLVRGGLADNGEMLRVDVFTKAGKFYLVPIYLADRVSGVLPNKAIKQAALEQDWPVMDGSYQFAFSLCNNDLILIADKKGEASFIRGYFKGAHRGTGNINIEGHDRSWKKEGVGVQNIGTFKKLQVDVLGNVYEVKKEPRYGLAESAD

SEQ ID NO: 18112 - protein, 989 aa, unidentified
  REGION 1..989: note = Cas Enzyme sequence
MIERILGIDLGIASLGWAVIEYDKEDDTNNKIVDCGVRLFTAAETPKEKESPNKARREARGIRRVIKRRRVRMNEIKKLCITNGLLNVNDFDLDDGIYNSKANRTDVWKLRHDALHRILSPNELARIMIHIAKHRGFKFIGDDESDEESGKVKQAGAELREKFQNAGCLSVGEWLWRERGEHGKKRNKSGDYEISIPRDFLVQEIETIFASQAKFGNTLATDALKDSYKNIAFYVRPMQSIEKMVGTCTYFPDQKRAPKSSPTAERFVAIGKFYNTVVVDNEGNEHKIIEIKSMDELMEFATSKEKLDYKQLRKFLELNEHQIFKGLTYKGKPKKAKKGEAETLDEWEFDKADAEKKVWLTLKGHAAFKTALGDEKFSELMRNIDLADEVAKTLTYFKDERQKRDELIKLGLGADTIEALCKIGFTDFVQLSLKALKAILPEMMSGKRYDEAVGILGKPAFEKSIYLPPLKDTDIDILNPTVIRAFAQFRKVANTLVKKYGSFDKVHFELAREVNTKADIKGMIEGQRKNEKEREAAKVWITENFESSVPLTRKNILKKRLYEQQSEICPYTGEHIKLDRLFDEGYCEIDHILPRSRSADDSFANKVLVLTKANQDKINRTPFEWFGHDASAWERYEARINSTTNRSKMGMGKINRLLKKNFDENSEKEFLSRNLNDTRYMARAIKTYCENYWKLSHEDDKLRIQIRSGKLTSELRSRWIEGYMKDRSIHTHHALDAIVIAFATQSMVQKLSTYYGAKETRRAKEKPEFKTPMEHFREAVDKALSLERTETICAKDGREVTLNRLLISRPPRASVTGAAHKETIQSPNDYKGRGVTVNSGKGMCDNGDMPRVDVFTKEGKYYLVPIYVADFAKEELPSKAIVAGKGKEWIAIDSSYSFLFSLHKEDLVQIQLKNEEPFLGYFKGAHSATAQVQIQAIDSDYLKIAGSKTALIFKKYTIDPLGYYHEVKSEKRLGTIPQEAKKRKNIKNS

SEQ ID NO: 18113 - protein, 1058 aa, unidentified
  REGION 1..1058: note = Cas Enzyme sequence
MKILGVDLGIASVGWALVDDKSNKIIDSGVRIFTQSTNKDGKTLASVRREFRGSRRVLSRKKQRLTQLKKLFVNHKLLSKSEFKHLFSGKNRLDIWQLRAKGLERQLNNNEWARVLYHIAKRRAYQSNRKSEEIGNLDKKKVLSAIETNQEKISQGGYQTIGEMIYKETRHPSSGRIRRNKKDNYTWSISRNFLRQEIDVLFKVQRSFGNKFATDELKQEYKDIAFTQRPIKFKADLVGKCTFEKDEYRGAKNCFSSEKSILIQKINNTDLVDKDTGEIVRLFEYVNLNSLLDIFYSTKEVKYTTLRKQLKIPSNFEFKQLDYQKNFEYKTNIKAKIEDFYKLEYWLSPEQKEMLEKQVLDDKKEKFKRYKYTSIRSILSLSESQKFKGVNYNTNVEATIFGKLTGYHTIKSELDSEMFNLLLSNKDKFNKIAEIITYQKDDESATQDLREQVFNDLNLDEIIINVAIKGLLNISFSGFNNLSIKALDSILPHQQQGLKYHNAIKEIYEHHSQFKNTNPQQYLRPLNKEENYQITNPTVKRTFSQFRKVLNAVIRKHGSFDAIHIEMTRKLKNSKKRKFEIQAGQEEYKQEKEVIKAKFLEIFKHEGSGRELLKLRLYEQQHGKCIYNTKKVIEINRLREDGYVEIDHILPWSRTFDNSLNNKALCLSKENQNKDNQTPFEYLANSDKNSQEWQEYKNYISSFSSIKQAKKNKLLNTTLSKRRGNDLLDDDIENPESGFLARNLNDTAYASKFIKNFVEQNLVFLQNSKIKQKVKVRNGALTDQLRYNWGVEEKNRGNNLHHAEDAIILAFSTQSEVQRMSAISAKREDFKYQTAGERLIKFTPPFADFKNALDESINNIFVSFAPRRKIAGAAHKATIKPKDIGGKYKFLVNKGVAENGIIQRIDVFKNIKNKYQFVVFYPADFYKDNFPELDLSGNKIDKNSEFLFSLFKSDLIGFTRRDKSEQRAYFSFITSDGNIIYQPNELASYEVPSLDKEGKQKRGRNDKLLTKPLKFKITTLTSLKKYQVSVLGKYQEVVSEKRLPLIKQMRKNKPKKKK

SEQ ID NO: 18114 - protein, 979 aa, unidentified; identical to SEQ ID NO: 16326
  REGION 1..979: note = Cas Enzyme sequence

SEQ ID NO: 18115 - protein, 978 aa, unidentified; identical to SEQ ID NO: 15504
  REGION 1..978: note = Cas Enzyme sequence

SEQ ID NO: 18116 - protein, 975 aa, unidentified
  REGION 1..975: note = Cas Enzyme sequence
MILGLDLGITSIGWALVNVDDEDAQNNKIIDSGVRIFTIAEHPKDGKSLALPRREARGARRTTKRKAQKIKAVKRLLIKEKVVTANELNNLFIGNKKQKDVWDLRREALYRELNNKEFARIMVHLAKHRGYASNRKSEEPTDSEGKAVLSGITHNKTILQEKSYLTIGEYISTKTKKRNGKDTEGKLNYENSVSREMLINEITTIFERQKEFSNPHAKEELLEEYKNIAFTQRALKSVEGMVANCPFETNKKRAPKASSTFETFRALQKLKNLRMISNEGESALTKEQILQAIQKAKTAKSFTYKTLKTLFALPKEVQFKGLTYFDHKTGEAKEPESAKLLDFSAYQKIKDAIQSSDNLYWNKIEESVNLLDEIAKILSTHKDDKKSLEELNKIIDNPSVCNALISLSFSGFGHISVEAMRKINPYLLEGIDYDKACEMAGYDFKAIFKGDKSTLLPPLSEQENLEMTNPVVKRAIAQMRLVYNAITRKYGAIDAVHVEFTRDIKKSHKDRNDIKKSQEEFQALKEEAKAEAIKILGKEPSAKELLKFRLWKEQNGECIYSGAYISPSILADPYATEVDHILPYSRSLDDSLNNKVLCLTKQNQDKGNKTPFEYFGADKDSKEWQEFTGRVEGLKNIKGAKKGRLTKTNFDESSENAFKERNKNDTSYISKFVKNYIESHVEFKESKMKRHVYTMNGMLTSQLRYKWGVGDKNRENHLHHAEDAIILAFATQAQVQKLSTTSAKREGFSFKNKEEKAKELRFEPPMENFNEKVKESIENIFVSHMPRRKVSGSAHKETVYSNKTHSVKKADGKVEYLKGNSVNNNVKLKHGIALNDSMPRVDLFQNKKTNKYYLVPIYVSDFVQETLPNKAIVAGNKPWLEMDEEYEFKFSFYKSDLIEVKTKKTATKESVQVLGYFNTAVSSTAQVVIDTHDGNEEYRYGTQNLIFVKKYQVDALGNYIEVKNEKRQGTKKQNR

SEQ ID NO: 18117 - protein, 978 aa, unidentified
  REGION 1..978: note = Cas Enzyme sequence
MSKMILGLDLGITSIGWALVNVDDEDAQNNKIIDSGVRIFTIAEHPKDGKSLALPRREARGARRTTKRKAQKIKAVKRLLIKEKVVTANELNNLFIGNKKQKDVWDLRREALYRELNNKEFARIMVHLAKHRGYASNRKSEEPTDSEGKAVLSGITHNKTILQEKSYLTIGEYISKKTKKRNGKDTEGKLNYENSVSREMLINEITTIFERQKEFSNPHAKEELLEEYKNIAFTQRALKSVEGMVANCPFETNKKRAPKASSTFETFRALQKLKNLRMISNEGESALTKEQILQAIQKAKTAKSFTYKTLKTLFALPKEVQFKGLTYFDHKTGEAKEPESAKLLDFSAYQKIKDAIQSSDNLYWNKIEESVNLLDEIAKILSTHKDDKKSLEELNKIIDNPSVCNALISLSFSGFGHISVEAMRKINPYLLEGIDYDKACEMAGYDFKAIFKGDKSTLLPPLSEQENLEMTNPVVKRAIAQMRLVYNAITRKYGAIDAVHVEFTRDIKKSHKDRNDIKKSQEEFQALKEEAKAEAIKILGKEPSAKELLKFRLWKEQNGECIYSGAYISPSILADPYATEVDHILPYSRSLDDSLNNKVLCLTKQNQDKGNKTPFEYFGADKDSKEWQEFTGRVEGLKNIKGAKKGRLTKTNFDESSENAFKERNKNDTSYISKFVKNYIESHVEFKESKMKRHVYTMNGMLTSQLRYKWGVGDKNRENHLHHAEDAIILAFATQAQVQKLSTTSAKREGFSFKNKEEKAKELRFEPPMENFNEKVKESIENIFVSHMPRRKVSGSAHKETVYSNKTHSVKKADGKVEYLKGNSVNNNVKLKHGIALNDSMPRVDLFQNKKTNKYYLVPIYVSDFVQETLPNKAIVAGNKPWLEMDEEYEFKFSFYKSDLIEVKTKKTATKESVQVLGYFNTAVSSTAQVVIDTHDGNEEYRYGTQNLIFVKKYQVDALGNYIEVKNEKRQGTKKQNR

SEQ ID NO: 18118 - protein, 978 aa, unidentified
  REGION 1..978: note = Cas Enzyme sequence
MSKMILGLDLGITSIGWALVNVDDEDAQNNKIIDSGVRIFTIAEHPKDGKSLALPRREARGARRTTKRKAQKIKAVKRLLIKEKVVTANELNNLFIGNKKQKDVWDLRREALYRELNNKEFARIMVHLAKHRGYASNRKSEEPTDSEGKAVLSGITHNKTILQEKSYLTIGEYISTKTKKRNGKDTEGKLNYENSVSREMLINEITTIFERQKEFSNPHAKEELLEEYKNIAFTQRALKSVEGMVANCPFETNKKRAPKASSTFETFRALQKLKNLRMISNEGESALTKEQILQAIQKAKTAKSFTYKTLKTLFALPKEVQFKGLTYFDHKTGEAKEPESAKLLDFSAYQKIKDAIQSSDNLYWNKIEESVNLLDEIAKILSTHKDDKKSLEELNKIIDNPSVCNALISLSFSGFGHISVEAMRKINPYLLEGIDYDKACEMAGYDFKAIFKGDKSTLLPPLSEQENLEMTNPVVKRAIAQMRLVYNAITRKYGAIDAVHVEFTRDIKKSHKDRNDIKKSQEEFQALKEEAKAEAIKILGKEPSAKELLKFRLWKEQNGECIYSGAYISPSILADPYATEVDHILPYSRSLDDSLNNKVLCLTKQNQDKGNKTPFEYFGADKDSKEWQEFTGRVEGLKNIKGAKKGRLTKSNFDESSENAFKERNKNDTSYISKFVKNYIESHVEFKETKMKRHVYTMNGMLTSQLRYKWGVGDKNRENHLHHAEDAIILAFATQAQVQKLSTTSAKREGFSFKNKEEKAKELRFEPPMENFNEKVKESIENIFVSHMPRRKVSGSAHKETVYSNKTHSVKKADGKVEYLKGNSVNNNVKLKHGIALNDSMPRVDLFQNKKTNKYYLVPIYVSDFVQETLPNKAIVAGNKPWLEMDEEYEFKFSFYKSDLIEVKTKKTATKESVQVLGYFNTAVSSTAQVVIDTHDGNEEYRYGTQNLIFVKKYQVDALGNYIEVKNEKRQGTKKQNR

SEQ ID NO: 18119 - protein, 978 aa, unidentified
  REGION 1..978: note = Cas Enzyme sequence
MSKMILGLDLGITSIGWALVNVDDEDAQNNKIIDSGVRIFTIAEHPKDGKSLALPRREARGARRTTKRKAQKIKAVKRLLIKEKVVTANELNNLFIGNKKQKDVWDLRREALYRELNNKEFARIMVHLAKHRGYASNRKSEEPTDSEGKAVLSGITHNKTILQKKSYLTIGEYISTKTKKRNGKDTEGKLNYENSVSREMLINEITTIFERQKEFSNPHAKEELLEEYKNIAFTQRALKSVEGMVANCPFETNKKRAPKASSTFETFRALQKLKNLRMISNEGESALTKEQILQAIQKAKTAKSFTYKTLKTLFALPKEVQFKGLTYFDHKTGEAKEPESAKLLDFSAYQKIKDAIQSSDNLYWNKIEESVNLLDEIAKILSTHKDDKKSLEELNKIIDNPSVCNALISLSFSGFGHISVEAMRKINPYLLEGIDYDKACEMAGYDFKAIFKGDKSTLLPPLSEQENLEMTNPVVKRAIAQMRLVYNAITRKYGAIDAVHVEFTRDIKKSHKDRNDIKKSQEEFQALKEEAKAEAIKILGKEPSAKELLKFRLWKEQNGECIYSGAYISPSILADPYATEVDHILPYSRSLDDSLNNKVLCLTKQNQDKGNKTPFEYFGADKDSKEWQEFTGRVEGLKNIKGAKKGRLTKTNFDESSENAFKERNKNDTSYISKFVKNYIESHVEFKESKMKRHVYTMNGMLTSQLRYKWGVGDKNRENHLHHAEDAIILAFATQAQVQKLSTTSAKREGFSFKNKEEKAKELRFEPPMENFNEKVKESIENIFVSHMPRRKVSGSAHKETVYSNKTHSVKKADGKVEYLKGNSVNNNVKLKHGIALNDSMTRVDLFQNKKTNKYYLVPIYVSDFVQETLPNKAIVAGNKPWLEMDEEYEFKFSFYKSDLIEVKTKKTATKESVQVLGYFNTAVSSTAQVVIDTHDGNEEYRYGTQNLIFVKKYQVDALGNYIEVKNEKRQGTKKQNR

SEQ ID NO: 18120 - protein, 978 aa, unidentified
  REGION 1..978: note = Cas Enzyme sequence
MSKMILGLDLGITSIGWALVNVDDEDAQNNKIIDSGVRIFTIAEHPKDGKSLALPRREARGARRTTKRKAQKIKAVKRLLIKEKVVTANELNNLFIGNKKQKDVWDLRREALYRELNNKEFARIMVHLAKHRGYASNRKSEEPTDSEGKAVLSGITHNKTILQEKSYLTIGEYISTKTKKRNGKDIEGKLNYENSVSREMLINEITTIFERQKEFSNPHAKEELLEEYKNIAFTQRALKSVEGMVANCPFETNKKRAPKASSTFETFRALQKLKNLRMISNEGESALTKEQILQAIQKAKTAKSFTYKTLKTLFALPKEVQFKGLTYFDHKTGEAKEPESAKLLDFSAYQKIKDAIQSSDNLYWNKIEESVNLLDEIAKILSTHKDDKKSLEELNKIIDNPSVCNALISLSFSGFGHISVEAMRKINPYLLEGIDYDKACEMAGYDFKAIFKGDKSTLLPPLSEQENLEMTNPVVKRAIAQMRLVYNAITRKYGAIDAVHVEFTRDIKKSHKDRNDIKKSQEEFQALKEEAKAEAIKILGKEPSAKELLKFRLWKEQNGECIYSGAYISPSILADPYATEVDHILPYSRSLDDSLNNKVLCLTKQNQDKGNKTPFEYFGADKDSKEWQEFTGRVEGLKNIKGAKKGRLTKTNFDESSENAFKERNKNDTSYISKFVKNYIESHVEFKESKMKRHVYTMNGMLTSQLRYKWGVGDKNRENHLHHAEDAIILAFATQAQVQKLSTTSAKREGFSFKNKEEKAKELRFEPPMENFNEKVKESIENIFVSHMPRRKVSGSAHKETVYSNKTHSVKKADGKVEYLKGNSVNNNVKLKHGIALNDSMPRVDLFQNKKTNKYYLVPIYVSDFVQETLPNKAIVAGNKPWLEMDEEYEFKFSFYKSDLIEVKTKKTATKESVQVLGYFNTAVSSTAQVVIDTHDGNEEYRYGTQNLIFVKKYQVDALGNYIEVKNEKRQGTKKQNR

SEQ ID NO: 18121 - protein, 978 aa, unidentified
  REGION 1..978: note = Cas Enzyme sequence
MSKMILGLDLGITSIGWALVNVDDEDAQNNKIIDSGVRIFTIAEHPKDGKSLALPRREARGARRTTKRKAQKIKAVKRLLIKEKVVTANELNNLFIGNKKQKDVWDLRREALYRELNNKEFARIMVHLAKHRGYASNRKSEEPTDSEGKAVLSGITHNKTILQEKSYLTIGEYISTKTKKRNGKDTEGKLNYENSVSREMLINEITTIFERQKEFSNPHAKEELLEEYKNIAFTQRALKSVEGMVANCPFETNKKRAPKASSTFETFRALQKLKNLRMISNEGESALTKEQILRAIQKAKTAKSFTYKTLKTLFALPKEVQFKGLTYFDHKTGEAKEPESAKLLDFSAYQKIKDAIQSSDNLYWNKIEESVNLLDEIAKILSTHKDDKKSLEELNKIIDNPSVCNALISLSFSGFGHISVEAMRKINPYLLEGIDYDKACEMAGYDFKAIFKGDKSTLLPPLSEQENLEMTNPVVKRAIAQMRLVYNAITRKYGAIDAVHVEFTRDIKKSHKDRNDIKKSQEEFQALKEEAKAEAIKILGKEPSAKELLKFRLWKEQNGECIYSGAYISPSILADPYATEVDHILPYSRSLDDSLNNKVLCLTKQNQDKGNKTPFEYFGADKDSKEWQEFTGRVEGLKNIKGAKKGRLTKTNFDESSENAFKERNKNDTSYISKFVKNYIESHVEFKESKMKRHVYTMNGMLTSQLRYKWGVGDKNRENHLHHAEDAIILAFATQAQVQKLSTTSAKREGFSFKNKEEKAKELRFEPPMENFNEKVKESIENIFVSHMPRRKVSGSAHKETVYSNKTHSVKKADGKVEYLKGNSVNNNVKLKHGIALNDSMPRVDLFQNKKTNKYYLVPIYVSDFVQETLPNKAIVAGNKPWLEMDEEYEFKFSFYKSDLIEVKTKKTATKESVQVLGYFNTAVSSTAQVVIDTHDGNEEYRYGTQNLIFVKKYQVDALGNYIEVKNEKRQGTKKQNR

SEQ ID NO: 18122 - protein, 978 aa, unidentified
  REGION 1..978: note = Cas Enzyme sequence
MANTILGLDLGITSIGWALANVDDANPTNNRIIESGIRIFTIAEHPKDGKSLALPRREARSARRTTKRKAQKLRAVKRLLISEKIITTDELENLFIGNKKQIDIWELRKDALYRLLDNKELSRIMIHLVKHRGYASNRKSEEPTDSEGKAVLGGIEKNEKIVQESAYLTIGEYIATKVKKRNGKDSEGKLNYENSISRAMLIKEIETIFEKQKGFENKFVNNELLNNYKDIAFTQRPLKSVEGMVANCPFETDQKRAPKAAYTFEKFRALQKLKNLRIITQDGEVALTKEQINQAIYKAKTTSKFTYKSLKTLFSFDKAVQFKGLTYFDHKTGEIKEPEAAKFLDFSAYQKIQKAFESADNLYWSKIENSDTLLDDIARVLSTQKDDKKSFEELQKIIDNEAVSNALVGVSFSGFSHISTKALRKINPFLEDGLDYDKACEMAGYDFKAIFKGDKSLFLPPLTEQENLEMTNPVVKRAVAQMRLVYNAIARKYGAVDTVHVEFTRDIKKSHKDRNDIKKAQNEFQALKEEAKIHAIEILGKEPSAKELLKFRLWQEQNNECIYSGEKIRPEHLMDDLATQVDHILPYSRSLDDSFNNKVLCFTKQNQDKGNKTPFEYFGANKESKEWQEFSIRVECSKNLKSAKKGRLTKTNFDESSENSFKERNKSDTSYISKFVKNYIEAHALFKESKMKRHVFTMNGMLTTQLRYKWGVGDKNRDNHLHHAEDAIILAFSTQSQVQKLSTVSAAREGFSFKTKEEKAKNLKFEPPMEEFGNKVKESVSGIFVSHMPRRKIGGAAHEATVFSHKTLSVKKVDGKIDYLKGGSAKNNVKLKHGLAKNDAMPRVDLFQNKKTKKYYLVPIYVSDFVKPKLPNQAIVAGNKPWIEMDEEYEFLFSFYKSDLIEVKTKKTATKESVQVLGYYDSTHSGTANITIKSHSGDEEFSYGSQNLVFIKKYQVDALGSYVEVKNEKRQGTKKEKN

SEQ ID NO: 18123 - protein, 978 aa, unidentified
  REGION 1..978: note = Cas Enzyme sequence
MSKIILGLDLGITSIGWALANIDDNEPKNNKIIDSGVRIFTIAEHPKDGKSLALPRREARSARRTTKRKAQKLRAIKRLLINEKIITADELENLFIGNKNQKDAWQLRRDAIYRLLDNKELARIMIHLAKHRGYASNRKSEEPTDSEGKAVLGGIEKNKKLIQEKAYLTIGEYISTKKKKRNGKNSEGKLNYENSVSREMLIDEINILFHKQKEFGNKFVSNELLNSYQEIAFTQRPLKSVEGMVANCPFEPLEKRAPKASCTFEKFRALQKLKNLRITTQHGEITLNKEQINQAIQNAKTTSKFTYKSLKKLFDLDKDAQFKGLTYFDHKTGEVKDSESTKLVDFSAYQKIQKAIEGIDNMFWDNIKNNDESLDKIAKILSTEKNDKKSLEELNKLIDNVAVCNALITLSFSGFGHISTKALAKIIPFLEDGFDYDKACEMAGYDFKAIFKGNKSKLLPPLSAQENLEMTNPVVKRAIAQMRLVYNAISRKYGALDAVHIEFTRDIKKSHKDRNDIKKAQDEFQILKEEAKTHATEVLGKEPNAKELLKFRLWKEQNKECIYSGEYINPNILADPYATEIDHILPYSRSLDDSLNNKVLCLTKQNQDKGNKTPFEYFKADENSVVWQGFSGRIEGLKNIRHAKKGRLLKTNFDENSENAFKERNKNDTSYISKFVKNYIEAHIEFKESKAKQHVFTRNGMLTSQLRYKWGVGDKNRDNHFHHAEDAIILAFSTQSQVQKLSTISGKREGFSFKNREEKAKNLKFEPPMDEFGNKVKESVENIFVSHMPRRKISGAAHKETVYSDKTLSVKKPDGKIDSLKGNSIKNNIKLKHGIALNDTMPRVDLFENKKTKKYYLVPIYVSDFIKDTLPNKAIVQGNKPWLEMDDEYEFLFSFYKSDLIEIKTKKTATKESVQILGYYDGTHSGTANITLKAHNGSEEYSYGSQNLVFVKKYQVDALGNYVEVKSQKREGTKKQKR

SEQ ID NO: 18124 - protein, 960 aa, unidentified; identical to SEQ ID NO: 16315
  REGION 1..960: note = Cas Enzyme sequence

SEQ ID NO: 18125 - protein, 1099 aa, unidentified
  REGION 1..1099: note = Cas Enzyme sequence
  SITE 1033: note = misc_feature - Xaa can be any naturally occurring amino acid
MKYTIGLDLGTTSIGWSVINNDSNRIEDLGVRLFESAENPKNGESLATPRRDARSMRRRLARRGYRLQKIKDIFINHQLLTAEDISKILLTLNDPYLIRSKGLDEILSNRDLFVAVYHLAKRRGYKSNRKKITEVDTEGKAVLSGIENNRKDLEKSGCRTVGEFLNKLRQEGGSEVRNKPGMYAHSFDRGMLEAELVLILDKQVVLGNKSVTDKLRYELVGYSDTKKAVGVFNFQRPFASGDQIKKLVGSCTFEKNEIRAAKATYSFQYFNVLQRLNSIEVLNRDLGTRKLNDEERRIVLDKILDTKSVNYGQIKKWLNLSENDRFNMVTYFVSRKELEAGITESLQKDECEKKSKFPSMTDHFSIKKLVLESDEVFWNNLQQNIRALDLIGEALTLYKTDEDIIKSLHLIKLEDGSGIPAVVIDALLSLSFSKFGHLSIKALNRLIPLLETGMRYDEAVSTISEYKERFAFRDIKLKPISADNHSLTNPVVRRSISQTIKVVNAIIDKHGSPSEVHIELGRELAKNFKDRKKEEKDNLDNRVKNELALKHIQELFPSQIPTGQDIIKYKLWSEQSCKCGYSGEPIDDRRLFENGYVEIDHILPFSRSFNDGFANKSLVLKRENQNKGNRTPYEYMGANPERWKNFETNVTAMTALSRKKRDNLLTKKFVADDLTTRTLNDTRFLARYLKNYIENTLEFAKDSEKKRRVYTVNGMATAYVRKRWGFSKVREESSKHHALDAVVVAVMTPSVVQKVMDYAKRGEISAYLQSHKTATNTELVEVSESELQEAKAYLQRHESKFNFPEPWEGFHHETIARVGNNPALDIENRHKDIYGYKNVSDFSNLKPIFISKMPRRKVTGQVHLETLRSPKNFDNQVSSVRIPLTSLTTDRLVNEGRYLDPKLYTALKLKLDEYSGDGKKAFAEPFYKIQKDGTRGPVVRSVKLQNNTQKSGILINDGNALVDRASMVRIDIFSKPNKNLKDEFYFVPIYAHHVVAKELPDRVCSPGKHESDWTKLDKTFNFKFSLYPGDLVXITKKNENSLGYYIKAGISVASLVVATHDKSSESNIGIKTLDKFDKYVVDVLGNYSLVKGEKRLKFN

SEQ ID NO: 18126 - protein, 1099 aa, unidentified
  REGION 1..1099: note = Cas Enzyme sequence
MKYTIGLDLGTTSIGWSVINNDSNRIEDLGVRLFESAENPKNGESLATPRRDARSMRRRLARRGYRLQKIKDIFINHQLLTAEDISKILLTLNDPYLIRSKGLDEILSNRDLFVAVYHLAKRRGYKSNRKKITEVDTEGKAVLSGIENNRKDLEKSGCRTVGEFLNKLRQEGGSEVRNKPGMYAHSFDRGMLEAELVLILDKQVVLGNKSVTDKLRYELVGYSDTKKAVGVFNFQRPFASGDQIKKLVGSCTFEKNEIRAAKATYSFQYFNVLQRLNSIEVLNRDLGTRKLNDEERRIVLDKILDTKSVNYGQIKKWLNLSENDRFNMVTYFVSRKELEAGITESLQKDECEKKSKFPSMTDHFSIKKLVLESDEVFWNNLQQNIRALDLIGEALTLYKTDEDIIKSLHLIKLEDGSGIPAVVIDALLSLSFSKFGHLSIKALNRLIPLLETGMRYDEAVSTISEYKERFAFRDIKLKPISADNHSLTNPVVRRSISQTIKVVNAIIDKHGSPSEVHIELGRELAKNFKDRKKEEKDNLDNRVKNELALKHIQELFPSQIPTGQDIIKYKLWSEQSCKCGYSGEPIDDRRLFENGYVEIDHILPFSRSFNDGFANKSLVLKRENQNKGNRTPYEYMGANPERWKNFETNVTAMTALSRKKRDNLLTKKFVADDLTTRTLNDTRFLARYLKNYIENTLEFAKDSEKKRRVYTVNGMATAYVRKRWGFSKVREESSKHHALDAVVVAVMTPSVVQKVMDYAKRGEISAYLQSHKTATNTELVEVSESELQEAKAYLQRHESKFNFPEPWEGFHHETIARVGNNPALDIENRHKDIYGYKNVSDFSNLKPIFISKMPRRKVTGQVHLETLRSPKNFDNQVSSVRIPLTSLTTDRLVNEGRYLDPKLYTALKLKLDEYSGDGKKAFAEPFYKIQKDGTRGPVVRSVKLQNNTQKSGILINDGNALVDRASMVRIDIFSKPNKNLKDEFYFVPIYAHHVVAKELPDRVCSPGKHESDWTKLDKTFNFKFSLYPGDLVQITKKNENSLGYYIKAGISVASLVVATHDKSSESNIGIKTLDKFDKYVVDVLGNYSLVKGEKRLKFN

SEQ ID NO: 18127 - protein, 1099 aa, unidentified; identical to SEQ ID NO: 18126
  REGION 1..1099: note = Cas Enzyme sequence

SEQ ID NO: 18128 - protein, 1150 aa, unidentified
  REGION 1..1150: note = Cas Enzyme sequence
VPAMVRSISFHGSVFVVWLSYCLVVKHKFMKYTIGLDLGITSVGWSVVNDDKKRIEDLGVRIFTKAENPKSGASLAEPRRVARSMRRRLRRRNGRLQAVKRIFIEAGLPPDVIVSAHAKPNNPYLIRAEALDRVLTPQELFILVYQITKRRGYKSNRKKIDQVSDDKEKQAVLGGIQNMKALLEQGGFTTVGQILHSKLVEQRNLHSFGTGVRNHAGSYENSVSREMLEAELKEIFLTQRKHGNTFVTDDLERAVIGYDELGKATGAFNRQRHYVTGDILKKMVGICTFENESGKGEMRAAKATYSFQYFNLLQKLNNLKIDDLAEPLLPPRGLSLEEKQHLISYFHTVQEPSYHSVRTQLKLKPTERFNISYFAKRPKNNEPLPTEAEIQSQTEKTKFSNLKDYIHLKKIISETNQAFWNEIDSKKYIIDEIATILTLYRTDEDVLAKLDMIVDGERVVIPDDVKQALLGISFAKFGHLSLRALRKLIPHLENGLRYDEAVTAAGYGSKLAKRHKKLPPLSKDDNSITNPVVKRTVAQTIKVINAIIDRYGSPFAVHIELGRELSKSHKERGDIEKQQKENASKNERARQTIKETFRVLEPKGQDIIKYRLWEEQENKCAYSGVSIDEKRLFEDGYVEIDHIIPFSRSWDDSFNNKVLVMKRENQQKGNRTPYEYLGGEGDRWRDFEVLVESYKRMHYGKRRKLLLKKYTEDELTTRALNDTRYISRYIKNYIENSLEFSNLEDKRKKRVITINGMATAYLRKRWTFNKSRETDIHHAQDAVIVAVIDDSMVQQVAKHSKMGEVKEYLQLHKRAEGLVGISESEETEAKQQLADKQVRHSKLFPLPWEGFREELNARLSSDPQFELEACKDKIPWYKNCTLEELPSLRPIFVSRMPKRKVTGRAHEDTLRSPKWFKQQKPQSSVRTPLTSLTLEKLRGEQALYLDPKLKMALITQLDLHNGDAKKAFAEPFYKTMKNGERGPQVRSVKLIETGQKSGLLIHNGNALVDRASMIRVDIFVKQNKKDKDEFYFIPIYAHHVVEKNLPVRACTAGKRETEWEKIDDSFSFKFSLYPGDLIRIIKEGEKRFWYYVKAGISTNSFTVESHDGSETIPSMGIKTLDKIDKYVVDVLGNYHQVSREPRLSLQSKAE

SEQ ID NO: 18129 - protein, 1086 aa, unidentified
  REGION 1..1086: note = Cas Enzyme sequence
MKYSIGLDIGIESIGYSVLELDSKDHPFRIERLGSRMFDKAEHPKDGSSLALPRREARGARRRLRRHRHRIERIRSLIVSSNILTKDCLDALYCGKITDIYEIRARALDQLVSEEEFARILIHLAQRRGYKSNRKSDAKNEENGKILGAVSENIRRCQENGYRTIGEMFFLDQAFSVYKRNKENDYKATVDRFSVEYEAKRIFEVQRQHGANYANEQVEKAYLDILLGQRSFADGPACGPYSGNQVEKMRGNCTFEADEVRAAKASYSFQLFNLWQHINHIRIINGSNVRVLSDSERKKIFDLAHEKAEITYAQIRKFLGLSSDCIFNSIYYDKGKDFEQEKKTKLKDLDIYHKVRKCVESVSKEAFSRLTHEDLDVIGEALCKNHSDEKIKENLLNAGIEESVAEALLELPNFPKFGHLSLKACKKILPFLAKGMTYDKACEEAGYHFRANEVKAQMYLPPLDQNDKEITSPVVKRAVSQTIKVVNAIIREMGSSPTYINIELARGLALNYSERGKIEKEQKKNAELNEAIIQLLLNEYGVESPKGQDIIKMKLWQEQDGRCMYSGEAIEIARLAEPGYVDVDHIVPYSICFDDRMANKVLVLAKENRQKGNRLPLQYLQGMERDEFIVRVNCSKLKRAKKTRLLKENISEETEWKQRNLQDTQFIASYLRGYIEENLLFSPFDSGKKRHVIAVNGAITAYVRKRWGIQKIRENGDLHHAVDAVVIGCITQGMINRISKYSYYKETKDNGDFFLDETTGELMTKFPMPWEHFRDELHIRLNPDAETLRKLLYDANYASYAEIDLDKVNPVFVSRMCNRKNTGAAHKETIRSGKMLESEEKKFISKVPLESLKLKDGEIDGYYNPDSDRLLYEALKKRLVEFDGDGKKAFSGTVFRKPKSDGTEGPIVKKVKIMDATSSFVRVCESKGAAENDHMVRCDVFYVENDGYYFVPVYVADTVKNALPKYAPIAHKTPKLMNDEDFVFSLYPNDLIRICSSKDISFNKVNKKSNLPEKMTASRGEGVFLYYKGMDVSTAVLKGITHDNTYEYRSIGKTMQLIEKYEVDVLGNIHKVEREKRMDYSARKNK

SEQ ID NO: 18130 - protein, 1085 aa, unidentified
  REGION 1..1085: note = Cas Enzyme sequence
MKYAIGLDIGIESIGYSVLELNSEDLPFRIERLGSRIFDKAEHPKDGSSLAVPRREARGSRRRLRRHRHRIERIRSLIVASNILTKDVLDALYEGKVSDIYEIRTRALDKLVSQEEFARILIHLAQRRGYKSNRKSDAKNEENGKILVAVSENAKRCEENGYRTIGEMFYLDNEFSEYKRNKQNEYKATVDRFSVEYEARKIFESQREYGAPYANEEVEKAYLDILLGQRSFAEGPACGPYSGNQIEKKRGTCTFEEGEVRAAKASYSFQLFNLWQHINHIRVSNGDGTRTLSDEERRKIFELAHEKSEITFAQIRKCLGLTPDNIFNGIRYEKENSAEQEKKTKIKDLDIYHKIRKCVSSVSKEAFSSLSHEQLDAIGEALCKNNSDEKIATELYEAGIEKAVIEALLELPNFPKFGHLSVKACKKILPFLAEGMTYDKACEAAGYNFKANEVKAKMYLPPLDQNDKEITSPVVKRAVSQTIKVVNAIIREMGASPTYINIELARGLSLNHSEREKIEKEQKKNAEVNEDIIKRLLNEYGVESPKGQDIIKMKLWQEQDGRCMYSGEEIEISRLTEPGYVDVDHIVPYSICFDDRMANKVLVLAKENRQKGNRLPMQYLQGKKRDEFVVRVNCSKLKWAKKTRLLKENISEETEWKQRNLQDTQFIASYLRGYIEENLLFSPFDSGKKRHIIAVNGAITAYVRKRWGIQKIRENGDLHHAVDAVVIGCITQGMINRISKYSYYKETKDNGDFILDETTGELITRFPMPWEHFKDELKIRLNPDAEAMRKLLYDANYESYAEIDLDMVKPVFVSRMCNRKNTGAAHKETIRSGKMLESEKKFISKVPLESLKLKDGEIEGYYNPNSDRLLYEALKKRLAEFGNDGKKAFSGIVFRKPKADGTEGPIVKKVKIMDTTSSFVRVCESKGAAENDHMVRCDVFYVENDGYYFVPVYVADTVKDALPQYAPIAYKSPKLMNDEDFVFSLYPNDLIQIRPAKEIALNKTNKKSDLPEKITSPRGEGIFLYYRGMNVHTAVLQGITHDNTYEYSSIGKTMQLIEKYEVDMLGNVHKVEKEKRMDYSGRKNK

SEQ ID NO: 18131 - protein, 982 aa, unidentified
  REGION 1..982: note = Cas Enzyme sequence
MSKIVLGLDLGITSIGWALVNVDNDNSHNSKIIDSGVRIFTIAEHPKDGKSLALPRREARSARRTTKRKAQKIRAIKRVLLQNKIITQEELDHLFIGNKKQIDIWELRHDALYRLLTNKELSRILIHLAKHRGYSSNRKSEEVTDNEGKAVLSGIEKNKEVLKNHTYKTIGEFISSKEKKRNGKDKEGKLNYENSVSRDMIKDEIDLIFKVQQEFQNSFTTDKFLKEYKKIAFEQRSLKSVVDMVANCPFEVEEKRASKSSYSFEYFRALQKLKNLRVIDENGYEMPLIFEQVKIIVEKAKTTKNFKYKSFKKLFPQYKEMQIKGLVYYDHKTGEIKEPEKVKFLDFSAFQKIKDSIEKIDSNYWKSIENNIEILDAIATILTTEKDDKKSKEQLTKIVENRKVCDALVSISFSQFGHLSNKALRKIIPFLEEGDDYDKACEKAGYNFKAIFQGKKSLFLPPLSKQENIEMTNPVVKRAIAQMRLVYNAIARKYGALDSVHIEFTRDIKKSHDDRKKIEKEQGKFRDAKEEARVHAQEILGYEPNAKELLKFRLWKEQDEKSIYSGEYINPTLLKDPYATEIDHIIPYSRSLDDSLNNKVLCLTKENQEKGNKIPFEYMGEEQFSEFKQRIEGHKNLKQAKKSRLLKNNFDESSEIAFKDRNKNDTSYIAKFIKNYIEAHVAFKESKNKRHIFTMNGMLTSQLRYKWGVGDKNRDNHLHHAEDALILAFSTQFMVQKLSTVSANREGYIYKTKEEKSKALRFETPLEHFGEKVRESVSEIFVSHMPRRKVSGSAHKATVYSHKTLGVKKENGKVEFLKGGSVVNNVTLKHGIALNESMPRVDLFQNKKSKKYYLVPIYVSDFIKDTLPNKAIVQGNKPWIEMDDEYEFKFSFYKSDLIEVKTKKTAKKEAVQILGYYDSTHSGTAKIIFKSDDGSKENGFGVQNLVFIKKYQVDALGSYVEVKSEKRQGSIKENRLKRKKKN

SEQ ID NO: 18132 - protein, 996 aa, unidentified
  REGION 1..996: note = Cas Enzyme sequence
MFNNTSKTKSGSSHYDIYELRYIALDGLLTNQQLARVLIHLAKHRGFKSDRKKDKSVDGTVNKSLAENRKLLEENSYRTIGEMLYKNETFTANKRNRFGEYRVMLQRSDIGEEARIILETQHQLGNQLITQQFIEKYIKMFNWQKSFDWRGNIMDMVGNCQFELNEKRAPKACFSSEKFIALSKLNNIKYTEDSFEQSLTASEIQEIFNLAAGRTTKTFNITFATLRNHLGLSDEARFNFVKYGKNEDFLEAEKKTKIKELEFKATHELKAAIMAHCGKITWENLLSNIGLLDTIAIELAYNKTDETIKTALEKCFANQKNNFNTNTQQTIISAILEDGVSFDKNISLSLKALYKIIPHLENGQRYDEACESVGYHHSQKKKNANPKLPSIQALGLDNELTNPIVIRAISQVRKVINAVIDNYGSPYQINIELARDIGKSVDQRNEISKRQKNNQANNERLITEFEEHFRRKPMKDEFTKFKLWKQQGNKCIYSGEYINPENILHGTHATEIDHIIPHSRSFDDSMGNKVLCLTQENQRKGNQTPYEYIGQSGHNEQAWHKFEERCKLMNKTGYQLGFDYSKLDRLLLKKVDAQGFIERNLNDTRYIARFCKNYLENHLQFSHLEDNNKLRVRVLTGQATAFIRSHWGLSKSREENDLHHAQDACVIAAVTTKLVQNVTRYMHEKEFNRAPQISFVDEDGVIHDRFPMPNINFRQQILDSVNKVFVSRMPKHKISGQVHLDTIRSSKYVDKPVGEYNNGKPFSTISKQLVDSGIKLDKEGEIPTLCPTYKQHNPNIYQLLKERLEKHDNDAKKAFAEPVYAPRKDGTPSEVQIKTIKIIQPQNTGVKVNQGIADNGEMLFIDIFHKNGKNYIIPFYIADIGQNKPLSNKTIDGHVTEDEYFLCRLYKKDLLRITKDNHCHYVYYNGNDIANPYNIQFIPHDGSSNNPWGGKKCQLGIQRLKIEKYQVDVLGNITRVEKETRLDFSQLQPRRKNKST

SEQ ID NO: 18133 - protein, 921 aa, unidentified
  REGION 1..921: note = Cas Enzyme sequence
  REGION 460..470: note = misc_feature - Xaa can be any naturally occurring amino acid
  REGION 884..891: note = misc_feature - Xaa can be any naturally occurring amino acid
MNASILEHYSLGLDIGITSVGWAVLNLTVGKIADLGVRLFDKAEEPKTGASLAAPRREARNMRRRLRRKRQRMSNIRSLIISCGILSQTDMDNLFNSPHQCTPWELRTEGLDRLLTCEEWSRILIHMAKHRGFKSNRTVAESDIKNSEDGRVLSGIKENSELLQAGNNGAGYRTVGELIQSDPKFSGHKRNKGGEYSHTILRKDIEKEIEALFEEQRKFGSTYASMELEKEYKDIFGRQLPFASDGAIEKLIGYCFLEPAEKRAPKASWTAERFILLSKIMNLRVRLDGKKVSLSGDERITIDNLAYKNTKVTYKQIRKALNWQDNLIFDSLPFTKKDKDPEDSVFIELKGWHTFRKCLSEKLGTDYWETISVNPDLLDDLAYTLTFKKTDEDIARYLEERNIDKKIIDAVLPLNFSGVVNLSAAAMGKLIPLMEKDGCRYDEACVKAGYLHYKPAEKEXXXXXXXXXXXWKEIRNPVVIRAIAETRKVVNAVVRKYGPPESVQVELARDLSRSKEERDKIIKEQEENRSQKEKLAKEFQDKFDYAPNGRQLEKFRLWKEQNGFCLYTGQYLAPEDVFNGSDDSFAEIDHIIPYSISFDDSRINKVLATSGANRDKGNRLPYYYFGGDGEKWNEFTARVNANIQNRKKAARLKIKSLDESDISEMKERNLSDTRYITEYVAKWLEENLLFAEKKTENHVTRINGRATATLRWQWGINALKDRESSDLHHALDACVVAAATPGIIKKISDYSRNRELQKLKINAEGNKKRRCPEPWEHFRKEVEARLSENPAEKILEFGLASYSESELNDLKPIFVSRRPDRGATGAAHKDTIYSAKYLNDDPPKIVVKKALTSLKKSDLENIVGKERDRALYEALAKKLEEYEXXXXXXXXTFLENRPAMENQAPSYILLKFLTRALPVCR

SEQ ID NO: 18134 - protein, 1005 aa, unidentified
  REGION 1..1005: note = Cas Enzyme sequence
MKKKIFGFDLGIASIGWAVIDHSDENFDPETGEIIEGKVVGCGVRCFPVAENPKDGSSLAAPRREKRLLRRITRRKARRMLGIKRLFVAKGLVASTTELEALYAEQTGGDVWNLRAEALRRPLSKEELLRVLTHLAKHRGFKSYRKAAEEADKESGRILTAIAENRKESAGFQTLSQMIVERAKHSDDHKMRNYTPQEGENKGVAVYVNSIPREEIEKETKLIFEYQKQFGLFTDDLYRDFCKIAFRYREAGSVGHMVGRCRFEPEQPRAPKEAPSAELFVALSKINNLKVTVDGERRFLNGEERKALLELLKNTKEVKYSTIKNKLFKGREVFFDDVNYAQKTKKGKSGEEKAVNPEDAKFYAMKGWHKLKAAFSPEQWKKVGTNLPLLDLGMTAVVCEKNDAGIERFLSEKGIPEDYREVFKKLTGSEFINLSLKALYKLNPYLAEGLKYNQACEKAGYDFREDGIKLAEEKGLLLPPIANDKLTTVPVVNRAVAQFRKVYNAMVRTYGAPDQINLEIGRDLKKSRDERNQIMRRQKENEAERKEAADWLEKEGLAANGKNMLKYRLYRQQNGKCIYSGKAIDLRRLDENGYCDVDHIIPYSRSLDDGQNNKVLCLAEENRKKGSQTPYEYLEPLGRWEEFETVVNTTPSINRYKRNNLLNKDYKEKENDLEFRERNANDNSYIARYVKRYLEDAVDFSASSCAIRNRVQVRTGSLTDYLRHQWGLIKDRDASDRHHAQDAVVVACATQGMVQKLSKLSAIFENKDDFRRKKAEELGHEEAEAWYKYVKQQIREPWSGFRAEVLAGLEKVFVSRPPRKNATGEIHQETIRTVNPKRKKYNEKEILSGIKIRGGLANNGLMLRTDVFVKKNKKGKDEFYLVPVYLSDMGKELPNKAMVPGKKENEWIELDETYQFKFSFYMDDLIKIKKKENEIFGYFRGTNRATASVSVTTHDRSHTFEGIGVKTQDGIEKYQVDPLGRIAKVKKETRLPLTMMKKNRHKKGE

SEQ ID NO: 18135 - protein, 983 aa, unidentified
  REGION 1..983: note = Cas Enzyme sequence
  REGION 971..974: note = misc_feature - Xaa can be any naturally occurring amino acid
MKKKIFGFDLGIASIGWAVIDHSDENFDPETGEIIEGKVVGCGVRCFPVAENPKDGSSLAAPRREKRLLRRITRRKARRMLGIKRLFVAKGLVASTTELEALYAEQTGGDVWNLRAEALRRPLSKEELLRVLTHLAKHRGFKSYRKAAEEADKESGRILTAIAENRKETAGFQTLAQMIVERAKHSDDHKMRNYTPQKGPNKGVAVYVNSIPREEIEKETKLIFEYQKQFGLFTEDLYRDFCKIAFRYREAGSVGHMVGRCRFESEQPRAPKEAPSAELFVALSKINNLKVTVDGERRFLNGEERKALLELLKNTKEVKYSTIKNKLFKSREVFFDDVNYAQKTKKGKSGEEKAVNPEDAKFYAMKGWHKLKAAFSPEQWKEVGSNLPLLDLGMTAVVCEKNDAGIERFLSEKGIPEDYREVFKKLTGSEFINLSLKALYKLNPYLAEGLKYNQACEKAGYDFREDGIKLAEEKGLLLPPIANDKLTTVPVVNRAVAQFRKVYNAMVRTYGAPDQINLEIGRDLKKSRDERNQIMRRQKENETERKEAEDGLEKEGLAANGKNMLKYRLYRQQNGKCIYSGKAIDLRRLDENGYCDVDHIIPYSRSLDDGQNNKVLCLAEENRKKGSQTPYEYLEPLGRWEEFETVVNTTPSINRYKRNNLLNKDYQEKENDLEFRERNANDNSYIARYVKRYLEDAVDFSASSCAIKNRIQVRTGSLTDYLRHQWGLIKDRNESDRHHAQDAVVVACATQGMVQKLSKLSAIFENKDDFRRKKAEELGHEKAEAWYKYVKQQIREPWSGFRTEVLAGLEKVFVSRPPRKNATGSAHKDTIFSKSEKKGSLPIRYGMAEKENMFRLDVFRKENHFYIVPIYVVDLVDCKEFIDAPQPYEYVNGSFIKIDESFNFMFSLYKDDYVEITSKDECIKGYVNQYNAQSGQLYIGSVDNSPIFRIKTSTFLRDDNILLKIGDQEYXXXXRKNKSLLMD

SEQ ID NO: 18136 - protein, 1068 aa, unidentified; identical to SEQ ID NO: 16311
  REGION 1..1068: note = Cas Enzyme sequence

SEQ ID NO: 18137 - protein, 1068 aa, unidentified; identical to SEQ ID NO: 16312
  REGION 1..1068: note = Cas Enzyme sequence

SEQ ID NO: 18138 - protein, 1005 aa, unidentified
  REGION 1..1005: note = Cas Enzyme sequence
MKKKIFGFDLGIASIGWAVIDHSDENFDPETGEIIEGKVVGCGVRCFPVAENPKDGSSLAAPRREKRLLRRITRRKARRMLGIKRLFVAKGLVASTTELEALYAEQTGGDVWNLRAEALRRPLSKEELLRVLTHLAKHRGFKSYRKAAEEADKESGRILTAIAENRKETVGFQTLAQMIVERAKHSDDHKMRNYTPQKGPNKGVAVYVNSIPREEIEKETKLIFEYQKQFGWFTEDLYCDFCKIAFRYREAGSVGHMVGRCRFEPEQPRAPKEAPSAELFVALSKINNLKVTVDGERRFLNGEERKALLELLKNTKEVKYSTIKNKLFKSREVFFDDVNYAQKTKKGKSGEEKAVNPEDAKFYAMKGWHKLKAAFSPEQWKEVGSNLPLLDLGMTAVVCEKNDAGIERFLSEKGIPEDYREVFKKLTGSEFINLSLKALYKLNPYLAEGLKYNQACEKAGYDFREDGIKLAEEKGLLLPPIANDKLTTVPVVNRAVAQFRKVYNAMVRTYGAPDQINLEIGRDLKKSRDERNQIMRRQKENETERKEAEDGLEKEGLAANGKNMLKYRLYRQQNGKCIYSGKAIDLRRLDENGYCDVDHIIPYSRSLDDGQNNKVLCLAEENRKKGSQTPYEYLEPLGRWEEFETVVNTTPSINRYKRNNLLNKDYQEKENDLEFRERNANDNSYIARYVKRYLEDAVDFSASSCAIKNRIQVRTGSLTDYLRHQWGLIKDRNESDRHHAQDAVVVACATQGMVQKLSKLSAIFENKDDFRRKKAEKLGHEEAEVWYKYIKQQIREPWSGFRTEVLASLEKVFVSRPPRKNATGEIHQETIRTVNPKRKKYNEKEILSGIKIRGGLANNGLMLRTDVFVKKNKKGKDEFYLVPVYLSDMGKELPNKAMVPGKKENEWLELDETYQFKFSFYMDDLIKIKKKENEIFGYFRGTNRATASVSVATHDRSHTFEGIGVKTLDGIEKYQVDPLGRIAKVKKETRLPLTMIKKNRHKKGE

SEQ ID NO: 18139 - protein, 1068 aa, unidentified
  REGION 1..1068: note = Cas Enzyme sequence
MKKKIFGFDLGIASIGWAVIDHSDENFDPETGEIIEGKVVGCGVRCFPVAENPKDGSSLAAPRREKRLLRRITRRKARRMLGIKRLFVAKGLVASTTELEALYAEQTGGDVWNLRAEALRRPLSKEELLRVLTHLAKHRGFKSYRKAAEEADKESGRILTAIAENRKETAGFQTLAQMIVERAKHSDDHKMRNYTPQKGPNKGVAVYVNSIPREEIEKETKLIFEYQKQFGLFTEDLYRDFCKIAFRYREAGSVGHMVGRCRFESEQPRAPKEAPSAELFVALSKINNLKVTVDGERRFLNGEERKALLELLKNTKEVKYSTIKNKLFKSREVFFDDVNYAQKTKKGKSGEEKAVNPEDAKFYAMKGWHKLKAAFSPEQWKEVGSNLPLLDLGMTAVVCEKNDAGIERFLSEKGIPEDYREVFKKLTGSEFINLSLKALYKLNPYLAEGLKYNQACEKAGYDFREDGIKLAEEKGLLLPPIANDKLTMVPVVNRAVAQFRKVYNAMVRTYGAPDQINLEIGRDLKKSRDERNQIMRRQKENETERKEAEDGLEKEGLAANGKNMLKYRLYRQQNGKCIYSGKAIDLRRLDENGYCDVDHIIPYSRSLDDGQNNKVLCLAEENRKKGSQTPYEYLEPLGRWEEFETVVNTTPSINRYKRNNLLNKDYQEKENDLEFRERNANDNSYIARYVKRYLEDAVDFSASSCAIKNRIQVRTGSLTDYLRHQWGLIKDRDASDRHHAQDAVVVACATQGMVQKLSKLSAIFENKDDFRRKKAEELGHEKAEVWYKYIKQQIREPWSGFRTEVLASLEKVFVSRPPRKNATGSAHKDTIFSKSEKKGSLPIRYGMAEKENMFRLDVFRKENHFYIVPIYVVDLVDCKEFIDAPQPYEYVNGSFIKIDESFNFMFSLYKDDYVEITSKDECIKGYVNQYNAQSGQLYIGSVDNSPIFRIKTSTFLRDDNILLKIGDQEYIGKIGKFDNEKKQVVINGLKNNFMINALVKLNKKGDETKNIQTEKSYTKMSNEKKICLNVVDSIEKYQVDPLGRIAKVKKETRLPLTMIKKNRHKKGE

SEQ ID NO: 18140 - protein, 1112 aa, unidentified
  REGION 1..1112: note = Cas Enzyme sequence
MKCMRYTLGVDLGPTSVGWAVLDHDRNKIEALGVRLFPGAENPKDGSSLAEARRLARGARRSTRRKQRRMKDIRKLLVSSGVLTQDAMDRVSKTVGEHTPWEYRVEGLDRLLKPDEWTRVLIHMAKRRGFKSNRKEAPEGVQKADKNDDEGKMKAGVAENSLILKTGNNGRGYRTVAEMFVMDPKFGEHKRNKDGQYINTVLRAEIEAEVQELFKRQRSLGNPFAGEDLEKTYLEIFNRQLPFASGDIIEKMVGHCTMEPEELRAPKASWTAERFILLSNIRNMRVVVDGRTGELGPEKSAKLLQYCYDHTKVTYKQIRNLLDPAPKKSKKKGHPEEQQPQQAPNWHFAYIPAAKKKVSRKKAADKDAENPQAESTQEYDPEEATFAELKAFHEFRKAVTKALGEKYWTDLTANNPRVMDDLAFALTFRKNEEDIRNCMAERNVPKELIEAVIGLNFKGTVNLSLKAMTKLIPFMEEGSDFTEACGQAGYSSFDPRSGSNRSILLPVPDQGKVRNPVVFRAITQTRKVINEIIRKYGSPERVQIELAKELAKPIEVRKAIKERNDENYRQKQVLRDEFENRFSHRPSDSQLEKYRLWKEQDGYCPYTGEQISLDMLFSVKSGTYADIDHIVPYSRSFDNSWTNKVLVMTHANRDKKDMTPYEYFGQDSEQWNTFLKNVEKYIPDKSKARRLMTKDRDFDEIKLRCLNDTRSITKYVADWIESSLVFSDPEIRNPVVRINGQATATIRKQWGIESCKRRDESDLHHALDACVVAAATPAIIDRISKYSAADELGELREEDPTDSRKRLPEPWKDFAREVRARISEDPAGLIKSYGITSYTEEELQELRPIFVSRMPDRKARGEVHEATVRSLRYADEGKGTVVKVPLKKIKLKRLENMVGKDRDKILYEALRKRLKEHADKPLKAFAEPFYKPSKDGTPGRIVKSISLFDASVCGLKIREGMSGNGNGSMVHVNIYRKDGKHYIVPYYIEDIARKRTRMHAIVAGKPESEWLEIDNTYEYMFSLYPNDILRVKNNNGEEIFGYYRGCHRTTGGIGIISHDSAKTEKMIGIRNAAVLEKYTVDVLGEYHKVKSEKSACGKLFRKAEKKKARTAA

SEQ ID NO: 18141 - protein, 1098 aa, unidentified
  REGION 1..1098: note = Cas Enzyme sequence
MIMKYSLGLDIGTTSIGWAVVNEDKQRIEDLGVRIFERPENPKNGESLAKPRRDARSTRRRLKRRRQRLDYLKRFFIEHQLLSKGQVSDLLSYNKTYTYKDPYALRGKAIKEKVANDELFVALYHIAKRRGYKSNRKSIEEKDKESGKVLRAIKANQLFLAQYDGSIAAALLKEERFAKHKRNRDGNYDNSFIRADFETEILAILHTQGWSENWVNELLYANPTAEETKGKSGLFYQRPFMNEDLIRKMRGKCQYEDAPRAHKASYSFDLFRVAQDLAHLEYNDGEKLTPEQIRSCVEVFKKTKEPSYTTIRKALGYGKDDDSFHFDYIRGKEEKGEANRFGGLKFYHLVKTALKDLPKDWSKVEQDVDLFDKIGEILTLNKDDSSLEKAFKGLNLSDKAKTQLITINVSGFCHLSIRALRKLTPHIMEGNTYDKAVELAYPGKFTEKLSGDKNELPPLSEDQLNQLTNPVVKRAVSQTRKVINAIIKKHGAPYQIKVECATDLAKNFKDRKEIERQQKENAERNAIIKAKLEELGISNPTGQQIIKYKLYEQQNCKCMYCGSPLGTDIFTDEKLAEIDHIIPFSICGNDGIQNKVLTCTKCNQEKKNRIPFSVWGSDPVRWQTVVMLSNDQKIPFQKRNRILCEKPPKEAWNERALNDTRYMSRFITRYIKRNLQFAESEKGKQKVLAPTGFITSYLRKIYGIGSKDRDLNNCHHAVDACIIATVSQEQIKKVSEWNKYKELGAKYHTITLENDNGDTYQITQGDYAAQREMLPPWENFAQEVCARSGMLHDTGEIEKLSDFRDRFRQFKSYDEEFLQRIHPLFVSRMPKRSVKGQVHEETIRSPKTKDGGMRLCRKKLDKEFAKNYVKSPPKSWLENSVLIESDKPLYMQLKKLLEEKGEHAFDEDVYKNNKKVDKNGHLLSPVRTVKVYEKKPDTSGVYLNNHTQFADNGKTVCLNIYRRKDKTGKYKFFAAPLYAHSLSKKAIPILPTPTGRSSEEKAELAKLRNLDGLIMATPENGFELAAQVFPNDYIKIIYVDHTTEGYYAKYGVAGGTLSLMHHNQTSKDNMDLIHCSVSSAANVEVQNISILGDNFKFE

SEQ ID NO: 18142 - protein, 926 aa, unidentified
  REGION 1..926: note = Cas Enzyme sequence
AEFYPELTEEKINDLLYRQNYGLFFQRPFMSPELIAKMRGNCQFEKDAPRAQKASVSFEIFRLASDLVHLTYNNGQKLTPEEVAMCIEKAKEVVTFKYSHIAKILNQTHPEEIIFDYVRGLKKKDLNSDTDEAKKKTLNQKFSELKFYHAIKKALADLPEEWQKLEKNLELFNEIGFILTANKEDESVIKHLEELDLSKQAIENIASIKQNFTGFCHLSILALDKITPHILEGNTYDKAVVLAGYNFNDKLSGDQNRLPALTEEESQQITNPVTKRAVSQTIKVVNAIIRKYGAPTRLHIECASELAKSYDKRHQIEDNQKDNQATNQKIVDILKNEYHIVTPNYLQITKYKLYLEQDGKCLYSNQPIDLDRLFTDEYYCEIDHIIPKSRCGNDGLINKALVFNRENQEKRNQTPFEAWGGDTKRWQQFKTNVQSNLKIHPRKKLRLLAEVPPKEDWNSRALNDTRYITRFLSNYFKQHLKFSEDSHSKKKVFTPTGGITSYLRRIWHVGSKDRSGNLHHAVDATIIALVTEDIIKQCALMNKYIELGANYATKGINLSKFHHDIHSVIDPVTGEVIDLARYEKIKEEVLPWPNFDTELRFRATPLAIFVNELPKDKKESRPELTESAKLQQKNKSINTLAEWRDQFREIYKDQDELFKNSIHPIFVSRMPKRKGTGSLHQDTVRSPKGIIVDPKTQKITANPNHSSYIRTNLENIKLADLENSIIKTDDKSLYQQLKQLLEENDNDPKKAFKEPVYKNNIKVDKNGKPLSPVRTIKLIDDKNVKSGILLSRGTQFVNNGSMVRVDIYQKEVKGKNQLFYVPIYTHQVKKGSTRILPTTCGYDYVDETFKKLFSLYPNDYIVMKKDENISQGYYIGYDTAVSSISYISNLISGNSNFNRITGRSLSSIYRLDISILGDNYPWEKLY

SEQ ID NO: 18143 - protein, 1068 aa, unidentified
  REGION 1..1068: note = Cas Enzyme sequence
MKYSLGIDIGISSVGWAVLNLDEKRVEDLGVRAFHEAENPKTKAPLAEPRRIARGLRRRLRRKRGRLRTARELFIEYGLIAHNSDDTVFGDTHGKLTPWQIRAEGLDRLLTGEEFARALLHIIKRRGFKSNRKSTRDTEEGKMLAGITRNKNLMTDKGYRTAGEMYHLDEAFDSVKRNRMGSYLNTIDRDTLKEEINVLFEAQRKHQSSFASDDFQAKIIETFQWQKPFASGDDILKNVGLCTLLGDEGELRAPKNSYYIERFNLLSKINNTSYVINGDRIRFDETQRKQIAEEAYNKAKLTYGQIRKLLGLPDEARFTGLEYMQRPKKGQPREHSMKCEDAAISKMDGYNAVRKAFQKAGVWDDIKNDSDIIDKITFALTFYKTDEDIANYLREQGLVESVVNAALGCDTFAGVGHISTKAAKLLIPHLEQGYLYSEACTLAGFDHSNPQDCTLQRKLPLITRELVNNPVVLRSLCQARRVINAVIGRYGSPYAIHIEFARDVGKSREQRDEIRSRQDENAKDRERCAEEFREAYGTIPNSTDLLKWRLYREQDGKCAYSQRQFDIERLCEPGYVEIDHILPYSRSFSDAQSNKVLVFTSENRNKSNRTPHEAFGSDTMRWDRFCGWVKATIKNPHKRANLLRTRYDASDEKEQKDRNLNDTRYAARELAGFIRANLQFADPEYKRNVFCISGFITAQARWHWGLHKDREENDLHHALDAAAIAALLPYQVKMITEWAKVGETGETYIDRETGEVIEVSKRRLPRPWPNFAKEVTARLAEDPVQAIEQLALPSYSNNPPTIRPVVVSRMIRRKKTGQIHEETIRSVKRMESHGQTTVRKPLTELTADSIKKLICEEADPPLYKAIVERMQQFNNKGKDAFAEPLRKPTKDGSEGPIVRSVKMWQTQNTGIELRGGIADNGDMVRTDVFCKNGKYYLVPVYVSDILRKRLPNRAIVSGKPESEWPEMDEDYEFLFTLHPYDLLWMEADKREGRLYYYRGSHRGTGQLKLSLPNGEQVGNDDEVRIGARNAKLIKKYIIDVLGEISPAPAENRIGLEDDSGIESGEVEA

SEQ ID NO: 18144 - protein, 1049 aa, unidentified
  REGION 1..1049: note = Cas Enzyme sequence
MGVPMKYTLGLDIGITSVGWAVLNLDDRHVEDMGVRAFNAAENPKTRASLAAPRREARCARRRLRRRAGRLRRAKDLFVKHGLVAADRREAAFLQPDHEQTPWKLRAEGLDRLLSGEEFARALFHIIKRRGFKSNRKKVKKADDGKMLAGIGENTRRMDEYGYRTAGEMYWRDSKFEVRKRNTTDSYLNTVDRPLLEKEIAELFDRQRGLGSEFAATEFEQAIVDVFLWQKPYASGDDIIKMIGYCTFEKTELRAPRNSYHAERCMLLQKVNSLTYWLDGDRPRLDSEQRSVVQGMAYDQAKVTYAQVRKAVGLSDDARFAGLTYTAKPGKDGEPPSPLACESATFCELKGYHALRRACSGDGLWDRVKTDPDLMDHLASALTFYKTDDDIRAYLIERGVEEAVIEAVDECEFAKTSNLSLVAIKKIIPHLERGLLYNEACAEAGYNHSGAGGGPKQAKLPVISVESVRNPVVLRALTQARKVVNAVIDRYGSPYAVRIEFAREMGKSAEKRREIEKRQKENANERAEVAEQFRELFNREAKGGDVLKWRLYREQEGKCAYSMRPIELDRLFESGYAEVDHILPYSRSFDDTRANKALVLTAENRNKLNRTPFECFGHTPRWAEYEAWVKATIRDPRKRANLLRESFDERQEKEFKDRNLVDTSYIAREFASFVRDSLLFADSDNKLPLQCVNGRVTAQARWLWGLHKDREENDLHHAQDAAVIAALLPHQVKLLTEYSKVTETGQTYVDLETGEVIEHEKPRLPHPWPGFRKEVLGKLPDIMVSRMPQHKAGGALHEDTIRSTKALATQGVSTVKKRLTSLSENDLANLFDPEHNERLYAAIRTRMAEHSNKAEKAFAEPLHKPLRDGSPGPEVKSVKVCQTQNTGVKVRSGIADNGGIVRTDVFRKPNRKGQWEYYLIPVYSADCAVYRKTGSLPDRAIAAGKSEDEWPVVDESFDFLFSLQPYDLVRIAARSEDRLYYYKGAHRGKGALKVSLPNRNAEVWDVGVRTAERIEKFAVGVLGEYHPVRKEVRLGLANGGDIESGEAEG

SEQ ID NO: 18145 - protein, 1055 aa, unidentified
  REGION 1..1055: note = Cas Enzyme sequence
MKYLLGLDIGITSVGWAVLNLDAKRIENLGVRAFNAAEDPQSKAPLAEPRRLARSMRRRLRRRAGRLRRAKELFVQYGLVASERDDDIFLTKEKDAPTPYEIRAKGLDHLLTGEEFARALFHIIKRRGFKSNRKKAAPDNQDDKRMLGSISENRRIMEEKGYRTVGEMLCLDEKFRDKKRNGQDSYENTFDREMMEDEIKVLFSRQRELGSQFASEEFEESILQVFNWQMPFASGDKILKLTGKCTFEPDELRAPKYSYHAERFTLLQSLNNLRYTVNGDVLQLDAEQKKQIIEMAYTLKQVTYKQIRNALGLPEAARFNSLRYLHRNKDTKQMEESLDCEKSKFVEMKGYHAIKEACESAGVWDKVKNSPDLMDDIAFALTFYKTDEDISRYLEDKSVDPQVIDAVLGCGQQFSGVKHISTKAIKKLIPYMENGLRYDEACAAVGYDHSNPRSSNRSYKLPVVGDAVSTNPVVRRALSQARKVVNAIIDRYGSPYIIRIELAREMGKSAEKRNEIKRQQDENARLREERRREFIEKFGREPSGEDVLKYRLYVEQGGKCAYSLQPIDINRLFEPGYTQIDHIIPYSRSFDDSMSNKVLCLGSENQKKRDRIPYEVFGHDQKRWEEYERIVPAMFKDLKKRRNLLCKEFNEDEWKERSLSDTKWIAREFANFVREHLQFADPEVKKPVRCVNGQVVAYMRRLWGLEKHREEDDLHHALDAAVIATITDWQIQAITDYAKASENPDYLPYYVDEYTGEVIENKIRLPQPWPNFRKELLARLSEDPAAEIAKLSLSSYAGFDDVKPIMVSRMPQRKVSGPIHEETIRSVKKLGSEGKSVVKRPLLNLSKSDLDNLFDPDSNKVLYALIRERMERFDYEAKKAFAEPLYKPRKDGTPGPIVKSVKVCQTQNTGIEVRGGIADNGRMVRIDVSRKSDKHGKFKWYATPIYVSNFMRGELPDVPGEFVFSLYPYDLIRLRSKGGVFFGYYRGYNINTDSLTICEANNVQRVKSSIGIRNAYSIEKFYVDVLGDYYPIRREVRRGLENGGDFKSGEAEDSE

SEQ ID NO: 18146 - protein, 1083 aa, unidentified
  REGION 1..1083: note = Cas Enzyme sequence
MKYVMGLDLGITSVGWAVINLDKKRIEDLGVRIFPGGERPKDGGSLNENRRLFRGQRRRLSRRRVRMRKIKELLVEQGLIVKEELENFYQLKKEDRDVWLLRVESLERKLEDKEWARVLTTLAKRRGYKSNRKDSKSEKEESGRVLKAIQLNQTIMENKNYRTVGEMLVKETNITTETLAKQALRNKADQYDHCVLREMLVEELKTLFEIQRNLGNLKASESFEKEYLEVFEYQKPFMTRELMEKMIGKCTFEKEEPRASKNSWTFERFMLLQKINNLTYSTGSEKHNLSQEEREKIITLAYEQREIKYTTLRKTLKLPDDARFTGLNYFIRKKKQEELTEEKYRQEVEKTTFVKLNGYHTLKEAFKKNEKIGLWKEFEKDKEKLDDVAETLSKSKTEQEIQKELEQIGLTKEEIAIVKDVNFDKYGHLSYKAMKKILSYLEEGKTYDKACELAGYNFKNETENPQKKLPPILQERGINPVMYRTVTQTRKIINAIIEKYGSPYEIHIEVARDLTKNRDERNKIQKKQEENRAENEKTKEYIRETFKIENPKPVDILKVKLWREQGGKSAYSLKAISPEQLFEDNYVQIDHALPFSRSFDDSYNNKVLVLTKENQDKRNLTPREYIKNEEEWEQYEAWIKTTYKYNPRKRENLLMKNFDEERAGDWRARNLVDTKYIARFLANYIKSNLLFEDYGEKSNRIKVKMIPGGVTTALRHYWGIAKKDRETDTHHAEDAVILACATNEFINKVMDFSKYKELYHEYKDGNYIDKETGEIVENKYKTHEMKRPWPEFKEELEARTSQNPRHDLESGQFKNYNDFNFENLKPLFVSRMPNRKITGQAHKETIYSDRKNGVVVIKTRLQELSGEDIKNICTKEEYKELYMSDKNTYDAIYRRMAEYNFKADKAFAPGYTIRKKAKNGEGTIVKSIKVPSKMNSGVKVQGGIAANGGMVRVDVFEKDGKYYLVPVYVADLVKGEIPNLAIMANKPKSEWTFMDESYNFKFSLFLNDLVYVKKGEKEILGYYVSTHSGTGAINLKSPNGQSEYEGIGVKTLDKFEKYEVDLLGNYYKVKKETRKGGKSRLKK

SEQ ID NO: 18147 - protein, 1077 aa, unidentified
  REGION 1..1077: note = Cas Enzyme sequence
MNYGIGLDIGIASVGFAVMELDREDMPCRIIKMGTRIFEAAENPKDGASLALPRREARSARRRTRRRKHRKERIRSLFISQNMLSSEELDNLYNGNIADIYQLRVDALDRLLTNSELARVLIHLSQRRGFSSNRRAEKDTKEAGLLLKAVEQNKTAMSEKQYRTVGEMLCKDERYAENKRNKTENYMNTVSREMILEEARMIFECQHNYGNNLCNADFKEKYCEILLSQRSFDEGPGGNSPYGGDQIGKMVGDCTFEKDEKRAAKASYSFELFDLLQKINHIRLEFDGKSRALFEDERRKIIDKAHNSPSKMTAVSLRKLLGLPEDVGVNFKDYTPLKAYHEMRKAFDKINKDRIKAISIETRNEIGRIFTIFKSEDKIKLALQETDLSQYDMDSLVENLGSFSKFGHLSLKALNKIIPHLEQGFTYDKACKEAGYDHKGHSSGNKSALISLQHLAEETENTITSPVARRALSQCAKVINAVIRDMDRTSPVYINIELAREMSNDFDERMKLDKSMKENNARNERLKERIYTEYGKTNPTGLDIVKLKLYEEQSGICPYSLKQMDISQLFDPGYSDIDHIVPYSVSFDDSYKNKVLVRADENRQKGNRLPMQYLKGKKRDNFIVWVNCNVRSAAKKRLLLKEELTDEDLKGFKERNLHDTKTISRFMYNYLSDYLAFSPFTTERKRHVTAVNGAVTSMLRKRWGLNKVREDGDLHHALDAAVVACTTQGMINYLTRFNKSRENFYCEESGFEISKKTGEVLREKFPQPYKHFSDEAQARLSPTPKSAVERFGIYSPTELEQVKPIFVSRMPNRKISGAAHKETIKGIGENNSQIKKVPLTSLKLDKNGEIDGYYNPNDDRLLYNALKSRLAEYDGKGEKAFEEPFYKPKSDGTPGHLVKKVKIEEKSTLNVLVHDKTGSADNGGMVRVDVFYVEGDGYYLVPIYVADIVKGILPNKAIVAYKTHSEWKEMKDDDFMFSMYPNDLIYVEHKKNLTFSKVNKESKLPTTIERKGEYVYYKGTNISTGAMTIINHDKSYIIGGIGAKTLLKFEKWQVDVLGNISKVSYEQRLGFKNQKEG

SEQ ID NO: 18148 - protein, 1159 aa, unidentified
  REGION 1..1159: note = Cas Enzyme sequence
MTQKYSYSPKKYSLGLDIGTSSIGWAVLDLDKERIHDLGVRIFERPEDPQNGDSLAKPRRDARSARRRLKRRRQRLNNLKQFFIDQNILTRDRIEEVLSDKSEFNKLDVYALRSKALTEELSPEELLKVMYQIAKRRGFKSNRKVEEESEKEGGRVSKALKTNEKFLAENGYKTVGEALSHDENFASHKRNKRDDYTNSFSRDDFLHELEKIIEVQKSYALKSVSDTAINEMLYGLDDDKNVVNVSAIMYQRPFMTEELIKKMVGNCTFEENEKRAPRASYSFEIFRLASDLSHLVFIPRDASKRQAKRENLEIRLSSDQINKVIEAAKNQKSLTYKKVRSIAGISEDYVPKYTHGKKKDGDEFGEGNVFGGLKAYSDIKAALKNLPEDWAKIDNEPTINQIAYILTTQKSDEGIKTELNALPISDDAKNAIIKIKATNFGSFCHLSIKALQKITPHILNGMTYDKACEAAGYDFKKQSASLEQITNPVVKRAISQTLKVVRAIERKYGKPYFIKVETARDLAKNFKERNAIKKENEENQGYNEDIKSIIADGYEASPKTKGGKQLLSHLKELSVPLNKNADFNGQQIIKVKLYREQNGICPYSGKTIDFDTMLQDDNAYQIDHIVPFSRSNNDGITNKVLVLTEENQKKSNKTPFEYFGADENRWKEFVARVESIYKTRDIKTDDKATNAINYKYNGYAMKKKQNLLLQDYKNDSWNVRALNDTRYITRFIQNYLSQNVDFAGDKGKQHVIAPNGTTTAYLRKRWGLAKDRSEDVLHHAKDAAVVAAISPKIVYQANLFSKEQEMKLYLNNAKTIDEKRQILLQSTDENTGEITDEAAFTQTQKDLAQAEYFKLRSDEETKNRFPGPWTDFSKEIRKRSLNADIATLQNELRGLDNYDEEFRLSVKPIFVSRMPRRKATGSAHKETIRSPKVKDGDQRTVRMPLKKVKRKDVENSTLKESDKWLYKKLLERLDACDDNPEKAFAEPIYKNDKKTDKNGNKLSPVSTIKVYSTQPSGFYINDDKAFVNNGSMVRLDVYQKPDKKGKIEHFFVPVYTHQVGKNKPAPTKILPAPKGFTDVDETFTKICSLYPNDYVRCYFGNEIKEGYYVKYGINNGAMQVISHSSAGKDKDQLIQISPRSANLIERYDISILGDNYRWL

SEQ ID NO: 18149 - protein, 1118 aa, unidentified
  REGION 1..1118: note = Cas Enzyme sequence
MTQKYSYSPKKYSLGLDIGTSSIGWAVLDLDKERIHDLGVRIFERPEVPKTGKSLAEPRRIDRSNRHRLRRRRQRLNYLKRFFIDNNLISESHISDMLSPTRPKKWRPIYDPYALRIKGLNERLSPEELFAALYHIAKRRGYKSSRISVEEQDIEGSQVLSAISENKLLLEKYKTKSVAKVLTLDEKFKNNKRNKISTYKNSFVRKNFEDEVMLLLDSQKKFGLKLPYEKIQTLLYGDVKNGNYNGIFSQRPFMTRELIEKMRGYCEFEPGKPRAPKASYSFELFRLAQNLSHLRIVVDREARQLSENEIAKIIEKAKNVKVLKYEHIRDILGYKDDQSFSFAQGMIRGKIKNDDKKNGEGNKFDSMIFYHTVKKALEQHPKDWDILATNNFELLDTAGLMLTVNKDDSSLRTELSKLNISTYAVEALLPINVSGFVHLSFDSLHRITPWLLRGLNYSEAVEKAGYSFSQSLSGNKKKLPPLSEKQAAQITNPVVKRAVSQTIKVVNAIIRKYGMPYSVKIETASELAKNAQERSKIKKIQDENAEYNEKIKQKLITEFNIPTPTGLQITKFKLREQQNGVSLYSGKEINLENLFADEHYGEIDHIIPFSRCGNDGLNNKVLVFADENQEKGNLTPYEAWGGDDKKWTQFEARVRATAGLPTAKRDRLLSKSKPVEDWNVRALNDTRYISRFLRQYIRDNLDFPKIEDKTSTQRVFSPSGPITSYLRRVWHVGNKNRDDNNLHHAADACIIAATSPSIIQKISSLNKYYELFKYTDKNEIVDKLTGEVLDRNQFEQHIADLEPWDDFGKEVRKRSKLYNTPSELHNELTGLKNYDEEFRLSTLPIFVSRMPKRSGKGSANDATFRSPKIVAGYIDEKGKPAIARKQRVSLHSVDLKKLYDSPIRETDPKLYKILEQRLKEFNGDPKKAFAESIYKPTKDGKRGNIIRSIKIYNTRDSRSGFLVNKQRAFVNNGKTIRLDVYKRKNYKGIYEYYFAPVYTHLINTQKIEVLPTPTGRSKNEKADFDTIRTEDDKIYATLENGFIKQFSIYPNDYVRIYFDNEIIEGYYVKYNTNDGSLKLIKHSDASKNDNDLISKVAKTATLIERYDISILGDNYRWL

SEQ ID NO: 18150 - protein, 1139 aa, unidentified
  REGION 1..1139: note = Cas Enzyme sequence
MKPSKYSLGLDIGTTSVGWAVIDLEKERIHDLGVRIFERPEDPQNGDSLAKPRRDARSARHRLKRRRQRLNYLKRFFVNEKILTQAQIAEILDPKSTYNKLDVYALRDKALNHKLTAEELFKVLYQISKRRGFKSNRKSVEETDREGGRVSKALTINEQLLAERGYKTVGQALAQDEKYTEHKRNKRDSYTNSFARADFIHELEEIIKSQRKYALNNVSDEALHSLIYGVDSDGLLTNSSAIMYQRPFMTEELIKKMVGECTFEKGEKRAPRASYSFEIFQFANNLVNLVFVPKNTNSRQAKREHFRLTLSPEQIAAVVTEAKKTASITYKKVRQVAGISEEYAPGYVRGKINKDDPYGEKNEFGKLKAYHDIKKALKSTPEDWVKVDNESTLNEIAYILTTEREDVEILKKLSGLALSDEATYAILKINPKNFRSFGHLSIKALQKITPHILSGLTYDKACEKAGYDFRRKSANLEQITNPVVKRAISQTNKIVQAVIRKYGKSYFIKVETARDLAKNFKDRKAIENENKDNQAFNSEIKEIIEHGYNIKPKTKRGKNLLEFLRENNVPLSQNIDANGQMITKVKLYREQNGKCLYSGDPIDFQAMIHDDNAYQIDHIVPFSRSNNDGLTNKVLVKTEENQEKANRTPFEYFGGDETRWKQFAARVNATYQTRDIKTSDKAINSENYKFNGYAMRKKQNLLIEEYKNDSWNTRALNDTRYITRFVQNYLRRTVSFAEGDDKQRVLAPNGTITSYLRKRWGLSKVREEDVLHHAADATIVAAIDQHVIYRANLYAKRGEVIRFLAAAKTMNEKTNKLTGEILDDDEFTKAQHRKDALQVLSDKHFPEPWSGFRDEVDLRTRNINRESLHKKLQGAHLYDENFLSEIEPIFVSRMPRRKATAQAHKETIRSPRVKDDNQRMVRMPLSKIKIKDVENSVLKESDAWLYSKLILLLEANDNNPEKAFAEPVYKNDKKFDKHGKPLMPVSTIKVYSTQPSGFLVNKGRAFVNNGSMIRLDVYQKQNQKGKIEHFFVPVYAHQVGKNQPAPTKILPAPKGFTDVDKTFTKVCSLYPNDYVRCYFKNTIEEGYYLAYDSASGQITVLGHSAANKEGDNRVRISPRSATLIRRYDISILGDNAPRP

SEQ ID NO: 18151 - protein, 1145 aa, unidentified
  REGION 1..1145: note = Cas Enzyme sequence
MTQKYSYSPKKYSLGLDIGTSSIGWAVLDLDKERIHDLGVRIFEKPEHPKSGDSLAKPRRDARSARRRLKRRRQRLNNLKQFFISQNILTRDRIEEVLSDKSEFNKLDVYALRSKALTEKLSPEELFKVMYQIAKRRGFKSNRKVEEESEKEGGRVSKALKTNEKFLAENEYKTVGEALSRDENFASHKRNKRDDYTNSFSRSDFLHELEKIIEAQKRYALKNVSDTAINEMLYGLDDDKNVVNISAIMYQRPFMTEELIKKMVGNCTFEGNEKRAPRASYSFEIFRLASDLSHLVFIPRDASKRQARRENLEIRLSSEQINKVIEAAKNQKSLIYKKVRSIAGIGEDYVPKYTHGKKKDGDEFGEGNAFSSLKAYYDIKTALKNLPEDWAKIDNESTINQIAYILTTQKSDEGIKAELNALPISDDARNEIIKIKPANFGSFCHLSIKALQKITPHILNGMTYDKACEAAGYDFKKQSASLEQITNPVVKRAISQTLKVVRAIERKYGKPYFIKVETARDLAKNFKERNAIKKENEENQGYNEDIKSIIADGYEASPKTKGGKQLLSHLKELSVPLNKNADFNGQQIIKVKLYREQNGICLYSGKPIDFDTMLQDDNAYQIDHIVPFSRSNNDGITNKVLVLTEENQKKSNKTPFEYFGADENRWKEFVARVESIYKTRDIKTDDKVTNAINYKYNGYAMKKKQNLLLQDYKNDSWNVRALNDTRYITRFIQNYLRQNVDFAEGEGKQHVIAPNGTTTAYLRKRWGLAKDRSEDVLHHAKDAAIVAAIDQKIIMQANLHAKRHEIKELLAAAKTMEEKTDKLTGEIIDEDEFNKAQRRKNAMLVLSSKHFPQPWDDFGKEVMKRTLNIDIKTLQNELRGLDNYDEEFRLRVKPIFVSRMPRRKATGSAHKETIRSPKVKDDGQRTVRMPLKKVKRKDVENSTLKESDKWLYKKLLERLDACDDNPEKAFAEPIYKNEKKTDKNDNKLSPVSTIKVYSTQPSGFYINDDKAFVNNGSMVRLDVYQKPNKKGKIEHFFAPVYAHQVGKNKPTPTKILPVPKGFTDVDETFTKVCSLYPNDYVRCYFGNEIKEGYYVKYGINNGAMQVISHNSTGKDKDQLIQISPRSANLIERYDISILGDNYRWL

SEQ ID NO: 18152 - protein, 1145 aa, unidentified
  REGION 1..1145: note = Cas Enzyme sequence
MTQKYSYSPKKYSLGLDIGTSSIGWAVLDLDKERIHDLGVRIFEKPEHPKSGESLAKPRRDARSARRRLKRRRQRLNNLKQFFIDQNILTRDQIEEVLSDKSEFNKLDVYALRSKALTEELSPEELLKVMYQIAKRRGFKSNRKVEEESEKEGGRVSKALKTNEKFLAENGYKTVGEALSRDENFASHKRNKRDDYTNSFSRSDFLHELEKIIEVQKRYALKNASDTAIDEMLYGLDDDKNVVNVSAIMYQRPFMTEELIKKMVRNCTFEENEKRAPRASYSFEIFRLASDLSHLVFIPRDASKRQAKRENLEIRLSSDQINKVIEAAKNQKSLTYKKVRSIAGISEDYVPKYTHGKKKDGDEFGEGNVFGGLKAYSDIKAALKNLPEDWAKIDNESTINQIAYILTTQKSDEGIKAELNALPISDDARNAIVKIKATNFGSFCHLSIKALQKITPHILNSMTYDKACEAAGYDFKKQSASLEQITNPVVKRAISQTLKVVRAIERKYGKPHFIKVETARDLAKNFKERNAIKKENEENQGYNEDIKSIIADGYEASPKTKGGKQLLSHLKELNVPLNKNADFNGQQIIKVKLYREQNGICPYSGKPIDFDTMLQDDNAYQIDHIVPFSRSNNDGITNKVLVLTEENQKKSNKTPFEYFGADENRWKEFVARVESIYKTRDIKTDDKATNAINYKYNGYAMKKKQNLLLQDYKNDIWNVRALNDTRYITRFIQNYLRQNVDFAGDEVRQYVIAPNGTTTAYLRKRWGLAKDRSEDVLHHAKDAAVVAAIDQKIIMQANLHAKRHEIKELLAAVKTMEEKTDKLTGEIIDEDEFNKAQRRKNAMLVLSSKHFPQPWDDFGKEVMKRTLNVDIKTLQNELRGLDNYDEEFRLSVKPIFVSRMPRRKATGSAHKETIRSPKVKDGDQRTVRMPLKKVKRKDVENSTLKESDKWLYKKLLERLDACDDNPEKAFAEPIYKNDKKADKNGNKLSPVSTIKVYSTQPSGFYINDDKAFVNNGSMVRLDVYQKPDKKGKIKHFFVPVYAHQVGKNKPAPTKILPSPKGFTDVDETFTKVCSLYPNDYVRCYFGNNIEEGYYTAYDIDSGRITVINASSPSKEGTNRRRISPRSANLIERYDISILGDNYRWL

SEQ ID NO: 18153 - protein, 1145 aa, unidentified
  REGION 1..1145: note = Cas Enzyme sequence
MTQKYSYSPKKYSLGLDIGTSSIGWAVLDLDKERIHDLGVRIFEKPEHPKSGDSLAKPRRDARSARRRLKRRRQRLNNLKQFFIDQNILTRDRIEEVLSDKSEFNKLDVYSLRSKALTEELSPEELFKVMYQIAKRRGFKSNRKVEEESEKEGGRVSKALKTNEKFLAENGYKTVGEALSRDENFASHKRNKRDDYTNSFSRSDFLHELEKIIEVQKRYALKNVSDAAINEMLYGLDDDKNVVNVSAIMYQRPFMTEELIKKMVGNCTFEENEKRAPRASYSFEIFRLASDLSHLVFIPRDASKRQAKRENLEIKLSSEQINKVIEAAKNQKSLTYKKVRSIAGISEDYVPKYTHGKKKDGDEFGEGNAFGGLKAYYDIKTALKNLPEDWAKIDNESTINQIAYILTTQKSDEGIKAELNALPISDDAKNAIIKIKATNFGSFCHLSIKALQKITPHILNGMTYDKACEAAGYDFKKQSASLEQITNPVVKRAISQTLKVVRAIERKYGKPYFIKVETARDLAKDLEERKKIKKENEENQGYNEDIKSIIADGYEASPKTKGGKQLLSHLKELNVPLNKNADFNGQQIIKVKLYREQNGICPYSGKPIDFDTMLQDDNAYQIDHIVPFSRSNNDGITNKVLVLTEENQKKSNKTPFEYFGADENRWKEFVARVESIYKTHDIKTDDKATNTINYKYNGYAMKKKQNLLLQDYKNDSWNVRALNDTRYITRFIQNYLRQNVGFAEGEEKQRVIAPNGTTTAYLRKRWGLAKDRSEDVLHHAKDAAVVAAIDQKIIMQANLHAKRHEIKELLATAKTMEEKTDKLTGEITDEDEFNKAQRRKNAMLVLSSKHFPQPWDDFGKEVMKRTLNVDIKTLQNELRGLDNYDEGFRLSVKPIFVSRMPRRKATGSAHKETIRSPKVKDGDQRTVRMPLKKVKRKDVKNSTLKESDKWLYKKLLERLDACDDNPEKAFAEPIYKNDKKTDKNGNKLSPVSTIKVYSTQPSGFYINDDKAFVNNGSMVRLDVYQKPDKKGKIEHFFVPAYTHQVGKNKPAPTKILPAPKGFTDVDETFTKICSLYPNDYVRCYFGDKIKEGYYVKYGSASGQMILLSHASASKDNGTYLTCSARSATLIERYDIAILGDNYRWL

SEQ ID NO: 18154 - protein, 1118 aa, unidentified
  REGION 1..1118: note = Cas Enzyme sequence
MTQKYSYSPKKYSLGLDIGTSSIGWAVLDLDKERIHDLGVRIFERPEVPKTGKSLAEPRRIDRSNRHRLRRRRQRLNYLKRFFIDNNLISESRISDMLSPTHPKKWRPIYDPYALRIKGLNERLSPEELFVALYHIAKRRGYKSNRISVEEQDIEGSQVLSAISENKLLLEKYKTKSVAKVLTLDEKFKNNKRNKISTYKNSFVRKNFEDEVMLLLDSQKKFGLKLPYEKIQTLLYGDIKNGNYNGIFSQRPFMTSELIKKMRGYCEFEPEKPRAPKASYSFELFRLAQNLSHLRIVVNRETRQLSEDEIAKIIEKAKNVKVLKYEHIRDILGYTDDQSFSFAQGMIRGKIKNDDKKNGEGNKFDSMIFYHTVKKALEQHPKDWDILAANNFELLDTAGLMLTVNKDDSSLRTELSKLNISTYAVEALLPINVSGFVHLSFDSLHRITPWLLRGLNYSEAVEKAGYSFSQSLSGNKKKLPPLSEKQAAQITNPVVKRAVSQTIKVVNAIIRKYGMPYSVKIETASELAKNAQERNKIKNIQDENAEYNEKIKQKLITEFNIPTPTGLQITKFKLREQQNGVSLYSGKEINLENLFADEHYGEIDHIIPFSRCGNDGLNNKVLVFADENQEKGNLTPYEAWGGDDKKWTQFEARVRATAGLPAAKRDRLLSKSKPAEDWNVRALNDTRYISRFLRQYIRDNLDFPKIEGKTGAQRVFSPSGPITSYLRRVWHVGNKNRDDNNLHHAADACIIAATSPSIIQKISSLNKYYELFKYTDKNEIVDKLTGEVLDRNQFEQHIADLEPWDDFGKEVRKRSKLYNTPSELHNELTGLKNYDEEFRLSTLPIFVSRMPKRSGKGSANDATFRSPKIVAGYIDEKGKPAIARKHRVSLHSVDLKKLYDSPIRETDPKLYKILEQRLKDFNGDPKKAFAESVYKPAKDGKRGNIVRSIKIYNTRDSRSGFLVNKQRAFVNNGKTIRLDVYKRKNYKDIYEYYFAPVYTHLINTQRIEVLPTPTGRSKNEKADFDTIRTEDNKIYATLENGFIKQFSIYPNDYVRIYFDNEIVEGYYVKYNTNDSSLKLIKHSDTSKNDSDLISKVAKTATLIERYDIAVLGDNYRWL

SEQ ID NO: 18155 - protein, 1118 aa, unidentified
  REGION 1..1118: note = Cas Enzyme sequence
MTQKYSYSPKKYSLGLDIGTSSIGWAVLDLDKERIHDLGVRIFERPEVPKTGKSLAEPRRIDRSNRHRLRRRRQRLNYLKRFFIDNNLISESRISDMLSPTHPKKWRPIYDPYALRIKGLNERLSPEELFVALYHIAKRRGYKSNRISVEEQDIEGSQVLSAISENKLLLEKYKTKSVAKVLTLDEKFKNNKRNKISTYKNSFVRKNFEDEVMLLLDSQKKFSLKLPYEKIQTLLYGDIKNGNYNGIFSQRPFMTSELIKKMRGYCEFEPEKPRAPKASYSFELFRLAQNLSHLRIVVNRETRQLSEDEIAKIIEKAKNVKVLKYEHIRDILGYTDDQSFSFAQGMIRGKIKNDDKKNGEGNKFDSMIFYHTVKKALEQHPKDWDILAANNFELLDTAGLMLTVNKDDSSLRTELSKLNISTYAVEALLPINVSGFVHLSFNSLHRITPWLLRGLNYSEAVEKAGYSFSQSLSGNKKKLPPLSEKQAAQITNPVVKRAVSQTIKVVNAIIRKYGMPYSVKIETASELAKNAQERNKIKNIQDENAEYNEKIKQKLITEFNIPTPTGLQITKFKLREQQNGVSLYSGKEINLENLFADEHYGEIDHIIPFSRCGNDGLNNKVLVFADENQEKGNLTPYEAWGGDDKKWTQFEARVRATAGLPAAKRDRLLSKSKPAEDWNVRALNDTRYISRFLRQYIRDNLDFPKIEGKTGAQRVFSPSGPITSYLRRVWHVGNKNRDDNNLHHAADACIIAATSPSIIQKISSLNKYYELFKYTDKNEIVDKLTGEVLDRNQFEQHIADLEPWDDFGKEVRKRSKLYNTPSELHNELTGLKNYDEEFRLSTLPIFVSRMPKRSGKGSANDATFRSPKIVAGYIDEKGKPAIARKHRVSLHSVDLKKLYDSPIRETDPKLYKILEQRLKDFNGDPKKAFAESVYKPAKDGKSGNIVRSIKIYNTRDSRSGFLVNKQRAFVNNGKTIRLDVYKRKNYKDIYEYYFAPVYTHLINTQRIEVLPTPTGRSKNEKADFDTIRTEDNKIYATLENGFIKQFSIYPNDYVRIYFDNEIVEGYYVKYNTNDSSLKLIKHSDTSKNDSDLISKVAKTATLIERYDIAVLGDNYRWL

SEQ ID NO: 18156 - protein, 1145 aa, unidentified
  REGION 1..1145: note = Cas Enzyme sequence
MTQKYSYSPKKYSLGLDIGTSSIGWAVLDLDKERIHDLGVRIFERPEDPQNGDSLAKPRRDARSARRRLKRRRQRLNNLKQFFIDQNILTRDRIEEVLSDKSEFNKLDVYALRLKALTEELSPEELLKVMYQIAKRRGFKSNRKVEEESEKEGGRVSKALKTNEKFLAENGYKTVGEALSRDENFASHKRNKRDDYTNSFSRSDFLHELEEIIEVQKRYVLKNVSDTAINEMLYGLDDDKNVVNVSAIMYQRPFMTEELIKKMVGNCTFEEDEKRAPRASYSFEIFRLASDLSHLVFIPRDASKRQAKRENLEIRLSSEQINKVIEAAKNQKSLTYKKVRSIAGISEDYVPKYTHGKKKDGDEFGEGNAFGGLKAYHDIKTALKNLPEDWVKIDNESMINQIAYILTTQKSDEGIKAELNALPISDDAKNAIVKIKATNFGSFCHLSIKALQKITPHILNGMTYDKACEAAGYDFKKQSASLEQITNPVVKRAISQTLKVVRAIEHKYGKPYFIKVETARDLAKNFKERNAIKKENEENQGYNEDIKSIIADGYEASPKTKGGKQLLSHLKELSVPLNKNADFNGQQIIKVKLYREQNGICPYSGKPIDFDTMLQDDNAYQIDHIVPFSRSNNDGITNKVLVLTEENQKKSNKTPFEYFGADENRWKEFVTRVESIYKTRDIKTDDKATNAINYKYNGYAMKKKQNLLLQDYKNDSWNVRALNDTRYITRFVQNYLRQNVDFAEGEEKQRVIAPNGTTTAYLRKRWGLAKDRSEDVLHHAKDAAVVAAIDQKIIMQANLHAKRHEIKELLAAAKTMEEKTDKLTGEIIDEDEFNKAQRRKNAMLVLSSKHFPQPWDGFGKEVMKRTLNVDIKTLQNELRGLDNYDEEFRLSVKPIFVSRMPRRKATGSAHKETIRSPKVKDGDQRTVRVPLKKVKRKDVENSTLKESDKWLYKKLLERLDACDDNPEKAFAEPIYKNDKKTDKNGNKLSPVSTIKVYSTQPSGFYINDDKAFVNNGSMVRLDVYQKPDKKGKIEHFFVPVYAHQVGKNKPAPTKILPAPKGFTDVDETFTKICSLYPNDYVRCYFGNEIKEGYYVKYGINNGAMQVISHSSAGKDKDQLIQISPRSANLIERYDIAVLGDNYRWL

SEQ ID NO: 18157 - protein, 1158 aa, unidentified
  REGION 1..1158: note = Cas Enzyme sequence
MKYWSKALIRSLVGRIIFFMSKVFTLSNILFWLYNCIKLSQKRTIMTQKYSYSLGLDIGTSSIGWAVLDLDKERIHDLGVRIFERPEVPKTGKSLAEPRRIDRSNRHRLRRRRQRLNYLKRFFIDNNLISESRIGDMLSPTHPKKWRPIYDPYALRIKGLNERLSPEELFVALYHIAKRRGYKSNRISVEEQDIEGSQVLSAISENRLLLEKYKTKSVAKVLTLDEKFKNNKRNKINTYKNSFVRKNFEDEVMLLLDSQKKFGLKLPYEKIQTLLYGDIKNGNYNGIFSQRPFMTSELIKKMRGYCEFEPEKPRAPKASYSFELFRLAQNLSHLRIVVDRETRQLSEDEIAKIIEKAKNVKVLKYEHIRDILGYKDDQSFSFAQGMIRGKIKNDDKKNGESNKFDSMIFYHTVKKALEQHPKDWDILATNNFELLDTAGLMLTVNKDDSSLRTELSKLNISTYAVEALLPINVSGFVHLSFDSLHRITPWLLRGLNYSEAVEKAGYSFSQSLSGNKKKLPPLSEKQAAQITNPVVKRAVSQTIKVVNAIIRKYGMPYSVKIETASELAKNAQERNKIKNIQDENAEYNEKIKQKLITEFNIPTPTGLQITKFKLREQQNGVSLYSGKEINLENLFADEHYGEIDHIIPFSRCGNDGLNNKVLVFADENQEKGNLTPYEAWGGDDKKWTQFEARVRATAGLPTAKRDRLLSKSKPVEDWNVRALNDTRYISRFLRQYIRDNLDFPKIEGETGAQRVFSPSGSITSYLRRVWHVGNKNRDDNNLHHAADACIIAATSPSIIQKISSLNKYYELFKYTDKNEIVDKLTGEVLDRNQFEQHIADLEPWNDFGKEVRKRSKPYNTPSELHNELTGLKNYDEEFRLSTLPIFVSRMPKRSGKGSANDATFRSPKIVAGYIDEKGKPAIARKHRVSLHSVDLKKLYDSPIRETDPKLYKILEQRLKDFNGDPKKAFAESVYKPTKDGKRGNIVRSIKIYNTRDSRSGFLVNKQRAFVNNGKTIRLDVYKRKNYKDIYEYYFTPVYTHLINTQRIEVLPTPTGRSKNEKADFDTIRTEGNKIYATLENGFIKQFSIYPNDYVRIYFDNEIVEGYYVKYNTNDSSLKLIKHSDTSKNDSDLISKVAKTATLIERYDIAVLGDNYRWL

SEQ ID NO: 18158 - protein, 1144 aa, unidentified
  REGION 1..1144: note = Cas Enzyme sequence
LDLDKERIHDLGVRIFEKPEHPKSGDSLAKPRRDARSARRRLKRRRQRLNNLKQFFIDQNILTRDRIEEVLSDKSEFNKLDVYSLRSKALTEELSPEELFKVMYQIAKRRGFKSNRKVEEESEKEGGRVSKALKTNEKFLAENGYKTVGEALSRDENFASHKRNKRDDYTNSFSRSDFLHELEKIIEVQKRYALKNVSDTAINEMLYGLDDDKNVVNVSAIMYQRPFMTEELIEKMVGNCTFEENEKRAPRASYSFEIFRLASDLSHLVFIPRDASKRQAKRENLEIRLSSEQINKVIEAAKNQKSLTYKKVRSIAGISEDYVPKYTHGKKKDGDEFGEGNAFGGLKAYHDIKTALKNLPEDWAKIDNESTINQIAYILTTQKSDEGIKAELNALPISDDAKNAIIKIKATNFGSFCHLSIKALQKITPHILNGMTYDKACEAAGYDFKKQSASLEQITNPVVKRAISQTLKVVRAIERKYGKPYFIKVETARDLAKDLEERKKIKKENEENQGYNEDIKSIIADGYEASPKTKGGKQLLSHLKELSVPLNKNADFNGQQIIKVKLYREQNGICPYSGKPIDFDTMLQDDNAYQIDHIVPFSRSNNDGITNKVLVLTEENQKKSNKTPFEYFGADENRWKEFVARVESIYKTRDIKTDDKATNAINYKYNGYAMKKKQNLLLQDYKNDSWNVRALNDTRYITRFIQNYLRQNVDFAGDKGKQHVIAPNGTTTAYLRKRWGLAKDRSEDVLHHAKDAAVVAAISPKIIYQANLFSKEQEMKLYLNNAKTIDKKQQILLQSTDENTGEITDEATFTQTQKDLAQAEYFKLRSDKETKNRFPDPWTDFSKEIRKRSLNTDITTLQNELRGLDNYDEDFRLSVKPIFVSREIRHKIRGEAHESKLRSNRNRNGQNLIRVPLTELTLQRLENSLAKEEFDSQKNKNGSSLYEKLLARLNECNGDAKKAFNPPFKLYKGPKQDKNGNPISPVAAVKVYDKRGVVSVGRKANAPVALAEMVRIRVYKKDDQIYMIPDYRINILENKEPMELLKPFNGVSKIDNSFNFIGYLYKGDLITIQKDDQTFVGYFVQFEGDNRITIKSHLAADSSRNSKSTVKRESLSGINYLKIHKVDVLGDVHFSKGVVWPGAS

SEQ ID NO: 18159 - protein, 1157 aa, unidentified
  REGION 1..1157: note = Cas Enzyme sequence
MTQKYSYSPKKYSLGLDIGTSSIGWAVLDLDKERIHDLGVRIFERPEDPQNGDSLAKPRRDARSARRRLKRRRQRLNNLKQFFIDQNILTRDRIEEVLSDKSEFNKLDVYALRSKALTEELSPEELLKVMHQIAKRRGFKSNRKIEEESEKEGGRVSKALKTNEKFLAENGYKTVGEALSRDENFASHKRNKRDDYTNSFSRGDFLHELEKIIEVQKRYALKNVSDTAINEMLYGLDNDKNVVNISAIMYQRPFMTEELIKKMVGNCTFEENEKRAPRASYSFEIFRLASDLSHLIFIPRDASKRQAKRENLEIRLSSEQINRVIEAAKNQKSLTYKKVRSIAGISEDYVPKYTRGKKKDGDEFGEGNAFGGLKAYYDIKTALKNLPEDWSKIDNESMINQIAYILTTQKSDEGIKAELNALPISDDARNAIVKIKATNFGSFCHLSIKALQKITPHILNGMTYDKACEAAGYDFKKQSASLEQITNPVVKRAISQTLKVVRAIERKYSKPYFIKVETARDLAKNFKERNAIKKENEENQGYNEDIKSIIADGYEASPKTKGGKQLLSHLKELNVPLNKNADFNGQQIIKIKLYREQNGICPYSGKPIDFDTMLQDDNAYQIDHIVPFSRSNNDGITNKVLVLTEENQKKSNKTPFEYFGADENRWKEFVARVESIYKTRDIKTDDKATNAINYKYNGYAMKKKQNLLLQDYKNDSWNVRALNDTRYITRFIQNYLRQNVDFAGDKGKQHVIAPNGTTTAYLRKRWGLAKDRSEDVLHHAKDAAVVAAIDQKIIMQANLHAKRHEIKELLAAAKTMEEKTDKLTGEIIDEDEFSKAQRRKNAMLVLSSKHFPQPWDGFGKEVMKRTLNVDVKTLQNELRGLDNYDEEFRLSVKPIFVSREIRHKIRGEAHESKLRSNRNRNGQNLIRIPLTELTLQRLENSLAKEEFDSQKNKNGSSLYEKLLARLNECNGDAKKAFNPPFKLYKGPKQDKNGNPISPVAAVKVYEKKGVVSVGRKANAPVALAEMVRIRVYKKDNQIYMIPGYRINILENKEPMELLKPLKEVSKIDNSFNFIGYLYKGDLITIQKDSQTFVGYFVQFEGDNRITIKSHLAADSSRNSKSTVKRESLSGINYLKIHKVDVLGDVHFSKGVVWPGAS

SEQ ID NO: 18160 - protein, 1145 aa, unidentified
  REGION 1..1145: note = Cas Enzyme sequence
MTQKYSYSPKKYSLGLDIGTSSIGWAVLDLDKERIHDLGVRIFERPEDPQNGDSLAKPRRDARSARRRLKRRRQRLNNLKQFFIDQNILTRDRIEEVLSDKSEFNKLDVYALRSKALTEELSPEELLKVMYQIAKRRGFKSNRKVEEESEKEGGRVSKALKTNEKFLAENGYKTVGEALSRDENFASHKRNKRDDYTNSFSRSDFLHELEEIIEVQKRYVLKNVSDTAINEMLYGLDDDKNVVNVSAIMYQRPFMTEELIKKMVGNCTFEEDEKRAPRASYSFEIFRLASDLSHLVFIPRDASKRQAKRENLEIRLSSEQINKVIEAAKNQKSLTYKKVRSIAGISEDYVPKYTHGKKKDGDEFGEGNTFGGLKAYYDIKTALKNLPEDWAKIDNESMINQITYILTTQKSDEGIKAELNALPISDDARNAIIKIKATNFGSFCHLSIKALQKITPHILNGMTYDKACEAADYDFKKQSASLEQITNPVVKRAISQTLKIVRAIERKYGKPYFIKVETARDLAKNFKERNAIKKENEENQGYNEDIKSIIADGYEASPKTKGGKQLLSHLKELSVPLNKNADFNGQQIIKVKLYREQNGICPYSGKPIDFDTMLQDDNAYQIDHIVPFSRSNNDGITNKVLVLTEENQKKSNKTPFEYFGADENHWKEFVARVESIYKTRDIKTDDKATNAINYKYNGYAMKKKQNLLLQDYKNDSWNMRALNDTRYITRFIQNYLRQNVDFAEGEEKQRVIAPSGTTTAYLRKRWGLAKDRSEDVLHHAKDAAVVAAIDQKIIMQANLHAKRHEIKELLAAAKTMEEKTDKLTGEIIDEDEFSKAQRRKNAMLVLSSKHFPQPWDGFGKEVMKRTLNVDIKTLQNELRGLDNYDEEFRLSVKPIFVSRMPRRKATGSAHKETIRSPKVKDGDQRAVRMPLKKVKRKDVKNSTLKESDKWLYKKLLERLDAYDDNPEKAFAEPIYKNDKKTDKNGNKLSPVSTIKVYSTQPSGFYINDDRAFVNNGSMVRLDIYQKPDKKGKIEHFFVPVYAHQVGKNKPTPTKILPAPKGFTDVDETFTKVCSLYPNDYVRCYFGDKIKEGYYVKYGSASGQMILLSHASASKDNDTYLTCSARSATLIERYDIAVLGDNYRWL

SEQ ID NO: 18161 - protein, 1145 aa, unidentified
  REGION 1..1145: note = Cas Enzyme sequence
MTQKYSYSPKKYSLGLDIGTSSIGWAVLDLDKERIHDLGVRIFERPEDPQNGDSLAKPRRDARSARRRLKRRRQRLNNLKQFFIDQNILTRDRIEEVLSDKSEFNKLDVYALRSKALTEELSPEELLKVMYQIAKRRGFKSNRKVEEESEKEGGRVSKALKTNEKFLAENEYKTVGEALSRDENFASHKRNKRDDYTNSFSRSDFLHELEKIIEVQKRYALKNVSDTAINEMLYGLDNDKNVVNISAIMYQRPFMTEELIKKMVGNCTFEENEKRAPRASYSFEIFRLASDLSHLVFIPRDASKRQAKRENLEIRLSSEQINKVIEAAKNQKSLTYKKVRSIAGISEDYVPKYTHGKKKDGDEFGEGNAFGGLKAYYDIKTALKNLPEDWAKIDNESTINQIAYILTTQKSDEGIKAELNALPISDDAKNAIVKIKATNFGSFCHLSIKALQKITPHILNGMTYDKACEAAGYDFKKQSASLEQITNPVVKRAISQTLKVVRAIEHKYGKPYFIKVETARDLAKNFKERNAIKKENEENQGYNEDIKSIIADGYEASPKTKGGKQLLSHLKELSVPLNKNADFNGQQIIKVKLYREQNGICPYSGKPIDFDTMLQDDNAYQIDHIVPFSRSNNDGITNKVLVLTEENQKKSNKTPFEYFGADENRWKEFVTRVESIYKTRDIKTDDKATNAINYKYNGYAMKKKQNLLLQDYKNDSWNVRALNDTRYITRFVQNYLRQNVDFAGDEGKQHVIAPTGTTTAYLRKRWGLAKDRSEDVLHHAKDAAVVAAIDQKIIMQANLHAKRHEIKELLAAAKTMEEKTDKLTGEIIDEDEFNKAQRRKNAMLVLSSKHFPQPWDSFGKEVMKRTLNVDIKTLQNELRGLDNYDEEFRLSVKPIFVSRMPRRKATGSAHKETIRSPKVKDGDQRTVRMPLKKVKRKDVENSTLKESDKWLYKKLLERLDACDDNPEKAFAEPIYKNDKKTDKNGNKLSPVSTIKVYSTQPSGFYINDDKAFVNNGSMVRLDVYQKPDKKGKIEHFFVPVYAHQVGKNKPAPTKILPAPKGFTDVDETFTKVCSLYPNDYVRIYLKNEIREGYYIKYNIANGAMQLLPNYAPGKNQDTFVQAYGKNAQAIERYDISILGDNYRWL

SEQ ID NO: 18162 - protein, 1143 aa, unidentified
  REGION 1..1143: note = Cas Enzyme sequence
MTQKYSYSPKKYSLGLDIGTSSIGWAVLDLDKERIHDLGVRIFEKPEDPQNGDSLAKPRRDARSARRRLKRRRQRLNNLKQFFIDQNILTRDRIEEVLSDKSEFNKLDVYALRSKALTEELSPEELLKVMYQIAKRRGFKSNRKVEEESEKEGGRVSKALKTNEKFLAENGYKTVGEALSRDENFASHKRNKRDDYTNSFSRGDFLHELEKIIEVQKRYALKNVSDTAINEMLYGLDDDKNVVNISAIMYQRPFMTEELIKKMVGNCTFEENEKRTPRASYSFEIFRLASDLSHLVFIPRDASKRQAKRENLEIRLSSDQINKVIEAAKNQKSLTYKKVRSIAGISEDYVPKYTHGKKKDGDEFGEGNVFGGLKAYSDIKAALKNLPEDWAKIDNESTINQIAYILTTQKSDEGIKAELNALPISDDAKNAIIKIKATNFGSFCHLSIKALQKITPHILNGMTYDKACEAAGYDFKKQSASLEQITNPVVKRAISQTLKVVRAIERKYGKPYFIKVETARDLAKNFKERNAIKKENEENQGYNEDIKSIIADGYEASPKTKGGKQLLSHLKELNVPLNKNADFNGQQIIKVKLYREQNGICPYSGKPIDFDTMLQDDNAYQIDHIVPFSRSNNDGITNKVLVLTEENQKKSNKTPFEYFGADENRWKEFVARVESIYKTRDIKTDDKATNAINYKYNGYAMKKKQNLLLQDYKNDSWNVRALNDTRYITRFIQNYLHQNVDFAGDKGKQHVIAPNGTTTAYLRKRWGLAKDRSEDVLHHAKDAAVVAAIDQKIIMQANLHAKRHEIKELLAAAKTMEEKTDKLTGEIIDEDEFNKAQRRKNAMLVLSSKYFPQPWDGFGKEVMKRTLNVDIKTLQNELRGLDNYDEEFRLSVKPIFVSRMPRRKATGSAHKETIRSPKVKDGDQRTVRMPLKKVKHKDVENSTLKESDKWLYKKLLERLDACDDNPEKAFAEPIYKNDKKTDKNGNKLSPVSTIKVYSTKPDDSGKYINNQRSFVDNDSMVRVDVYMKNIDGREYPFFVPIYTHSVKHSTRKIRPTLKGLSEIDETFKYICGLYPNDYIKIKFENESKNVEGYYIQYGSSNAAIDLLPMHASGKDQRITCSARLAIKIERYDISILGDNYRWL

SEQ ID NO: 18163 - protein, 1145 aa, unidentified
  REGION 1..1145: note = Cas Enzyme sequence
MTQKYSYSPKKYSLGLDIGTSSIGWAVLDLDKERIHDLGVRIFEKPEDPQNGDSLAKPRRDARSARRRLKRRRQRLNNLKQFFIDQNILTRDRIEEVLSDKSEFNKLDVYALRSKALTEELSPEELLKVMYQIAKRRGFKSNRKVEEESEKEGGRVSKALKTNEKFLAENEYKTVGEALSRDENFASHKRNKRDDYTNSFSRGDFLHELEKIIEVQKRYALKNVSDTAINEMLYGLDDDKNVVNISAIMYQRPFMTKELIEKMVGNCTFEENEKRAPRASYSFEIFRLASDLSHLVFIPRDASKRQAKRENLEIRLSSEQINKVIEAAKNQKSLTYKKVRSIAGISEDYVPKYTHGKKKDGDEFGEGNTFGGLKAYSDIKTALKNLPEDWAKIDNESTINQIAYILTTQKSDEGIKAELNALPISDDAKNAIIKIKATNFGSFCHLSIKALQKITPHILNGMTYDKACEAAGYDFKKQSASLEQITNPVVKRAISQTLKVVRAIEHKYGKPYFIKVETARDLAKNFKERNAIKKENEENQGYNEDIKSIIADGYEASPKTKGGKQLLSHLKELSVPLNKNADFNGQQIIKVKLYREQNGICPYSGKPIDFDTMLLDDNAYQIDHIVPFSRSNNDGITNKVLVLTEENQKKSNKTPFEYFGADENRWKEFVARVESIYKTRDIKTDDKATNAINYKYNGYAMKKKQNLLLQDYKNDSWNVRALNDTRYITRFIQNYLRQNVDFAEGEEKQRVITPSGTTTAYLRKRWGLAKDRSEDVLHHAKDAAVVAAIGQKIIMQANLHAKRHEIKELLAAAKTMEEKTDRLTGEIIDEDEFNKAQRRKNAMLVLSSKHFPQPWDGFGKEVMKRTLNVDIKTLQNELRGLDNYDEEFRLSVKPIFVSRMPRRKATGSAHKETIRSPKVKDGDQRTVRVPLKKVKRKDVENSTLKESDKWLYKKLLERLDACDDNPEKAFAEPIYKNDKKTDKNGNNLSPVSTIKVYSTQPSGFYINDDKAFVNNGSMVRLDVYQKPDKKGKIEHFFVPVYAHQVGKNKPTPTKILPAPKGFTDVDETFTKICSLYPNDYVRCYFGDKIKEGYYVKYGSASGQMILLSHASASKDNDTYLTCSARSATLIERYDISILGDNYRWL

SEQ ID NO: 18164 - protein, 1028 aa, unidentified
  REGION 1..1028: note = Cas Enzyme sequence
MYQIAKRRGFKSNRKVEEESEKEGGRVSKALKTNEKFLAENGYKTVGEALSHDENFASHKRNKRDDYTNSFSRSDFLHELEKIIEVQKRYALKNVSDTAINEMLYGSDNDKNVVNISAIMYQRPFMTEELIEKMVGNCTFEENEKRAPRASYSFEIFRLASDLSHLVFIPRDASKRQAKRENLEIRLSSDQINKVIEAARNQKSLTYKKVRSIAGISEDYVPKYTHGKKKDGDEFGEGNAFGGLKAYYDIKTALKNLPEDWAKIDNESTINQIAYVLTTQKSDEGIKAKLNALPISDDAKNAIIKIKATNFGSFCHLSIKALQKITPHILNGMTYDKACEAAGYDFKKQSASLEQITNPVVKRAISQTLKVVRAIEHKYGKPYFIKVETARDLAKNFKERNAIKKENEENQGYNEDIKSIIADGYEASPKTKGGKQLLSHLKELSVPLNKNADFNGQQIIKVKLYREQNGICPYSGKPIDFDTMLLDDNAYQIDHIVPFSRSNNDGITNKVLVLTEENQKKSNKTPFEYFGADENRWKEFVARVESIYKTRDIKTDDKATNAINYKYNGYAMKKKQNLLLQDYKNDSWNVRALNDTRYITRFIQNYLRQNVDFAGDKGKQHVIAPNGTTTAYLRKRWGLAKDRSEDVLHHAKDAAVVAAIDQKIIMQANLHAKRHEIKELLAAAKTMEEKTDKLTGEIIDEDEFSKAQRRKNAMLVLSSKHFPQPWDGFGKEVMKRTLNVDVKTLQNELRGLDNYDEEFRLSVKPIFVSREIRHKIRGEAHESKLRSNRNRNGQNLIRTPLTELTLQRLENSLAKEEFDSQKNKNGSSLYEKLLARLNECNGDAKKAFNPPFKLYKGPKQDKNGNPISPVAAVKVYEKKGVVSVGRKANAPVALAEMVRIRVYKKDNQIYMIPDYRINILENKEPMELLKPLKEVSKIDNSFNFIGYLYKGDLITIQKDSQTFVGYFVQFEGDNRITIKSHLAADSSRNSKSTVKRESLSGINYLKIHKVDVLGDVHFSKGVVWPGAS

SEQ ID NO: 18165 - protein, 1144 aa, unidentified
  REGION 1..1144: note = Cas Enzyme sequence
MTQNSSYPPKKYSLGLDIGTSSIGWAVLDLDKERIHDLGVRIFERPEDPQNGDSLAKPRRDARSARRRLKRRRQRLNHLKRFFVSQNILTKDRVEKVLNCTSDFNKLDVYDLRAKALTEELSPEELLKVLYQIAKRRGFKSNRKVVEESDKEGGRVTSALKANEKFLADNSYTTVGDALSRDEKFALHKRNKRDDYTNSFARDDFLHELKFIIKTQQNYTLKNVPEQAIKELICGIDDGQVTNVSAIMYQRPFMTKELIEKMVGDCTFEKNEKRAPKASYSFEVFRLASDLSHLVFIPRDAGKRQAKRENLEVRLSPEQISKVIDLAKNQKSLTYKKVRSTAGISEDYIPKDVRGKKKEGDEFGEDNTFGSLKAYSDIRSALKELPEDWAKINNESAINQIAYILTTQKADEGIRAELNTLPLSDKAKEAIVKIKPTNFKAFGHLSIKALQKITPHILEGMTYDKACETAGYDFKKQSASLEQITNPVVKRAITQTLKVVRAIERKYGKPYFIKVETARDLAKNFKDRKAIENENKENQTRNQSIIQTLNENGVVTPTGQQIIKVKLYREQNGVCLYSGKPIDFETMLRDDNAYQVDHIVPFSRSNNDGITNKVLVLTEENQKKGNQTPFEYFGVDEKHWKEFAARVESTYKTRKIEPVDKNLSKKEKAQAKVTNAINYKYNGYAMKKKQNLLLQDYKNDSWNVRALNDTRYITRFIQNYLRQMIDFAEGEEKQRVIAPNGTTTAYLRKRWGLAKDRAEDVLHHAKDAAVVAAINQKIVYQANLFSKEQEMKLYLNNAKTIDEKRQILLQSTDENTGEITDEATFTQAQKDLAQAEYFKLRSNEETKNRFPSPWPDFSKEIMKRTLNTDIATLQNELRGLDNYDEDFRLSVKPIFVSRMPRRKATAQAHKETIRSPKVKDNDQRTVRMPLNKVKRKDVENSVLKESDKWLYDKLLERLDAHGDNPEKAFAEPIYKNDKKIDKNGKKLSPVSTVKVYSTQPSGFYINNGKAFVNNGSMVRLDVYQKPNKKGKIEHFFVPVYAHQVGKNKPTPTKILPAPKGFTDVDETFIKVCSLYPNDYVRIYLKNKILEGYYSGYDISVGTVIIYPHFTPSKDIKVANRVSARSATLIERYDIAILGDNYRWL

SEQ ID NO: 18166 - protein, 1155 aa, unidentified
  REGION 1..1155: note = Cas Enzyme sequence
MAQKSSYLPKKYSLGLDIGTSSIGWAVLDLDKERIHDLGVRIFERPEDPQNGDSLAKPRRDARSARRRLKRRRQRLNHLKQFFIDQNILTKYRVEEVLDYKSDFNKLDVYDLRAKALTEELSPEELLKVLYQITKRRGFKSNRKVVEESDKEGGRVTSALKTNEKFLADNNYTTVGEALSRDEKFALHKRNKRDDYTNSFARDDFLRELEAIIKTQQNYILKNVPEPAINELIYGIDDGQVTNVSAIMYQRPFMTKELIEKMVGKCTFEDGEKRAPKASYSFEVFRLASDLSHLVFIPRDASKRQAKRENLEVGLSPEQIKQVIELAKSQKSLTYKKVRSTAGISEDYVPKDVRGKKKDGDEFGEENVFGGLKAYNDIRLALKDLLEDWVKIDNESAINQIAYILTTQKADEGIRDELNLLPISDKAKEAIVKIKPTNFKAFGHLSIKALQKITPHILEGMTYDKACEAAGYDFKKQSASLEQITNPVVKRAITQTLKVVRAIERKYGKPYFIKVETARDLAKNFKDRNAIKKENEENQGYNEDIKSIITDGYEASPKTKGGKQLLSHLKEFNVRLNKNADFNGQQIIKVKLYREQNCVCLYSGKPIDFETMLHDDNAYQVDHIIPFSRSNNDGMTNKVLVLTEENQKKGNQTPFEYFGADEKLWKEYVARVGSTYQTREVKKGDKDAGINYKYNGYAMKKKQNLLLQDYKNDSWNVRALNDTRYITRFIQNYLRQNVDFAEGEEKQRVIAPNGTTTAYLRKRWGLAKDRAEDVLHHAKDAAVVAAIDQKIVMQANLYAKHHEIKALLAATKTMEEKTDKLTGEITDEDEFDKAQRRKAAILVLSSKHFPQPWDNFGKEVMKRTLNTDIATLQNELRGLDNYDEDFRLSVKPIFVSREIRHKIRGEAHESKLRSNRNRNGQNIIRIPLTELTLQRLENSLVKEEFDSQKNSNGSSLYEKLLARLNECNGDSKKAFNPPFKLYKGPKQDKNGNPISPVAAVKVYDKKGVVSVGRKANAPVALAEMVRIRVYKKDNQIYMIPDYRINILENKETMELLKPLKKVLKIDNSFNFIGYLYKGDLITIQKDSQTFVGYFVQFEGDNRITIKNHLAVDSSRDSKSTVKRESLSGINYLKIHKVDVLGDVNFSEGIVWPGAS

SEQ ID NO: 18167 - protein, 1132 aa, unidentified
  REGION 1..1132: note = Cas Enzyme sequence
MTEKSSYSPKKYSLGLDIGTSSIGWAVLDLDKERIHDLGVRIFERPEDPQNGDSLAKPRRDARSARRRLKRRRQRLNHLKQFFIDRNILTKDQVEEVLDCKSDFNKLDVYKLRAKALAEELSPEELLKVLYQIAKRRGFKSNRKVVEESDKEGGRVTSALKANEKFLAGNNYTTVGDALSRDEKFALHKRNKRDDYTNSFARDDFLRELEAIIKTQRNYTLRNIPEQAINELIYGIDDGQATNVSAIMYQRPFMTKELIEKMVGDCTFEKDEKRAPKASYSFEMFRLASDLSHLVFIHRDASKRQAKRENLEVRLSSEQISKVIDLAKNQKSLTYKKVRSTAGISEDYVPKDVRGKKKEGDEFGEDNTFGGLKAYNDIRSALKDLPEDWAKIDNESAINQIAYILTTQKADEGIRAELDSLPLSDKAKEAIIKIKPTNFKAFGHLSIKALQKITPHILEGMTYDKACEAAGYDFKKQSASLEQITNPVVKRAITQTLKVVRAIERKYGKPYFIKVETARDLAKNFKDRKAIENENKENQTRNQSIIQTLNENGIVTPTGQQIIKVKLYREQNGVCLYSGKPIDFETMLRDDNAYQVDHIVPFSRSNNDGITNKVLVLTEENQKKGNQTPFEYFGVDEKRWKEYVARVESTYQTREVKKGDKDAGANYKYNGYAMKKKQNLLLQDYKNDSWNVRALNDTRYITRFIQNYLRQNVDFAEGEEKQRVIAPNGTTTAYLRKRWGLAKDRAEDVLHHAKDAAVVAAIDPKIVYQANLFSKEQEMKLYLNNAKTIDEKRQILLQSTDENTGEITDEVAFTRAQKELAQAEYFKLRSDEETKNRFPSPWPDFSKEIMKRTLNTDITTLQNELCGLDNYDEEFRLSVKPIFVSRMPRRKAVAQAHKETVRSPKVKDNDKRTVRMPLNKVKRKDIENSVLKESDKWLYDKLLERLDAHDNNPEKAFAEPVYKNDKKFDKNGKQLSPVSTIKVYSTQPSGFYINNGKAFVNNGSMVRLDVYQKPNKKGKIEHFFVPVYAHQVGKNKPTPTKILPAPKGFTDIDETFTKVCSLYPNDYVRIYLKNKILEGYYSGYDISVGTVILYPHFTPSKDIKVANRVSARSATLIERYDIAILGDNYRWL

SEQ ID NO: 18168 - protein, 1118 aa, unidentified
  REGION 1..1118: note = Cas Enzyme sequence
MTQKSSYSPKKYSLGLDIGTSSVGWAVLDLDKERIHDLGVRIFERPEVPKTGKSLAEPRRAARSTRHRLRRRRQRLNYLKRFFIDNNLISESRISDILSPTHPKKWRPAYDPYDLRIKGLEEKLSLEELFVALYHIAKRRGYKSNRISVEKQDIEGSQVLSAISENKLLLEKYKTKSVAEVLTLDEKFKNNKRNKTSTYKNSFVRKNFEDEAALLLESQKKIGLKLPYEKIQTLLYGDVKNGNYNGIFSQRPFMTEELIEEMRGYCEFEPEKHRAPKASYSFELFRLAQNLSHLRIVVDKETRQLSEDEIAKIIEKAKNVKELKYEHIRDILGYKGDQSFSFAQGMIRGKIKKDDKKNGEGNKFDSMIFYHTVKKAFEQHPKDWDILAANNFELLDNAGLILTVNKDDSSLRAKLSKLDISTDAIEALLPINVSGFAHLSFNSLHKITPWLLRGLNYSEAVEKAGYSFSQSLSGDKKRLPPLSEKQAAQITNPVVKRAVSQTIKVVNAIIRKYGIPYSVKIEAASELAKNAQERDKIKKIQDENAAYNEKIKQKLINEFNIPTPTGLQITKFKLREQQNGVSIYSGKEIRLENLFADEHYGEIDHIIPFSRCGNDGLNNKVLVFADENQEKGNLTPYETWGGDNQKWIQFEARVRATAGLPAAKRDRLLSKSKPVEDWNVRALNDTRYISRFLRQYIRDNLDFPKIEGKAGTQRVFSPSGPITSYLRRVWRVGNKHRDDNNLHHAADACIIAATDPGIIQKVSSLNKYYELFRYSNKNEVIDKLTGEVLNCNQLEQHIADLEPWHDFGKEVRKRSRLYNTPSELHGELTGLKNYDEEFRLSTLPIFVSRMPKRSGKGSTNSETFRSPKIVEGYLDEKGKPAIARKQRVPLHSVDLKKLYDSPIRETDPKLYKILEQRLKDFNGDPAKAFVESVYKPTKDSKRGNIVRSIKIYNTRDSRSGFLVNEQRAFVNNGRTIRLDVYKRKNYKDIYEYYFAPVYTHLINAQKIEVLPTPTGRSKNEKVDFDTIRTEDDKIYATLENGFIKQFSIYPNDYVRIYFDNEIVEGYYVKYNTNDGSLKLIKHSETSKNDNDLISKAAKTANLIERYDISILGDNYRWL

SEQ ID NO: 18169 - protein, 1158 aa, unidentified
  REGION 1..1158: note = Cas Enzyme sequence
MAQKSSYSPKKYSLGLDIGTSSVGWAVLDLDKERIHDLGVRIFERPEDPQNGDSLAKPRRDARSARRRLKRRRQRLNHLKQFFVDQNILTKNQVEEVLDYRSDFNKLDVYALRAKALTEELSPEELIKVLYQIAKRRGFKSNRKVVEESDKEGGRVTSALKTNEKFLADNNYTTVGEALSRDEKFALHKRNKRDDYTNSFARDDFLCELEAIIKTQRNYALKNVPEPAINELIYGIDDGQVTNVSAIMYQRPFMTKELIEKMVGKCTFEDGEKRAPKASYSFEVFRLASDLSHLVFIPRDASKRQAKRENLEVRLSPEQISKVIELAKSQKNLTYKKVRSTAGISEDYVPKDVRGKKKDGDEFGEENAFGGLKAYNDTRSALKDLPEDWAKIDNESAINQIAYILTTQKADEGIRDELNLLPISNKAKEAIVKIKPTNFKTFGHLSIKALQKITPHILEGMTYDKACEAAGYDFKKQSASLEQITNPVVKRAITQTLKVVRAIERKYGKPYFIKVETARDLAKNFKDRNAIKKENEENQGYNEDVKSIITDGYEASPKTKGGKQLLNHLKELNVRLNKNADFNGQQIIKVKLYREQHGKCLYSGNPIDFETMLRDDNAYQVDHIVPFSRSNNDGITNKVLVFTEENQKKADRTPFEYFGTDEQRWEKFVALVETTYKTRDVKTSDKATNAINYKYNGYAMKKKQNLLLQDYKNDSWNVRALNDTRYITRFIQNYLRQNVDFAEGEEKQRIIAPNGTTTAYLRKRWGLAKDRTEDVLHHAKDAAVVAAIDQKIVYQANLFSKEQEMRLYLDNAKTIDEKRQILLRSTDENTGEITNETTFTQAQKDLAQAEYFKLRSDTETKNRFPAPWPDFSKEVMKRTLNTDIATLQNELRGLDKYDEEFRLSIKPIFVSRMPRRKATAQAHKETVRSPKVKDGDQRTVRMPLNKIKRKDVENSVLKESDKWLYDKLLEKLDTHGDNPEKAFAEPIYKNDKKFDKNGNQLSPVSTIKVYSTQPSGFYINKGKAFVNNGSMVRLDVYQKPNKKGKIEHFFVPVYAHQVGKNKPTPTKILPAPKGFTDIDETFVKVCSLYPNDYIRIYLKNEIREGYYVKYNVANGAMQLLPNYAPGKNQNTFVQVYGKNAQAIERYDISILGDNYRWL

SEQ ID NO: 18170 - protein, 1040 aa, unidentified
  REGION 1..1040: note = Cas Enzyme sequence
KQFFVDQNILTKDQVEEVLDYRSDFNKLDVYELRSKALAEELSPEELLKVLYQIAKRRGFKSNRKVVEESDKEGGRVTSALKANEKFLADNNYTTVGDALSRDEKFALHKRNKRDDYTNSFARDDFLRELEAIIKTQRSYALKNIPKQAINELIYGIDDGQVTNVSAIMYQRPFMTKELIEKMVGDCTFEKDEKRAPKASYSFEVFRLASDLSHLVFIPRDASKRQAKRENLEIRLSSEQISKVIDVAKSQKSLTYKKVRSTAGISEDYVPKDVRGKKKEGDEFGEDNTFGGLKAYSDIRLALKDLPEDWAKIDNESLINQIAYILTTQKADEGIRAELDSLPLSDKAKEAIVKIKPTNFKAFGHLSIKALQKITPHILEGITYDKACEAAGYDFKKQSASLEQITNPVVKRAITQTLKIVRAIERKYGKPYFIKVETARDLAKSFKDRKAIENENKENQARNQSIIQTLNENDIVTPTGQQIIKVKLYREQNGVCLYSGKSIDFETMLCDDNAYQVDHIVPFSRSNNDGITNKTLVLTEENQKKGSQTPFEYFGADEKRWKEFAARVESIYKTRDIKTADKATNTINYKYNGYAMKKKQNLLLQEYKNDSWNVRALNDTRYITRFIQNYLRQNVDFAEGEEKQRVIAPNGTTTAYLRKRWGLAKDRAEDVLHHAKDAAIVAAINQSIVRQANLFAKRGEIAALLAAAKTMEEKTDKLTGEIVDEDEFDKAQRRKDAAIVLSSKYFPQPWDNFGKEVMKRTLNTDIATLQNELRGLDNYDEGFRLDVKPIFVSRMPRRKATAQAHKETIRSPKVKDNDQRTVRMPLNKVKRKDVENSVLKESDKWLYDKLLERLNAHDNNPEKAFAEPVYKNDKKFDKNGKQLSPVSNIKVYSTQPSGFYINNGKAFVNNGSMIRLDVYQKPNKKGKIEHFFVPVYAHQVGKNKPTPTKILPAPKGFTDVDETFTKVCSLYPNDYVRCYFGNEIKEGYYVKYGINNGAMQVIAHSTASKDKNHLIQISPRSANLIERYDISVLGDNYRWL

SEQ ID NO: 18171 - protein, 1119 aa, unidentified
  REGION 1..1119: note = Cas Enzyme sequence
MTEKSSYSPKKYSLGLDIGTSSIGWAVLDLDKERIHDLGVRIFERPEDPQNGDSLAKPRRDARSARRRLKRRRQRLNHLKQFFIDQNILTKDQVEEVLDYRSDFNKLDVYELRAKALTEELSPEELLKVLYQIAKRRGFKSNRKVIEESDKEGGRVTSALKANEKFLADNNYTTVGDALSRDEKFAPHKRNKRDDYTNSFARDDFLRELEFIIKNQRKYALKNIPEQAINELIYGIDDGQATNVSAIMYQRPFMTRELIEKMVGNCTFEKDEKRAPKASYSFEVFRLASDLSHLVFIPRDTSKRQAKRENLEIRLSPEQISKVIDLTKNQKSLTYKKVRSTAGISEDYVPKDVRGKKKEGDEFGEDNTFGGLKAYSDIRLALKDLPEDWAKIDNESAINQIAYVLTTQKADEGIRAELDSLPLSDKAKEAIIKIKPTNFKAFGHLSIKALQNITPYILEGMTYDKACEAAGYDFKKQSASLEQITNPVVKRAITQTLKVVRAIERKYGKPYFIKVETARDLAKNFKDRKAIENENKENQARNQSIIQTLNENGVVTPTGQQIIKVKLYREQNGVCLYSGKSIDFETMLRDDNAYQVDHIVPFSRSNNDGMTNKVLVLTEENQKKSNQTPFEYFGADEKRWKEFAARVESTYKTRDIKTADKATNAINYKYNGYAMKKKQNLLLQDYKNDSWNVRALNDTRYITRFIQNYLRQMVDFVEGEEKQRVIAPNGTTTAYLRKRWGLAKDRAEDVLHHAKDAAVVAAIDQSIVRQANLFAKRGEIAALLSAVKTMEEKTDKLTGEIIDEDEFDKAQRRKDAAIVLSSKYFPQPWDNFGKEVMKRTLNTDIATLQNELRGLDNYDEDFRLSVKPIFVSRMPRRKATAQAHKETIRSSKVKDNDQRTVRMPLNKVKRKDVENSVLKESDKWLYDKLLERLNAHDNNPEKAFAEPVYKNDKKFDKNGKQLSPVSNIKVYSTQPSGFYINKGKAFVNNGSMVRLDVYQKPNKKGKIEHFFVPVYAHQVGKNKPTPTKILPAPKGFTDVDETFTKVCSLYPNDYVRCHFGNKIREGYYVSFNINNGAMQVMPHDAANKSNDSLIQISPRSANLIERYDIAILGDNYRWL

SEQ ID NO: 18172 - protein, 1143 aa, unidentified
  REGION 1..1143: note = Cas Enzyme sequence
MAQKYSYSPKKYSLGLDIGTSSVGWAVLDLDKERIHDLGVRIFERPEDPQNGDSLAKPRRDARSARRRLKRRRQRLNHLKQFFIDQNILTKDRVEEVLDYKSDFNKLDIYALRSKALTEELSPEELLKVLYQIAKRRGFKSNRKVVEESDKEGGRVTSALKTNEKFLADNNYTTVGEALSRDEKFALHKRNKRDDYTNSFARDDFLCELEAIIKTQRNYALKNVPEPAINELIYGIDDGQVTNVSAIMYQRPFMTKELIEKMVGKCTFEDGEKRAPKASYSFEIFRLASDLSHLVFIPRDASKRQAKRENLEIRLSPEQIKQVIDLAKSQKSLTYKKVRSTAGISEDYVPKDVRGKKKDGDEFGEENVFGGLKAYNDIRFALKDLPEDWAKIDNESAINQIAYTLTTQKADEGIRTELDTLPLSDKAKEAIIKIKPTNFKAFGHLSIKALQKITPHILDGMTYDKACEAAGYDFKKQSASLEQITNPVVKRAIAQTLKVVRAIERKYGKPYFIKVETARDLAKNFKDRNAIKKENEENQGYNEDIKSIITDGYEASPKTKGGKQLLSHLKEFNVRLNKNADFNGQQIIKVKLYREQNCVCLYSGKPIDFETMLHDDNAYQVDHIIPFSRSNNDGMTNKVLVLTEENQKKGNQTPFEYFGADEKLWKEYVARVGSTYQTREVKKGDKDAGINYKYNGYAMKKKQNLLLQDYKNDSWNVRALNDTRYITRFIQNYLRQNVDFAEGEEKQRVIAPNGTTTAYLRKRWGLAKDRAEDVLHHAKDAAVVAAIDQKIVMQANLYAKHHEIKALLAATKTMEEKTDKLTGEITDEDEFDKAQRRKAAILVLSSKHFPQPWDNFGKEVMKRTLNTDITTLQNELRGLDNYDEDFRLNVKPIFVSRMPRRKATAKAHKETIRSPKVKDSDQRTVRTPLNKIKRKDVENSVLKESDKWLYNKLLERLDTHDNNPEKAFAEPIYKNDKKFDKNGKKLSPVSTIKVYSTQPSGFYINDGKAFVNNGSMVRLDVYQKPNKKGKIEHFFVPVYAHQVGKNRPTPTKILPTPKGFTDVDETFTKVCSLYPNDYVRCYFGNKIKEGYYVKYGINNGAIQVIAHGTTSKDKDHLIQISPRSANLIERYDISVLGDNYRWL

SEQ ID NO: 18173 - protein, 1110 aa, unidentified
  REGION 1..1110: note = Cas Enzyme sequence
PQNGDSLAKPRRDARSARRRLKRRRQRLNHLKQFFIDQNILTKDQVEEVLDYKSDFNKLDVYELRARALTEELSPEELLKVLYQIAKRRGFKSNRKVVEESNKEGGRVTSALKVNEKFLADNNYTTVGDALSRDEKFAPHKRNKRDDYTNSFARDDFLRELEAIIKTQQNYTLKNVPERTINELIYGINDEQVINVSAIMYQRPFMTKELIEKMVGDCTFEKNEKRAPKASYSFEVFRLASDLSHLVFIPRDTSKRQAKRENLEIRLSSEQIGKVIDVAKNQKSLTYKKVCSTAGISEDYVPKDVRGKKKEGDEFGEDNTFGGLKAYSDIRLALKDLPEDWAKIDNESAINQIAYILTTQKADEGIRAELDSLPLSDKAKEAIIKIKPTNFKSFGHLSIKALQKITPHILEGMTYDKACEAAGYDFKKQSASLEQITNPVVKRAITQTLKVVRAIERKYGKPYFIKVETARDLAKNFKDRNAIKKENEENQGYNEDIKSIITDGYEASPKTKGGKQLLNHLKELNVRLNKNADFNGQQIIKVKLYREQNGVCLYSGKSIDFETMLRDDNAYQVDHIVPFSRSNNDGITNKVLVLTEENQKKANRTPFEYFGADEQRWEKFVALVETTYKTRDVKTSDKATNAINYKYNGYAMKKKQNLLLQDYKNDSWNVRALNDTRYITRFIQNYLRQNVDFAEGEEKQRVIAPNGTTTAYLRKRWGLAKDRAEDVLHHAKDAAVVAAINQKIVYQANLFSKEQEMKLYLNNAKTIDEKRQVLLQSTDENTGEITDEATFTQAQKDLAQVEYFKLRSDEETKKRFPDPWTGFSKEVMKRTLNTDIATLQNELRGLDNYDEDFRLNVKPIFVSRMPRRKATAQAHKETIRSPKVKDGDQRTVRMPLNKIKRKDVENSVLKESDKWLYDKLLERLDAHGDNPEKAFAEPIYKNDKKFDKNGKQLSPVSTVKVYSTQPSGFYINNGKAFVNNGSMVRLDVYQKPNKKGKIEHFFVPVYAHQVGKNKPAPTKIRPAPKGFTDVDETFNKVCSLYPNDYVRIYLKNKILEGYYSGYDISVGTVILYPHFTPSKDIKVANRVSARSATLIERYDIAILGDNYRWL

SEQ ID NO: 18174 - protein, 1166 aa, unidentified
  REGION 1..1166: note = Cas Enzyme sequence
MAQKSSYSPKRYSLGLDIGTSSVGWAVLDLDKERIHDLGVRVFSGQIENKRRRQFSSAQRINKRKKQRLKHLKAVFINNGLLSSDEINLALKDQRVTENIYSLRAKAATQQISHRELFRVLYLIAKKRGFKSNRKSDPNDSDSSDTKFKKQLAKNSAIVEKYQTIGLMLENDPIYANQKHNSKDNYIATFQREDIRKEVEIILNKQFEKELNAPQTSDKYRNIIEVILDETTVDDNGEKQYLGMFTQRPYTNTSLIEKMTGFCEFEKTERRYVKASYTTEEYIFLSNLSNIVILDTNNDERYYIDKDGIGQLLALAKQEKNIKCSDIRKVLSLDKSICFSSRAIEDTYRDSIKYANKKYSAPQNKEKLAEELETARKIRDRSRKSIERQKICEKGLETFCIFKKLFKDSMLGQRIEENPYLLDDIAYILTVNIDDESIKTNLQQLEFLSDHDISVIMNMPTDDLRHFSGRSNLSRLAMQNIIKYLKEGYQSHLAIQKAGYDTKEIYQGNNITLPALKLSDFSQDGDETFEKYGINSKVAQRALSQSIKLINAIIKKYGSPTYVRVELAREFAKTEEEREKIERNNKRNREKNRKYEEIINQIFKDNHKLPPSKIGHIIRKLTLRDQQDCKDIYSGDDIDITTLVLDESAYEIDHIIPRSKRFINDMNNLVLTSTKNNREKSNQLPLAYISDPTKQKEFLERVNLIKDKQKRKNLRLDSCEDQDNMTERALNDTKHIARFFKNYIQRNLLFAGDDEENGRQRVFTIPGPVTAYLRARWGFDQKDRDANALHHAIDACVIVATTPKLLNRVMYHESHREQGKLYSERQAAKQDTGDFGMQAYLQAKKMYYDSLDRVSGEIIDPYKHNVAYKIMQEHEKRYRYSFPRPWTDFMREVSLRAGDIDKKTLQNKLVEINNYDDEFRRILHPIFISHMRYGKTRGSGHGEQIYKKPYKDDSRIIQHKSIYEISPDDIESSPIATSDRKLYELLKDTFSKIELKGNQSEKNKRIDKNTVIYKPSKNPDRSPVVKRIPVYVDKTPIPHDVRGGAVLNEKGTVAYSILCQNSTTGHYKVVPVYFRQIHANKKTELGEGWKYISRIVPNDFVVIIKKDGSKISGYYKTRKNDIRISILPHKYSDSNKSIFPSISTAKEIRVYNISILGDNTPDEEYR

SEQ ID NO: 18175 - protein, 1118 aa, unidentified
  REGION 1..1118: note = Cas Enzyme sequence
MAQKSSYSPKKYSLGLDIGTSSIGWAVLDLDKERIHDLGVRIFERPEVPKTGKSLAEPRRIARSARHRLRRRRQRLNYFKRFFIDNSLIPESRISDMLSPTHPKKWRPAYDPYDLRIKGLRKKLSLEELFVALYHIAKRRGYKSNRISVEKQDVEGSQVLSAISENKLLLEKYKTKSVAKVLTLDEKFKNNKRNKTSTYKNSFVRKNFEDEVILLLESQKKFGLKLPYEKMQTLLYGDVKNGNYNGIFSQRPFMTKELIEKMRGNCEFEPEKPRAPKASYSFELFRLAQNLSHLRIVVDQETRQLSEDEIAKIIEKAKNVKVLKYEHIRDILGYKGDQSFSFAQGMIRGKIKNDDKKNGEGNKFDSMIFYHTVKKNLEQYPKDWNILAADNFELLDNAGLILTVNKDDSSLRAELSKLDISTDAIEALLPINVSGFVHLSFNSLHRITPWLLRGLNYSEAVEKAGYSFFQSLSGNKKKLPPLSKKQANQITNPVVKRAVSQTIKVVNAVIGKYGLPCSVKVEAASELAKNAQERDKIKKIQDENAEYNEKIKQKLINEFNIPTPTGLQITKFKLREQQNGVSLYSGTEINLENLFTDEHYGEIDHIIPFSRCGNDGLNNKVLVFTDENQEKGNLTPYEAWGGDDKKWTQFEARVRATAGLPAAKRDRLLSKSKPVEDWNVRALNDTRYISRFLRQYIRDNLDFPKIEGKTGAQRVFSPSGPITSYLRRVWRVGNKNRDDNNLHHAADACIIAATDPGIIQKVSSLNKYYELFRYSDKNEVIDKLTGEVLNRNQFEQHIADLEPWHDFGKEVRKRSKLYDTPSELHNELTGLKNYDEEFRLSTLPIFVSRMPKRSGKGSTNSETFRSPKIVEGYLDEKGKPAIARKQRVPLHSVDLKKLYDSPIRETDPKLYKILEQRLKDFNGDPAKAFVESVYKPTKDSKRGNIVRSIKIYNTRDSRSGFLVNEQRAFVNNGKTVRLDVYKRKNYKDIYEYYFAPVYTHLINAQKIEVLPTPTGRSKNEKADFDTIRTEDDKIYATLENGFIKQFSIYPNDYVRIYFGNEIVEGYYVKYNTNDGSLKLIKHSETSKNDNNLISKSAKTATLIERYDISALGDNYRWL

SEQ ID NO: 18176 - protein, 1185 aa, unidentified
  REGION 1..1185: note = Cas Enzyme sequence
MLVLLKLSITVIWLYNHTQLSTKGISRMAQKSSYSPKKYSLGLDIGTSSVGWAVLDLDKERIHDLGVRIFERPEDPQNGDSLAKPRRDARSARRRLKRRRQRLNHLKQFFVDQNILTKNQVEEVLDYRSDFNKLDVYALRAKALTEELSPEELIKVLYQIAKRRGFKSNRKVVEESDKEGGRVTSALKTNEKFLADNNYTTVGEALSRDEKFALHKRNKRDDYTNSFARDDFLCELEAIIKTQRNYALKNVPEPAINELIYGIDDGQVTNVSAIMYQRPFMTKELIEKMVGKCTFEDGEKRAPKASYSFEVFRLASDLSHLVFIPRDASKRQAKRENLEVRLSPEQISKVIELAKSQKNLTYKKVRSTAGISEDYVPKDVRGKKKDGDEFGEENAFGGLKAYNDTRSALKDLPEDWAKIDNESAINQIAYILTTQKADEGIRDELNLLPISNKAKEAIVKIKPTNFKTFGHLSIKALQKITPHILEGMTYDKACEAAGYDFKKQSASLEQITNPVVKRAITQTLKVVRAIERKYGKPYFIKVETARDLAKNFKDRNAIKKENEENQGYNEDVKSIITDGYEASPKTKGGKQLLNHLKELNVRLNKNADFNGQQIIKVKLYREQHGKCLYSGNPIDFETMLRDDNAYQVDHIVPFSRSNNDGITNKVLVFTEENQKKADRTPFEYFGTDEQRWEKFVALVETTYKTRDVKTSDKATNAINYKYNGYAMKKKQNLLLQDYKNDSWNVRALNDTRYITRFIQNYLRQNVDFAEGEEKQRIIAPNGTTTAYLRKRWGLAKDRTEDVLHHAKDAAVVAAIDQKIVYQANLFSKEQEMRLYLDNAKTIDEKRQILLRSTDENTGEITNETTFTQAQKDLAQAEYFKLRSDTETKNRFPAPWPDFSKEVMKRTLNTDIATLQNELRGLDKYDEEFRLSIKPIFVSRMPRRKATAQAHKETVRSPKVKDGDQRTVRMPLNKIKRKDVENSVLKESDKWLYDKLLEKLDTHGDNPEKAFAEPIYKNDKKFDKNGNQLSPVSTIKVYSTQPSGFYINKGKAFVNNGSMVRLDVYQKPNKKGKIEHFFVPVYAHQVGKNKPTPTKILPAPKGFTDIDETFVKVCSLYPNDYIRIYLKNEIREGYYVKYNVANGAMQLLPNYAPGKNQNTFVQVYGKNAQAIERYDISILGDNYRWL

SEQ ID NO: 18177 - protein, 1190 aa, unidentified
  REGION 1..1190: note = Cas Enzyme sequence
VNLKQSSNPLTRWADYLLSMLILLTLLITVIWLYNHTQLSTKGILHMAQKYSYSPKKYSLGLDIGTSSVGWAVLDLDKERIHDLGVRIFERPEDPQNGDSLAKPRRDARSARRRLKRRRQRLNHLKQFFIDQNILTKDQVEEVLNYKSDFNKLDIYALRSKALTEELSPEELLKVLYQIAKRRGFKSNRKVVEESDKEGGRVTSALKANEKFLADNNYTTVGDALSRDEKFALHKRNKRDDYTNSFARDDFLCELEAIIKTQRNYALKNVPEPAINELIYGIDDGQVTNVSAIMYQRPFMTKELIEKMVGKCTFEDGEKRAPKASYSFEIFRLASDLSHLVFIPRDASKRQAKRENLEIRLSPEQIKQVIDLAKSQKSLTYKKVRSTAGISEDYVPKDVRGKKKDGDEFGEENVFGGLKAYNDIRLALKDLPEDWAKIDNESALNQIAYILTTQKADEGIRAELDTLPLSDKAKEAIVKIKPTNFKAFGHLSVKALQKITPHILEGMTYDKACEAAGYDFKKQSASLEQITNPVVKRAITQTLKVVRAIERKYGKPYFIKVETARDLAKNFKDRNAIKKENDENQGYNEDIKSIITDGYEASPKTKGGKQLLSHLKELNVPLNKNADFNGQQIVKIKLYREQNGVCLYSGKSIDFETMLRDDNAYQVDHIVPFSRSNNDGITNKVLVLTEENQKKVDRTPFEYFGADEQRWEKFVALVETTYKTRDVKTSDKATNAINYKYNGYAMKKKQNILLQDYKNDSWNVRALNDTRYITRFIQNYLRQNVDFAEGEEKQRVIAPNGTTTAYLRKRWGLAKDRAEDVLHHAKDAAVVAAIDQKIVMQANLYAKRHEIKALLAATKTMEEKTDKLTGEITDEDEFDKAQQRKAAILVLSSKHFPQPWDNFGKEVMKRTLNTDIATLQNELRGLENYDDEFCLSVKPIFVSRMPRRKATAQAHKETIRSPKVKDNDQRTVRMPLNKVKSRDVENSVLKESDKWLYNKLLERLDTHDNNPEKAFAEPIYKNDKKFDKNGKKLSPVSTIKVYSTQPSGFYINDGKAFVNNGSMVRLDVYQKPNKKGKIEHFFVPVYAHQIGKNKPAPTKILPAPKGFTDVDETFIKICSLYPNDYVRIYLKNKILEGYYSGYDISVGTMILYPHFTPSKDIKVANRVSARSATLIERYDIAILGDNYRWL

SEQ ID NO: 18178 - protein, 1185 aa, unidentified
  REGION 1..1185: note = Cas Enzyme sequence
MLVLLKLSITVIWLYNHTQLSTKGISRMAQKSSYSPKKYSLGLDIGTSSVGWAVLDLDKERIHDLGVRIFERPEDPQNGDSLAKPRRDARSARRRLKRRRQRLNHLKQFFVDQNILTKNQVEEVLDYRSDFNKLDVYALRAKALTEELSPEELIKVLYQIAKRRGFKSNRKVVEESDKEGGRVTSALKTNEKFLADNNYTTVGEALSRDEKFALHKRNKRDDYTNSFARDDFLCELEAIIKTQRNYALKNVPEPAINELIYGIDDGQVTNVSAIMYQRPFMTKELIEKMVGKCTFEDGEKRAPKASYSFEVFRLASDLSHLVFIPRDASKRQAKRENLEVRLSPEQISKVIELAKSQKNLTYKKVRSTAGISEDYVPKDVRGKKKDGDEFGEENAFGGLKAYNDIRSALKDLPEDWAKIDNESAINQIAYILTTQKADEGIRDELNLLPISNKAKEAIVKIKPTNFKTFGHLSIKALQKITPHILEGMTYDKACEAAGYDFKKQSASLEQITNPVVKRAITQTLKVVRAIERKYGKPYFIKVETARDLAKNFKDRNAIKKENEENQGYNEDVKSIITDGYEASPKTKGGKQLLNHLKELNVRLNKNADFNGQQIIKVKLYREQHGKCLYSGNPIDFETMLRDDNAYQVDHIVPFSRSNNDGITNKVLVFTEENQKKADRTPFEYFGTDEQRWEKFVALVETTYKTRDVKTSDKATNAINYKYNGYAMKKKQNLLLQDYKNDSWNVRALNDTRYITRFIQNYLRQNVDFAEGEEKQRIIAPNGTTTAYLRKRWGLAKDRTEDVLHHAKDAAVVAAIDQKIVYQANLFSKEQEMRLYLDNAKTIDEKRQILLRSTDENTGEITNETTFTQAQKDLAQAEYFKLRSDTETKNRFPAPWPDFSKEVMKRTLNTDIATLQNELRGLDKYDEEFRLSIKPIFVSRMPRRKATAQAHKETVRSPKVKDGDQRTVRMPLNKIKRKDVENSVLKESDKWLYDKLLEKLDTHGDNPEKAFAEPIYKNDKKFDKNGNQLSPVSTIKVYSTQPSGFYINKGKAFVNNGSMVRLDVYQKPNKKGKIEHFFVPVYAHQVGKNKPTPTKILPAPKGFTDIDETFVKVCSLYPNDYIRIYLKNEIREGYYVKYNVANGAMQLLPNYAPGKNQNTFVQVYGKNAQAIERYDISILGDNYRWL

SEQ ID NO: 18179 - protein, 1126 aa, unidentified
  REGION 1..1126: note = Cas Enzyme sequence
MTEKSSYSPKKYSLGLDIGTSSIGWAVLDLDKERIHDLGVRIFERPEDPQNGDSLAKPRRDARSARRRLKRRRQRLNHLKQFFIDRNILTKDQVEEVLDCKSDFNKLDVYKLRAKALAEELSPEELLKVLYQIAKRRGFKSNRKVVEESDKEGGRVTSALKANEKFLADNSYTTIGDALSRDEKFALHKRNKRDDYTNSFARDDFLRELEAIIKTQQNYTLKNVPEQAINELIYGIDDGQVTNVSAIMYQRPFMTKELIEKMVGNCTFEKDEKRAPKASYSFEVFRLASDLSHLVFIPRDASKRQAKRENLEVRLSSEQIGKVIDVAKNQKNLTYKKVRSTAGISEDYAPKDVHGKKKEGDEFGEDNTFGGLKAYSDIRLALKDLPEDWAKIDNESAINQIAYILTTQKADEGIRAELDSLPLSDKAKEAIIKIKPTNFKSFGHLSIKALQKITPHILEGMTYDKACEAAGYDFKKQSASLEQITNPVVKRAITQTLKVVRAIERKYGKPYFIKVETARDLAKNFKDRNAIKKENEENQGYNEDIKSIITDGYEASPKTKGGKQLLNHLKELNVRLNKNADFNGQQIIKVKLYREQNGVCLYSGKSIDFETMLRDDNAYQVDHIVPFSRSNNDGITNKVLVLTEENQKKANRTPFEYFGADEQRWEKFVALVETTYKTRDVKTSDKATNAINYKYNGYAMKKKQNLLLQDYKNDSWNVRALNDTRYITRFIQNYLRQNVDFAEGEEKQRVIAPNGTTTAYLRKRWGLAKDRAEDVLHHAKDAAVVAAINQKIVYQANLFSKEQEMKLYLNNAKTIDEKRQILLQSTDENTGEITDEVAFTRAQKELAQAEYFKLRSDEETKNRFPSPWPDFSKEIMKRTLNTDITTLQNELCGLDNYDEEFRLSVKPIFVSRMPRRKAVAQAHKETVRSPKVKDNDKRTVRMPLNKVKRKDIENSVLKESDKWLYDKLLERLDAHDNNPEKAFAEPVYKNDKKFDKNGKQLSPVSTIKVYSTQPSGFYINNGKAFVNNGSMVRLDVYQKPNKKGKIEHFFVPVYAHQVGKNKPTPTKILPAPKGFTDIDETFTKVCSLYPNDYVRIYLKNKILEGYYSGYDISVGNCDTISALYTV

SEQ ID NO: 18180 - protein, 1144 aa, unidentified
  REGION 1..1144: note = Cas Enzyme sequence
MAQKSSYSPKKYSLGLDIGTSSIGWAVLDLDKKRIHDLGVRIFERPEDPQNGDSLAKPRRDARSARRRLKRRRQRLNHLKQFFVDQNILTKDQVEEVLNYKSDFNKLDVYELRSKALAEELSPEELLKVLYQIAKRRGFKSNRKVVEESDKEGGRVTSALKTNEKFLADNNYTTVGEALSRDEKFAPHKRNKRDDYTNSFARDDFLCELEAIIKTQRNYALKNVPEPAINELIYGIDDGQVTNVSAIMYQRPFMTKELIEKMVGKCTFEDGEKRAPKASYSFEVFRLASDLSHLVFIPRDASKRQAKRENLEVGLSPEQIKQVIELAKSQKSLTYKKVRSTAGISEDYVPKDVRGKKKDGDEFGEENVFGGLKAYNDIRLALKDLLEDWVKIDNESAINQIAYILTTQKADEGIRDELNLLPISDKAKEAIVKIKPTNFKAFGHLSIKALQKITPHILEGMTYDKACEAAGYDFKKQSASLEQITNPVVKRAITQTLKVVRAIERKYGKPYFIKVETARDLAKNFKDRNAIKKENEENQGYNEDIKSIITDGYEASPKTKGGKQLLSHLKEFNVLLNKNADFNGQQIVKIKLYREQNGVCLYSGKSIDFETMLRDDNAYQVDHIVPFSRSNNDGITNKVLVFTEENQKKADRTPFEYFGADEQRWEKFVALVETTYKTRDVKTSDKATNAINYKYNGYAMKKKQNLLLQDYKNDSWNVRALNDTRYITRFIQNYLRQNVDFAEGEEKQRVIAPNGTTTAYLRKRWGLAKDRAEDVLHHAKDAAVVAAIDQKIVMQANLYAKRHEIKALLAATKTMEEKTDKLTGEITDEDEFDKAQQRKAAILVLSSKHFPQPWDNFGKEVMKRTLNTDIATLQNELRGLENYDDEFCLSVKPIFVSRMPRRKATAQAHKETIRSPKVKDNDQRTVRMPLNKVKSRDVENSVLKESDKWLYNKLLERLDTHDNNPEKAFAEPIYKNDKKFDKNGKKLSPVSTIKVYSTQPSGFYINDGKAFVNNGSMVRLDVYQKPNKKGKIEHFFVPVYAHQIGKNKPAPTKILPAPKGFTDVDETFIKICSLYPNDYVRIYLKNKILEGYYSGYDISVGTMILYPHFTPSKDIKVANRVSARSATLIERYDIAILGDNYRWL

SEQ ID NO: 18181 - protein, 1152 aa, unidentified
  REGION 1..1152: note = Cas Enzyme sequence
MAQKYSYSPKKYSLGLDIGTSSVGWAVLDLDKKRIHHLGVRIFERPEDPQNGDSLAKPRRDARSARRRLKRRRQRLNHLKQFFVDQNILTKDRVEEVLDYKSDFNKLDVYGLRTKALTEELSPEELLKVLYQIAKRRGFKSNRKVVEESDKEGGRVTSALKANEKFLADNDYTTVGEALSRDEKFALHKRNKRDDYTNSFARDDFLCELEAIIKTQRNYALKNVPEPAINELIYGIDDGQVTNVSAIMYQRPFMTKELIEKMVGKCTFEDGEKRAPKASYSFEIFRLASDLSHLVFIPRDASKRQAKRENLEIRLSPEQIKQVIDLAKSQKSLTYKKVRSTAGISEDYVPKDVRGKKKDGDEFGEENVFGGLKAYNDIRLALKDLPEDWAKIDNESAINQIAYILTTQKADEGIRVELDALPLSDKAKEAIVKIKPTNFKAFGHLSIKALQRITPHILEGMTYDKACEAAGYDFKKQSASLEQITNPVVKRAITQTLKVVRAIERKYGKPYFIKVETARDLAKNFKDRNAIKKENDENQGYNEDIKSIITDGYEASPKTKGGKQLLSHLKEFNVRLNKNADFNGQQIIKVKLYREQNCVCLYSGKPIDFETMLHDDNAYQVDHIIPFSRSNNDGMTNKVLVLTEENQKKGNQTPFEYFGADEKLWKEYVARVGSTYQTREVKKGDKDAGINYKYNGYAMKKKQNLLLQDYKNDSWNVRALNDTRYITRFIQNYLRQNVDFAEGEEKQRVIAPNGTTTAYLRKRWGLAKDRAEDVLHHAKDAAVVAAIDQKIVMQANLYAKHHEIKALLAATKTMEEKTDKLTGEITDEDEFDKAQRRKAAILVLSSKHFPQPWDNFGKEVMKRTLNTDIATLQNELRGLENYDDEFRLSIKPIFVSRMPRRKATAQAHKETIRSPKVKDGDQRTVRIPLNKLTLDTLEKSVLVESDRVLFNQLKDLLDKTATYDKKGKRTDHPDKAFAESVYKNDKKFDKNGKKLSPVSTIKVYSTQPSGFYINNGKAFVNNGSMVRLDVYQKPNKKGKIEHFFVPVYAHQVGKNKPTPTKILPAPKGFTDVDETFTKVCSLYPSDYVKCYFGDNVEEGYYVTYDSGSGRITVMDAASPNKEGINRHRISPRSATLIERYDIAILGDNYRWL

SEQ ID NO: 18182 - protein, 1167 aa, unidentified
  REGION 1..1167: note = Cas Enzyme sequence
MAQKSSYPPKKYSLGLDIGTNSIGWAVLDLEKERIHDLGVRIFSGQIENRKRRQFSSAQRINKRKKQRLKHLKTVFINNGLLSSDEINLALKDQEITENIYSLRAKAATQQISHRELFRVLYLIAKKRGFKSNRKSDPNDSDSSDTKFKKQLAKNSAIAEKYQTIGLMLENDPIYANQKHNSKDNYIATFQREDIRKEVEIILNKQFEKELNAPQTSDKYRNIIEVILDETTVDDNGEKQYLGMFTQRPYTNASLIEKMTGFCEFEKTERRYVKASYTTEEYVFLSNLSNIVILDTNNNDERYYIGKDDIGRLLALAKQEKNVKCSDVRKVLSLDKSICFSSRAIEDTYRDSIKHANKKYSAPQNKEKLAEALETARKIRDRSRKSIERQKVCEKGLGTFSIFKRLFKDSVLEQKIDENPYLLDDIAYILTVNIDDESIKTNLQQLEFLSDHDISVIMNMSTDDLRHFSGRSNLSHLAMQNIIKYLKEGYQSHLAIQKAGYDTKEIYQGNNITLPPLKLSDFSQDGDETFEKYGINSKVTQRALSQSIKLINAIIKKYGSPTYVRVELAREFAKTEEEREKIERNNKRNREKNRKYEEIINQIFKDNHKLPPSKIGHIIRKLTLRDQQDCKDIYSGDDIDITTLVLDESAYEIDHIIPRSKRFINDMNNLVLTSTKNNREKSNRLPLSYISDPTKQKEFLERVNLIKDKQKQKNLRLDSCEDQDNMTERALNDTKHIARFFKNYIQRNLLFAGDDEEDGRQRVFAIPGPVTAYLRARWGFEQKDRYANALHHAIDACVIVATTPKLLNRVMYHESHREQGKLYSERQSAEQDTGDFGMQAYLRAKKMYHDSIDNVSGEIIDPHKHNVAYEIMQEHEKLYRYSFPRPWIDFTREVSLRASDIDKKTLQNKLVEINNYDAEFRKTLHPIFISHMRYGKTRGSGHGEQIYKKPYKDDSRIIQHKSIYEISPDDIESSPIATSDRKLYELLKDTFSKIELKGNQSEKDKRIDKNTVIYKPSKNPDRSPVVKRIPVYVDKTPIPHDVRGGAVLNEKGTVAYSILCQNSTTGHYKVAPVYFRQIHANKKTELGEGWKYISRIVPNDFVVIIKKDGSKISGYYKTRKGDTLISILPHQHSDSSKAVYQRIGTAKEIHIYNISALGDNAPEEEYK

SEQ ID NO: 18183 - protein, 1133 aa, unidentified
  REGION 1..1133: note = Cas Enzyme sequence
MAKKTVYLPKKYSLGLDIGTSSAGWAVLDLDKKRIHDLGVRIFERPEDSQNGDSLAKPRRDARSARRRLKRRRQRLNHLKQFFVDQNILTKNQVEEVLDYKSDFNKLDVYALRSKALTEELSPEELLKVLYQIAKRRGFKSNRKVVEESDKEGGRVTSALKTNEKFLADNNYTTVGEALSRDEKFALHKRNKRDDYTNSFARDDFLCELEAIIKTQRNYALKNVPEPAINELIYGIDDGQVTNVSAIMYQRPFMTKELIEKMVGKCTFEDGEKRAPKASYNFEVFRLASDLSHLVFIPRDASKRQAKRENLEVRLSPEQISKIINAAKSQKSLTYKKVRSIAGISEDYVPKDVRGKKKDGDKFGEKNVFGGLKAYNDIRSALKDLPEDWAKIDNESAINQIAYILTTQKADEGIRDELNLLPISNKAKEAIVKIKPTNFKAFGHLSIKALQKITPHILEGMTYDKACEAAGYDFKKQSASLEQITNPVVKRAITQTLKVVRAIERKYGKPYFIKVETARDLAKNFKDRKAIENENKENQARNQSIIQTLNENGIVTPTGQQVIKVKLYREQQGKCLYSGNPIDFETMLRDDNAYQVDHIVPFSRSNNDGITNKVLVFTEENQKKGDQTPFEYFGADEKRWKEFVARVESIYKTRDIKTSDKATNAINYKYNGYAMKKKQNLLLQDYKNDSWNVRALNDTRYITRFIQNYLRQNVDFAEGEEKQRIIAPNGTTTAYLRKRWGLAKDRTEDVLHHAKDAAVVAAIDQKIVYQANLFSKEQEMRLYLDNAKTIDEKRQILLRSTDENTGEITNETTFTQAQKDLAQAEYFKLRSDTETKNRFPAPWPDFSKEVMKRTLNTDIATLQNELRGLDKYDEEFRLSIKPIFVSRMPRRKATAQAHKETIRSPKVKDGDQRTIRMPLNKIKRKDVENSVLKESDKWLYDKLLEKLDTHGDNPEKAFAEPIYKNDKKFDKNGNQLSPVSTVKVYSTQPSGFYINDGKAFVNNGSMVRLDVYQKPNKRGEIEHFFVPVYAHQVGKNKPAPTKILPAPKGFTNIDETFTKVCSLYPNDYVRIYLKNEIREGYYVKYNVANGAMQLLPNYAPGKNQGTFIQVYGKNAQTIERYDISVLGDNCEWL

SEQ ID NO: 18184 - protein, 1066 aa, unidentified
  REGION 1..1066: note = Cas Enzyme sequence
MKYVLGLDIGIASVGWAVLDQDRKRIEDLGVRAFNAAEEPKTKAPLAEPRRLARTARRRLCRRAERLRETKALFVEFRLVAADNGESAYETNRDKTDPWRLRAEALDRLLTGEELARALFHVVKHRGFKSNRKGVNDPKDDGKMLTGIGSNRNILAERGYRTAGEMLDKNEKFADRKRNSHGSYDKTLDRLLLEDEIKCIFQRQRELGSALPSSELETHVLEIFNRQKPFASGDDILRKVGLCTFEWERGELRAPKFSYHAERAMVLGKVNNLSRALSLTAEGRRKLVDMAYLHPKVYYSQVRKELSIPPDTLFPGLTSRRRSTSGTDADDPAATEKKTAFVELKGYHALRKALAGNGLWESISQDADLMDTLVFALTFYKTDPDIRAFLAERGVDAPIIEAALTCESFSRASHLSTLALKKIIPHLEEGMVYSEACATAGYDHSNFASGDKLDKLPMIPDDIKNPVVRRALCQARKVVNAVIGRYGAPYRIHIELARDMGRSWEDRQKMKKGQEENRAEREGLEEQFREAFNREPNGYDLLKWRFYREQGGRCAYSLQPIDTARLFEPGYAEIDHATPYSRCFDDSRANRVLVLGQQNQLKRNRTPYEFFGGDSARWAEFEGWVKATFRNNRKRNNLLRKELDHRAQEEWKERNLNDTRWATREFAGHVRTYLKFSDEQQGNPVYCVNGQITAKARGLWGLPKERDQDDLHHALDAAVVAAMLPHMIEEMTRQARIMRHGDHCVDIETGEVLPADADIYRLRQPWPRFRREIIARLSEDPAQAIAQLSLESYVDKPDIPPVLVSRMPLRKMSGAIHAETIRSAKRVDSDGVSVARKFLTSLKETDLKDLFAPETNQRLYAAIHERMALFGNDANKAFAEPLHKPTNDGSLGPVVKSVKVCKAQNTGIPVRGGVADNAEMVRADVFRKPNNMEKWEYYLVPVYVADVMARITPRRAIAAGKPYDEWPVMDESFEFMFSLHQFDFVQVTTGKDVIRGYYRGVDRSTGAIGLSIANNNAAPLQRTGVRTALTVEKYEMGVLGEYYPVRKEKRCVLENGGGLEPSETED

SEQ ID NO: 18185 - protein, 1103 aa, unidentified
  REGION 1..1103: note = Cas Enzyme sequence
MKYSIGLDIGTTSIGWAIIDEDNKRIEKVGVRIFEKPENPKDGKSLSETRRTARSTRRRLKRRRQRLNFIKKFFRDNNLLTKEQIEELLRPENKLNPYKIREKALNEKISNEELFISLYHIAKRRGYKSNRKSAEEKDKEGSKVLSAISKNEKLLKEYKTVASALNSNEKFIAHKRNKAEDYSNSFVRANFEDEAKLILKTQKEFGLNLSDEKINFLLFGNEKEGNFNGIFSQRPFMTSELIMKMRGKCSLEKSELRAPKASYSFEMFRLAENLAHLRVVINNEERSLTEEEISKVIEKAKDIKVLKYQHIREVLGYKKDENFSFPANMIRGEIKKDSKNNGEENKFGELSFYHKVKTALSNTPEDWQKVCDDNYRMLDELGEILSCNKDDESLRKEISKLGLSEKAVEVLMTINVSGFGHLSFKALRKIFPFLLKGDIYSDALKNAGYDVKQQLSGDKNKLPPLSKEDSAQITNPVVKRAVSQTIKVVNAIIREYGAPYQIKIEAASDLAKNFKERKKIKKAQDENASYNERIKERLQNEFNVPSPTGLQITKFKLYEQQNGKCAYSGKRLVLENLFSNEHYAEIDHIIPFSRCGNDSLINKVLVLTEENRQKGNLTPFEAWGADESRWAEYEARVNSMNLPFRKKGRLLAKVPPKEDWNSRALNDTRYISKFLGRYLRKNLKFAKFDNENPAQRVIVPNGSITSYLRRVWRVGSKNREENNLHHATDACVIAAIDQNVIQKISRLNKYFELFKYSAEDEVVDKITGEISSRADFEQTFEDIEPWKDFGKEVRKRTAHYESPIELHNELIGLENYDEDFRNRTTPIFVSRMPKRSGKGNINKETIRSPKIVEGYVDSKEKPVIARKQRIRLTSVDLKTLYDSPVRETDPVLYEILKVRLNEFGDKPEKAFGDPSNPVYKPTKNGSQGNIVRSIKVYDTLNSKSGFLINKGKAFVNNGDTIRLDVFKRKNYKGEFEYYFSPIYVHLLNAKKVEILPTPNGRSAAEKADFNKIRDENGKIFATEENGFVKQFSLYPNDYVRIYAGNRIVEGYYVKYGITDGTLNLMNHDQTSKDNLSLKHIGRGTITFIERYDISVLGDNYRWI

SEQ ID NO: 18186 - protein, 1056 aa, unidentified
  REGION 1..1056: note = Cas Enzyme sequence
EPRRTARSTRRRLKRRRQRLNFIKKFFRDNNLLTKEQIEELLRPENKLNPYKIREKALNEKISNEELFISLYHIAKRRGYKSNRKSAEEKDKEGSKVLSAISKNEKLLKEYKTVASALNSNEKFIAHKRNKAEDYSNSFVRANFEDEAKLILKTQKEFGLNLSDEKINFLLFGNEKEGNFNGIFSQRPFMTSELIMKMRGKCSLEKSELRAPKASYSFEMFRLAENLAHLRVVINNEERSLTEEEISKVIEKAKDIKVLKYQHIREVLGYKKDENFSFPANMIRGEIKKDSKNNGEENKFGELSFYHKVKTALSNTPEDWQKVCDDNYRMLDELGEILSCNKDDESLRKEISKLGLSEKAVEVLMTINVSGFGHLSFKALRKIFPFLLKGDIYSDALKNAGYDVKQQLSGDKNKLPPLSKEDSAQITNPVVKRAVSQTIKVVNAIIREYGAPYQIKIEAASDLAKNFKERKKIKKAQDENASYNERIKERLQNEFNVPSPTGLQITKFKLYEQQNGKCAYSGKRLVLENLFSNEHYAEIDHIIPFSRCGNDSLINKVLVLTEENRQKGNLTPFEAWGADESRWAEYEVRVNSMNLPFRKKGRLLAKVPPKEDWNSRALNDTRYISKFLGRYLRKNLKFAKFDNENPAQRVIVPNGSITSYLRRVWRVGSKNREENNLHHATDACVIAAIDQNVIQKISRLNKYFELFKYSAEDEVIDKITGEISSRADFEQTFEDIEPWKDFGKEVRKRTAHYESPIELHNELIGLDNYDEEFRNKTTPIFVSRMPKRSGKGNINKETIRSPKIVEGYVDSKEKPVIARKQRIRLTSVDLKTLYDSPVRETDPALYEILKARLNEFGDKPEKAFGDPSNPVYKPTKNGSQGNIVRSIKVYDTLNSKSGFLINKGKAFVNNGDTIRLDVFKRKNYKGEFEYYFSPIYVHLLNAKKVEILPTPNGRSAAEKADFNKIRDEDGKIFATEENGFVKQFSLYPNDYVRIYAGNRIVEGYYVKYGITNGTLNLMNHDQTSKDNLSLKHIGCGTITFIERYDISVLGDNYRWI

SEQ ID NO: 18187 - protein, 1018 aa, unidentified
  REGION 1..1018: note = Cas Enzyme sequence
MALRYPNQGARQDLPEEEPKDEIMNSLDPAHKSNIDIFALRKKSLDERLTNTELFKVIYHIAKRRGYKSNRKNEAEIDKSAGPVIDSIKKNEQLLVSKQYRTAGEAIYLDEKFTIHKRNKSDGYINSFARQDYEYELNMILKSQIKLGLNLSEEQTKQLLYSTENKSILFQRPFITEELINKMLGECTFEKNEKRTPKASFSFEKFRFINDLSNIVFKNRLDGSSMILSEDQIGKIFESALEQKDITYKKIRDICKISLDYEYTYIRGKISDQSTKEKNLFGSLKAYHAIKKSLVKLPDDWDKIKNDTNALNEITTILTTQKTDDGIKAKLDILSVELSSDAKNELSKLTFSGFAHLSIKALENIIPYIEKGMSYDKACEASGYDFRKKLADMSQITNPVVKRAISQTIKVIRAVKIKYGDPYFVKIEATRDLAKNFSDRNKIKHQQDDNNVANNKVKDRLVNEFDILNPTGLQITKYKLYAEQNGKCMYSGDPIDINLLFSDQNAYDIDHILPYSRSGNDSRANKALVKSSENRQKGDKTPYEAFGFDTEKWLKYEKQAETLYKTQEISGDSKTKSQKYAFNGYAMTKKNNLLNKKFESTDWNARALNDTRYISRFVQNYVKNSITFANGPEKTRVITPNGTMTAYIRARWGLKKDRQEDVLHHAKDAAVVAVIDHKLIQKVNIFAKAHEISDYLKACKTIKEKTDKLTGEISDDSEFEKSQRIKNAIDVLHDKHFPSPWDDFTKELNKRTLLLDKESLQNELRGLEQYDDNFRLQCSPIFVSRMPVRKGKGSAHQETLRSPKDENNISKIRKPLSAIHLKDLENSPTKNTDTKLYETIKKRLTDNSDNPLKAFSSPIYKPGDDKNPIRSIKIYTTEPSGYYINDGKAFVNNGSMICLDIFSKKTKDKTEHFFVPIYAHQIKGKRPTKILPEPKGFTDIDDNFTKVATVFPNDYLIVSFSDGTKKEGYYVGYNSASGQLNLLKHSATSKEYTIRCSARSASSIKRLDVSILGDNYWK

SEQ ID NO: 18188 - protein, 1085 aa, unidentified
  REGION 1..1085: note = Cas Enzyme sequence
MLQYAIGLDIGITSVGWATVALDENDKPYGIINLGSRIFDAAEQPKTGESLAAPRREARSMRRRLRRHRHRNERIRELLQREKIITEEELSHLFDGQLSDIYALRVKALDEIVTNKELARILIHISQRRGFKSNRKNASTKEDGELLSAVHENESRMIQHGYRTVAELYLNDEAYKEHRRNKGGKYISTVSRDMIEDEVRKIFAAQRSLGNEATSDSFEQEFLEILLSQRSFDEGPGNGSPYAGDQIGRMIGVCTLEKNPPEPRAAKATYSFEYFSLLEAINHIRIIRKGEGNPLTPEQRRTVIDLAHKTADLNYAKIRKELGLSDEQTFNMVSYKKAEDIASAEKKAKLSHLKAYHQMRTAFERVAKGHFATITKEQRNVIGETLSRYKTSDKIRPILKEAGLSETDIDIAETLNFSKYGHLSIKACEKIIPFLEQGMKYNEACEAAGYQFKGHDGEEKQHLLSALDEDAKNTLTSPVVLRAVSQSIKVINAIIRERGCSPTFINIELAREMAKDFAERNRIKKEQEENRANNDRLMDRIRHEYGKLSPTGLDLVKLRLFEEQGGVCAYSQKQMSLEHLFDPNYAEVDHIIPYSISFDDSRKNKVLVFAKENRDKGNRLPLQRDDFIVWVNSCVRDYRKRQCLLKERITEEDEQRFKERNLQDTKTAASFLMNYIADHLEFAPFSSGRKKHVTAVNGSVTSYLRKRWGITKVRANGDLHHAVDALVIACTTDGMIQEVTRYSKYRESRYMPSEDGRYLVDQFTGEVVKEFPYPWPWFHQELEARLSSDPQRAVRDRNYPLYVTGEVVPRPLFVSRMPRRKVTGAAHKETIKSGKALENGLLIVKRPLTDLKLDKNDEIADYYMPQSDRLLYEALRKRLIAFNGDGKKAFAEPFHKPKHDGTPGPVVNKVKLCEKSTLNVPVLEGKGIADNDSMVRIDVFYIEGDGYYFVPIYVADTLKPELPNKACIAYRPYEEWKEMKREDFIFSLYPNDLIKVTHRKTLKLTKAQKESDLPDSYETDSELLYYIGANISTGAITCRNQDNSYLLSGIGIKTLKAIEKYTVDILGEYHPVKHEKRQTFERKKD

SEQ ID NO: 18189 - protein, 1095 aa, unidentified
  REGION 1..1095: note = Cas Enzyme sequence
MRPYAIGLDIGITSVGWAALALDADENPCGIIDLGSRIFYAAEHPQTGESLAAPRREARGSRRRLRRHRHRNERIRSLMLEERLISQDELETLFDGRLEDIYALRVKALDEIVSRTDFARILLHISQRRGFKSNRKNPTTKEDGILLAAVNENKQRMSEHGYRTVGEMFLLDETFKDHKRNKGGNYITTVARDMVADEVRAIFSAQRELGASLASEEFEERYLEILLSQRSFDEGPGGNSPYGGSQIERMVGRCTFFSDEPRAAKATYSFEYFTLLQKVNHIRIVENGVSSKLTDEQRRIIIELAHATKDVSYAKIRKALKLSDKQLFNIRYSDNSPTEDSEKKEKLGIMKAYHQMRSAIDRISKGRFAMMPRVQRNAIGTALSLYKTSDKIRKYLSDAGLEEVDIDAADSIGSFSKFGHISVKACDMLIPFLEQGMNYNEACAAAGLNFKGHDAGEKSKLLHPKEEDYEDITSPVVRRAIAQTIKVINAIIRKEGSSPTFINIELAREMAKDFRERNRIKKENDDNRAKNERLLERIRTEYGKNNPTGLDLVKLRLYEEQSGVCMYSLKQMSLEKLFEPNYAEVDHIVPYSISFDDSRKNKVLVLTEENRNKGNRLPLQYLKGRRREDFIVWVNNNVKDYRKRRLLLKEELTAEDESGFKERNLQDTKTMSRFLLNYIADNLEFAESTRGRKKKVTAVNGAVTAYMRKRWGITKIREDGDCHHAVDAVVIACTTDAMIRQVSRYAQFRECEYMQTESGSVAVDTGTGEVLRTFPYPWPDFRKELEARLANDPAKVINDLHLPFYMSAGRPLPEPVFVSRMPRRKVTGAAHKDTIKSARELDNGYLIVKRPLTNLKLKNGEIENYYNPQSDKCLYDALKNALIEHGGDAKKAFADEFRKPKSDGTPGPIVNKVKLLESATMCVPVHGGKGAADNDSMVRVDVFLSGGKYYLVPIYVADTLKPELPNKAVTRGKKYSEWLEMADENFIFSLYPNDLICATSKNGITLSVCRKDSTLPPTVENKSFMLYYRGTDISTGSISCITHDNAYKLRGLGVKTLEKLEKYTVDVLGEYHKVGKEVRQPFNIKRRKACPSEML

SEQ ID NO: 18190 - protein, 1087 aa, unidentified
  REGION 1..1087: note = Cas Enzyme sequence
MHPYAIGLDIGITSVGWAALALDGSENPCGILGMGSRIFDAAEQPKTGESLAAPRRDARGSRRRLRRHRHRNERIKSLMLAEELVSPDELSSLFCGQLEDIYALRVKALDCAVSRTEFARILLHISQRRGFKSNRKNPSTKEDGELLKAVSENKQRMEANGYRTVGEMLLRDEMFKDHKRNKGGNYITTVTRDMVADEVKAIFAAQRSFGSVFAGEKLESSYLEILLSQRSFDEGPGGNSPYGGSQIERMVGRCTFFPDEPRAAKATYSFERFSLLEKVNHIRIITNGKAEKLTAQQRNLIIDLAHSSKDVSYAKIRKTLELSDGQLFNIRYSGDASPEETEKKEKLGSLKAYHQMRSAFNKVSNGYFSMLPREQLNAIGTALSLYKTSEKITAYLEDAGLRKDDISIADSIGNFSGFGHISVKACDMIIPFLEQGMNYNEACAAAGIDFKAHGVGEKSHFLHPTEDDYADITSPVVRRAISQTIKVLNAIIRKEGCCPTFINIELAREMAKDFSERNKLKKENDENRRQNEKRLDRIKNEYGKNNPTGLDLVKLRLYEEQSGVCMYSLKQMSVEKLFSPNYAEVDHIIPYSISFDDSLKNKVLVLTEENRNKGNRLPLQYLTGQRREDFIVWVNNNVKNYKKRRILLKETLTEEDEAGFKERNLQDTKTMSRFLLNYIADNLEFAESVRGRKKKVTAVNGAVTSYMRKRWGITKIRENGDLHHAVDAVVIACTTDGMIQQVSRYAKYRECRYMHTDSCSIAVDPDTGEVLHQFPYPWQDFRKELEARLGRDPARIINDLRLPFYMSSGAPLPEPLFVSRMPKRKVTGAAHKDTVKSAKLLDNGYLVVKRPITDLKLKNGEIENYYEPQSDRLLYEALKTALIEHDGDAKKAFANGFRKPKSDGTAGPIVKKVKLYEPTTLNVSVHGGKGAADNDAMVRVDVFLSGGKYYLVPIYVADTLKPTLPSKAITASKPYSEWHEMSDEDFIFSLYPNDLICATSKKGLKLSLVNKDSTLPPSVEGKSFMLYYIRTNISNGGIKAITHDNSYEIGGLGIKTLEKLEKYTVDVLGEYHKVGKEVRQPFNIKRG

SEQ ID NO: 18191 - protein, 1095 aa, unidentified
  REGION 1..1095: note = Cas Enzyme sequence
MRPYAIGLDIGITSVGWATVALDADENPCGIIDLGARIFDAAEQPKTGESLAAPRREARSARRRLRRHRHRNERIRNLITDERLVSKDELEVLFDGRLEDIYALRVKALDEQVGRTDFARILLHISQRRGFKSNRKNPTTKEDGVLLAAVNENKQRMSEHGYRTVGEMFLLDETFKDHKRNKGGNYITTVARDMVADEVKAIFSAQREFGASFASEEFEERYLEILLSQRSFDEGPGGNSPYGGSQIERMVGRCTFFPDEPRAAKATYSFEYFTLLQKVNHIRIVENGVSSKLTDEQRRIIIELAHATKDVSYAKIRKALKLSDKQLFNIRYTDNLPAEDSEKKEKLGLMKAYHQMRSAIDRVSKGRFAMMPRAQRNAIGTALSLYKTSDKIRKYLSDAGLEEVDIDAADSIGSFSKFGHISVKACDMLIPFLEQGMNYNEACAAAGLDFKGHDAGEKSKLLHPKEEDYEDITSPVVRRAIAQTIKVINAIIRRERCSPTFINIELAREMAKDFRERNRIKKENDDNRAKNERLLERIRAEYGKNNPTGLDLVKLRLYEEQSGVCMYSLKQMSLEKLFEPNYAEVDHIVPYSISFDDSRKNKVLVLTEENRNKGNRLPLQYLKGRRREDFIVWVNNNVKDYRKRRLLLKEELTAEDESGFKERNLQDTKTMSRFLLNYIADNLEFAESTRGRKKKVTAVNGAVTAYMRKRWGITKIREDGDCHHAVDAVVIACTTDAMIRQVSRYARFRECEYMHTESGSVAVDTGTGEVLRTFPYPWPDFRKELEARLANDPAKVINDLHLPFYMSAGRPLPEPVFVSRMPRRKVTGAAHKDTIKSARELDNGYLIVKRPLTDLKLKNGEIENYYNPQSDKCLYDALKNALIEHGGDAKKAFAGEFRKPKSDGTPGPIVKKVKLLEPTTICVPVHGGKGAADNDSMVRVDVFLSGGKYYLVPIYVADTLKPELPNKAVTRGKKYSEWLEMADEDFIFSLYPNDLICATSKNGITLSVCRKDSTLPPTVENKSFMLYYRGTDISTGSISCITHDNAYKLRGLGVKTLEKLEKYTVDVLGEYHKVGKEVRQPFNIKRRKACPSEML

SEQ ID NO: 18192 - protein, 1095 aa, unidentified
  REGION 1..1095: note = Cas Enzyme sequence
MRPYAIGLDIGITSVGWATVALDADENPCGIIDLGSRIFDAAEHPQTGESLAAPRREARSARRRLRRHRHRNERIRSLMLEEQLISQDELEVLFDGRLEDIYALRVKALDEIVSRTDFARILLHISQRRGFKSNRKNPTTKEDGILLAAVNENKQRMSEHGYRTVGEMFLLDETFKDHKRNKGGSYITTVTRDMVADEVRAIFSVQRELGASFASEEFEERYLEILLSQRSFDEGPGGNSPYGGSTIERMVGRCTFFPDEPRAAKATYSFEYFTLLQKVNHIRIVENGVSSKLTDEQRRIIIELAHTTKDVSYAKIRKVLKLSDKQLFNIRYTDNLPAEDSEKKEKLGIMKAYHQMRSAIDRVSKGRFAMMPRAQRNAIGTALSLYKTSDKIRKYLTDAGLDEIDINSADSIGSFSKFGHISVKACDMLIPFLEQGMNYNEACAAAGLNFKGHDAGEKSKLLHPKEEDYEDITSPVVRRAIAQTIKVINAIIRKEGSSPTLINIELAREMAKDFRERNRIKKENDDNRAKNERLLERIRTEYGKNNPTGLDLVKLRLYEEQSGVCMYSLKQMSLEKLFEPNYAEVDHIVPYSISFDDSRKNKVLVLTEENRNKGNRLPLQYLKGRRREDFIVWVNNSVKDYRKRRLLLKETLTDEDLAGFKERNLQDTKTMSRFLLNYISDNLEFAESTRGRKKKVTAVNGAVTAYMRKRWGITKIREDGDCHHAVDAVVIACTTDAMIRQVSRYAQFRECEYMQTESGSVAVDTGTGEVLRTFPYPWPDFRKELEARLANDPAKVINDLHLPFYMSAGRPLPEPVFVSRMPRRKVTGAAHKDTIKSARELDNGYLIVKRPLTDLKLKNGEIENYYNPQSDKCLYDALKNALIEHGGDAKKAFAGEFRKPKSDGTPGPIVKKVKLLEPTTMCVPVHGGKGAADNDSMVRVDVFLSGGKYYLVPIYVADTLKPELPNKAVTRGKKYSEWLEMADEDFIFSLYPNDLICATSKKGITLSVCRKDSTLPPTVENKSFMLYYRGTDISTGSISCITHDNAYKLRGLGVKTLEKLEKYTVDVLGEYHKVGKEVRQPFNIKRRKACPSEML

SEQ ID NO: 18193 - protein, 1095 aa, unidentified
  REGION 1..1095: note = Cas Enzyme sequence
MRHYAIGLDIGITSVGWATVALDADENPCGIIDLGARIFDAAEHPQTGESLAAPRREARSARRRLRRHRHRNERIRSLMIEEQLISQDELEVLFDGRLEDIYALRVKALDEQVGRTDFARILLHISQRRGFKSNRKNPTTKEDGVLLAAVNENKQRMSEHGYRTVGEMFLLDETFKDHKRNKGGNYITTVARDMVADEVRAIFSAQRELGASFASEEFEERYLEILLSQRSFDEGPGGNSPYGGSQIERMVGRCTFFPDEPRAAKATYSFEYFTLLQKVNHIRIVENGVSSKLTDEQRRIIIELAHTIKDVSYAKIRKVLKLSDKQLFNIRYTDNLPAEDSEKKEKLGIMKAYHQMRSAIDRISKGRFAMMPRAQRNAIGTALSLYKTSDKIRKYLTDAGFEEIDINSADSIGSFSKFGHISVKACDMLIPFLEQGMNYNEACAAAGLNFKGHDAGEKSKLLHPKEEDYEDITSPVVRRAIAQTIKVINAIIRKEGSSPTFINIELAREMAKDFRERNRIKKENDDNRAKNERLLERIRTEYGKNNPTGLDLVKLRLYEEQSGVCMYSLKQMSLEKLFEPNYAEVDHIVPYSISFDDSRKNKVLVLTEENRNKGNRLPLQYLKGRRREDFIVWVNNNVKDYRKRRLLLKEELTAEDESGFKERNLQDTKTMSRFLLNYIADNLEFAESTRGRKKKVTAVNGAVTAYMRKRWGITKIREDGDCHHAVDAVVIACTTDAMIRQVSRYARFRECEYMQTESGSVAVDTGTGEVLRTFPYPWPDFRKELEARLANDPAKVINDLHLPFYMSAGRPLPEPVFVSRMPRRKVTGAAHKDTIKSARELDNGYLIVKRPLTNLKLKNGEIENYYNPQSDKCLYDALKNALIEHGGDAKKAFADEFRKPKSDGTPGPIVKKVKLLEPTTMCVPVHGGKGAADNDSMVRVDVFLSGGKYYLVPIYVADTLKPELPNKAVTRGKKYSEWLEMADEDFIFSLYPNDLICATSKNGITLSVCRKDSTLPPTVESKSFMLYYRGTDISTGSISCITHDNAYKLRGLGVKTLEKLEKYTVDVLGEYHKVGKEVRQPFNIKRRKACPSEML

SEQ ID NO: 18194 - protein, 1069 aa, unidentified
  REGION 1..1069: note = Cas Enzyme sequence
MNKKIDYALGLDIGITSVGWSIINLNKNRIEDLGVRIFNAAENPKDGSSLALPRRMARGRRRLLRRKAYRVKKVKRLLVKENILSQDELNGLFENKNVISVWECRVKALNEKVSKEEWAKILINFCKRRGFKSNKKSNSEDKEEGIILESIKANEQKLEESGYRTIGELIYNEVNNSNDKYKPLRNKYGSYSRCVSRSMIKDEIYYLFEKQREFNNEYASKEFESKYIEIFDSQRPFSKFEDLEKMVGNCTLEKNEKRAPKQCISAEEFTLYDNMNRLSIINNGDKRKLSKEERKIICDEAFKKKELKYSTLRKILKLKDDDLFSTLNYNLEKADKSKTENAKFVSLSGYYEIKKVISYGISKEYFESIKDSRKLLNDIVYVLTVSKTDEDTKKQLSIRQVPEEIIDCVCNNNISFSKFNNLSIKAIENILPYVKEGYQYNEACEKVGYDFKGMFKGEKSYKLPVIQIDEIVNPVVNRALAQTRKVINAVIEQYGSPVRINIELARELAKNFSDRSKIAKEQEINRANKEKIIEEIKELMNKEPTGSEILKYRLWKEQNGECAYSQRGITIDELFTPGYCEIDHILPFSRSFDDGLNNKVLVLGKENQRKGNRTPCEYLGSNEERWNAFEIWVNNSTLRYKKKNNLLKKKFLRDEQKDWKARNLQDTQYICKYIATFVNNRLKFNEDSEFSRPQKVITVNGRATAYLRAVWGLIKVRENGDKHHALDATVVAVTTQGMVQKISKFNKANELRSFKEIDEFVDVETGEVIDVNEYSDIRKNKLIPRPWQGFSEELKIRLSNDPISELNKYPISTYDKEFIRDTVRPIFVSRVPFRKAKGKLFKETVYSKKAFTQNGYVAKKKLVDLTLKDMDNVYNYECDKILYDAIKEKLIEADGKAKKAFEEEFRKPTKSGKLGPVVKSIKIIAPKMPINDGIDMNEGIVQKEGIVRIDIYEKDNKYYAVPVYRYQIAKGIIPKKAAVASKKEEDWTIMNETYNFKFSIFKNDLIEIRYKNKKGYFGYFDGFDRSTASLTIEEHDNSNRNRGIGIKTNVIVFNKYFVDVLGKYYLSNK

SEQ ID NO: 18195 - protein, 1220 aa, unidentified
  REGION 1..1220: note = Cas Enzyme sequence
MDDGIKYSLGLDIGTTSVGWAVVNLDKERIEDLGVRIFERPENPKNGKSLAEPRRTARSTRRRLRRRRQRLNYLKQFFINQGLLTKQEVDDIIGSAHTKAWHQAHDPYQLRVKGLTEKMSPDELLIALYHIAKRRGYKSNRKSIEQSDTAGDGKKVNSAISKNDQILSEMKYSSVSQALLTDDRFRERKRNTIDDYRYSFSRVDFLDEIRHILDRQKDFYPNELSIDHINQLLGIDVYHDENGQPIPIDHKLTNNDINRLTKHSQTTLNGIFYQRPFMTSELINRMRGKCPLEKDQPRAPKASYSFELFRLAEDLSHLQYTLDFVETGTDWQVRKERKRQAQFLTADQIEACIDKCLKTQTVKYSAIREVLGFKDDNSFQFTYIRGKSPDEKTLAKDPLAKEKNTFAQLRFYHGVKSVLKGLPNDWQDVSSDQDLFDKIGEVLTCNKDDYSIREGLIEVNKDQSAQGKAELSDEAINAIVNSKLSFAGFGHLSLVALRKITPYLLKGNGMTYDKAVEEAGYQFNAKLSGHKNLLPPLNEEESHQITNPVVKRAVSQTIKVVNAIIHKYGAPYRIGIECAGELAKSFKEREDIKKRQDKNAENNQEAVKELRSGKLVSDGEQFEAQVAPTGTSITKLNFYKQQDCKCPYCGEPLNLSKIFSDDNYAEIDHIIPFSICGNDTKANKVLVHTTCNQIKGNQTPYQTWGNDPERWKIIEATARANHKLGAAKQRRLLAQTLPDEDWSLHAINDTRYISKFISRYIKSNLKFRPMDDTDDDGHTQRQRVIMPAGAITSYLRRMWHIGHKDREEDCLHHSVDAVIVALTTQAIIQDCSVYSAYIDDHTKMQFGDNASQAGSAKLVRALQRITDPATGEIKEADYKELMQDMLPWPRFDEELRKREEQPDPVNDNLAIWRNKFSDLYKDQDSDFINRIHPIFVSRMPKRQGAGAVNKETVRSNKTKDDDGKTRSAKVKLRDLTLKQLSNSAISSNEGVYEQIKQYIIDRDKWKDEIKAWRKAKKASKQTSNTDEANDGRDELSVPAEPQEPKVYKSNRRFDRNGNPISPIKSIKVYDPHPMTSGFLVNNDTAYVNNGSMVRLDVYKRPNKKGKIEHFFVPVYAHMIKKGHPEIKPTKILPEPAKGPKEIDDSFSFVCSLFPNDYVKMLIKSRNSEGYYIGYNINNGAMQIIPHSASSKGNFIQVSPRSASLIERLDINVLGDNYKWD

SEQ ID NO: 18196 - protein, 1140 aa, unidentified
  REGION 1..1140: note = Cas Enzyme sequence
MDDGIKYSLGLDIGTTSVGWAVVNLDKERIEDLGVRIFERPENPKNGKSLAEPRRTARSTRRRLRRRRQRLNYLKQFFINQGLLTKQEVDDIIGSAHTKAWHQAHDPYQLRVKGLTEKMSPDELLIALYHIAKRRGYKSNRKSIEQSDTTGDGKKVNSAISKNDQILSEMKYSSVSQALLTDDRFRERKRNTIDDYRYSFSRVDFLDEIRHILDRQKDFYPNELSIDHINQLLGIDVYHDENGQPIPIDHKLTNNDINRLTKHSQTTLNGIFYQRPFMTSELINRMRGKCPLEKDQPRAPKASYSFELFRLAEDLSHLQYTLDFVETGTDWQVRKERKRQAQFLTADQIEACIDKCLKTQTVKYSAIREVLGFKDDNSFQFTYIRGKSPDEKTLAKDPLAKEKNTFAQLRFYHGVKSVLKGLPNDWQDVSSDQDLFDKIGEVLTCNKDDYSIREGLIEVNKNQSAQGKAELSDEAINAIVNSKLSFAGFGHLSLVALRKITPYLLKGNGMTYDKAVEEAGYQFNAKLSGHKNLLPPLNEEESHQITNPVVKRAVSQTIKVVNAIIHKYGAPYRIGIECAGELAKSFKEREDIKKRQDKNAENNQEAVKELRSGKLVSDGEQFEAQVAPTGTSITKLNFYKQQDCKCPYCGEPLNLSKIFSDDNYAEIDHIIPFSICGNDTKANKVLVHTTCNQIKGNQTPYQTWGNDPERWKIIEATARANHKLGAAKQRRLLAQTLPDEDWSLHAINDTRYISKFISRYIKSNLKFRPMDDTDDDGHTQRQRVIMPAGAITSYLRRMWHIGHKDREEDCLHHSVDAVIVALTTQAIIQDCSVYSAYIDDHTKMQFGDNASQAGSAKLVRALQRITDPATGEIKEADYKELMQDMLPWPRFDEELRKREEQPDPVNDNLAIWRDKFSDLYKDQDSDFINRIHPIFVSRMPKRQGTGAVNKETVRSNKTKDDDGKTRSAKVKLRDLTLKQLSNSAISSNEGVYEQIKQYIVDRDKWKDEIKAWRKAKKASKQTSNTDEANDGRDEPSVPAEPREPKVYKSNRRFDRNGNPISPIKSIKVYDPHPMTSGFLVNNDTAYVNNGSMVRLDVYKRPNKRGKIEHFFVPVYTHMIKKGHPEIKPTKILPEPAKGPK

SEQ ID NO: 18197 - protein, 939 aa, unidentified
  REGION 1..939: note = Cas Enzyme sequence
  REGION 928..930: note = misc_feature - Xaa can be any naturally occurring amino acid
MRYTIGLDIGIASVGWAVINEDKSRIEDLGVRVFKKAEEPDGKSLNLARREARGSRRRIRRRATRMQKVKELLVKYNLVSEKELETLYIITETTPDVYELRAKGLERLLSRQEFARVLTNIAKRRGYKSNRKIDEEDKEVGKLSKGTIENKRILQEKGYRTIGEMFYKDEKFEYNKRNKAGEYNNTVLRSMLIDEVHTLFEMQRKFKSEFANKEFEKEYVEVMTYQKPYITPELLEKMLGKCTFEKGEPRAPKNSYTFERFMLLQKVNNLNIYINGEKVEIPQEKKKEIIELAYKQAEIKYTQLRKKLELPIEARFADLNYQIKRTEEESEEALVKKIEDKKFVKLEGWHKIRLALKENKDKFEKIEKNPELQNIIADALVRNKTDETIKNYLEKSDIDEEIINAILNINFTKFGHLSYKAMNKIIPELEKGLTYDKACENVGYEFKGRKNELQYKLPPVTELEDEILNSVVLRAVSQTRKVINAIIDKYGSPTAIYIETARELSKPYDERMKIEKRQKENAANNDQIKEYIKETFGFDPKPFDIVKMKLWREQNGKCAYSSKPIPAERLYEENFVQVDHIIPFSRCFDDSYQNKVLVLTDENQKKKERTPFEYFGEDKERWHQFEKFVNLTYKFNTRKKENLLIKNFNEEKSKEWIQRNINDTKYISKFMYNYIANNLKFADSESKRKVYNINGQATSILRHYWGLKKDREESDKHHAQDAVIIACATNKNIKKVSDYSRRKLLYKNNEIIDEETGEIIDKKYNIDISIKEPWPKFREEVEARMEDADNNGQLYALVNGKFTNYDDVDITHIRPIFTSRMPERKITGRAHKDTMRSQKFIQQGQNFTVVKKPLKAISKQEIEGIINNPDFKNLYLSDKKLYDDIYQKMKEADFKAEKAFADEYRKYSKTGNSPIVRSIKVPSAGATXXXSTIKKWSNC

SEQ ID NO: 18198 - protein, 1071 aa, unidentified
  REGION 1..1071: note = Cas Enzyme sequence
MRYTIGLDIGIASVGWAVINEDKSRIEDLGVRVFKKAEEPDGKSLNLARREARGSRRRIRRRATRMQKVKELLVKYNLVSEKELETLYIITETTPDVYELRAKGLDRLLSRQEFARVLTNIAKRRGYKSNRKIDEEDKEVGKLSKGTIENKRILQEKGYRTIGEMFYKDEKFEYNKRNKAGEYNNTVLRSMLIDEVHTLFEMQRKFKSEFANEEFEKEYVEIMTYQKPYITPELLEKMLGKCTFEKGEPRAPKNSYTFERFMLLQKVNNLNIYINGEKVEISQEKKKEIIELAYKQSEIKYTQLRKKLELPIEARFADLNYQIKRTEEESEEALVKKIEDKKFVKLEGWHKIRWALKENKDKFEKIEKNPELQNIIADALVRNKTDETIKNYLEKSDIDEEIINAILNINFTKFGHLSYKAMNKIIPELEKGLTYDKACENVGYEFKGRKNELQYKLPPVTELEDEILNSVVLRAVSQTRKVINAIIDKYGSPTAIYIETARELSKPYDERMKIEKRQKENAANNDQIKEYIKETFGFDPKPFDIVKMKLWREQNGKCAYSSKPIPAERLYEENFVQVDHIIPFSRCFDDSYQNKVLVLTDENQKKKERTPFEYFGEDKERWHQFEEFVNLTYKFNTRKKENLLIKNFNEEKSKEWIQRNINDTKYISKFMYNYIASNLKFADSESKRKVYNINGQATSILRHYWGLKKDREESDKHHAQDAVIIACATNKNIKKVSDYSRRKLLYKNNEIIDEETGEIIDKKYNIDISIKEPWPKFREEVEARMEDADNNGQLYALINGNFTNYDDVDITHIKPIFTSRMPERKITGRAHKDTMRSQKFIQQGQNFTVVKKPLKAISKQEIEGIINNPDFKNLYLSDKKLYDDIYQKMKEADFKAEKAFANEYRKYSKNGNSPIVRSIKVASAGATGVQLKNGAIAENANMVRVDVFEKDNKNYLVPIYVSDFAKNELPNKAICANKDEKEWIEMTEKYKFKFSLYPNDLVKIKRKNEKEFYAYYCSTHRGTGAINLLAVNGESRIESVGVKGLEIFEKYQVDILGNISKINKEKREGVK

SEQ ID NO: 18199 - protein, 1071 aa, unidentified
  REGION 1..1071: note = Cas Enzyme sequence
MRYTMGLDIGIASVGWAVINEDKSRIEDLGVRVFKKAEEPDGKSLNLARREARGSRRRIRRRVTRMQKVKELLIKYNLVSEKELETLYVITETTPDVYELRAKGLDKLLSRQEFARVLTNIAKRRGYKSNRKIDEEEKEVGKLSKGTIENKKILQEKCYRTIGEMFYKDEKFEYNKRNKGGEYNNTVLRSMLIDEVHILFDIQRNLKSEYADEKFEKEYVEVITYQKPYITPELLEKMLGKCTFEKGEPRAPKNSYTFERFMLLQKVNNLNIYINGEKIEIPQKKKKEIIQLAYNQTEIKYTQLRKKLELPIEARFADLNYQIKRTEEDSEEELVKKIENKKFVKLEGWHKIRLALKENKDKFEKIEKNPELQNIIADALVRNKTDETIKSYLEKSNVDVEIINAVLNINFTKFGHLSYKAINKIIPELEKGLTYDKACESVGYEFKGRRNELQYKLPPVTELEDEILNSVVLRSVSQTRKVVNAIIDKYGSPTAVYIETARELSKPYDERMKIEKRQKENEANNDKIKEYIKETFGFDPKPFDIVKMKLWREQSGKCAYSSKPIPAERLYEENFVQVDHIIPFSRCFDDSYQNKVLVLTDENQKKKERTPFEYFGEDKEKWHKFEEFVNLTYKFNTRKKENLLIKNFNEDKSKEWIQRNINDTKYISKFMYNYITNNLKFAESELKKKVYNINGQATSILRHYWGLKKDREKSDKHHAQDAVIIACATNKNIKKVSEYSRRKLLYKNNEIIDKETGEIIDSKYNIDISIKEPWPKFREEVEARMEDVDNNGQLYALVNGKFTNYDDIDVTQVRPIFTSRMPERKITGRAHKDTMRSQKFIQQGQNFTVVKKPLKAISKQEIEGIINNPDFKNLYLSDKKLYDDIYQKMKETNFKAEKAFINEYRKYSKKGNSPIVRSIKVPSAGATGVQLKNGSIAENANMVRVDVFEKDNKNYLVPIYVSDFVKDELPNKAIFANKDEKKWIEMTEEYKFKFSLYPNDLVKIKRKNEKEFYAYYCSTHRGTGAINLLAVNGERKIEGIGAKSLEIFEKYQVDVLGNISKINKEKREGVK

SEQ ID NO: 18200 - protein, 1071 aa, unidentified
  REGION 1..1071: note = Cas Enzyme sequence
MRYTMGLDIGIASVGWAVINEDKSRIEDLGVRVFKKAEEPDGKSLNLARREARGSRRRIRRRATRMQKVKELLIKYNLVSEKELETLYVITETTPDVYELRAKGLDKLLSRQEFARVLTNIAKRRGYKSNRKIDEEEKEVGKLSKGTIENKKILQEKCYRTIGEMFYKDEKFEYNKRNKGGEYNNTVLRSMLIDEVHILFDIQRNLKSEYADEKFEKEYVEVITYQKPYITPELLEKMLGKCTFEKGEPRAPKNSYTFERFMLLQKVNNLNIYINGEKIEIPQKKKKEIIQLAYNQTEIKYTQLRKKLELPIEARFADLNYQIKRTEEDSEEELVKKIENKKFVKLEGWHKIRLALKENKDRFEKIEKNPELQNIIADALVRNKTDETIKSYLEKSNVDVEIINAVLNINFTKFGHLSYKAINKIIPELEKGLTYDKACESVGYEFKGRRNELQYKLPPVTELEDEILNSVVLRSVSQTRKVINAIIDKYGSPTAVYIETARELSKPYDERMKIEKRQKENEANNDKIKEYIKETFGFDPKPFDIVKMKLWREQSGKCAYSSKPIPAERLYEENFVQVDHIIPFSRCFDDSYQNKVLVLTDENQKKKERTPFEYFGEDKEKWHKFEEFVNLTYKFNTRKKENLLIKNFNEDKSKEWIQRNINDTKYISKFMYNYITNNLKFAESELKKKVYNINGQATSILRHYWGLKKDREKSDKHHAQDAVIIACATNKNIKKVSEYSRRKLLYKNNEIIDKETGEIIDSKYNIDISIKEPWPKFREEVEARMEDADNNGQLYALVNGKFTNYDDIDVTQVRPIFTSRMPERKITGRAHKDTMRSQKFIQQGQNFTVVKKPLKAISKQEIEGIINNPDFKNLYLSDKKLYDDIYQKMKETNFKAEKAFINEYRKYSKKGNSPIVRSIKVPSAGATGVQLKNGSIAENANMVRVDVFEKDNKNYLVPIYVSDFVKDELPNKAIFANKDEKKWIEMTEEYKFKFSLYPNDLVKIKRKNEKEFYAYYCSTHRGTGAINLLAVNGERKIEGIGAKSLEIFEKYQVDVLGNISKINKEKREGVK

SEQ ID NO: 18201 - protein, 1071 aa, unidentified
  REGION 1..1071: note = Cas Enzyme sequence
MRYTIGLDIGIASVGWAVINEDKSRIEDLGVRVFKKAEEPDGKSLNLARREARGSRRRIRRRATRMQKVKELLVKYNLVSEKELETLYIITETTPDVYELRAKGLDRLLSRQEFARVLTNIAKRRGYKSNRKIDEEDKEVGKLSKGTIENKRILQEKGYRTIGEMFYKDEKFEYNKRNKAGEYNNTVLRSMLIDEVHTLFEMQRKFKSEFANKEFEKEYVEVMTYQKPYITPELLEKMLGKCTFEKGEPRAPKNSYTFERFMLLQKVNNLNIYINGEKVEIPQEKKKEIIELAYKQAEIKYTQLRKKLELPIEARFADLNYQVKGIEEDSEEDLVKKVEDKKFVKLEGWHKIRLALKENKDKFEKIEKNPELQNIIADALVRNKTDETIKKYLEKSDIDEEIINAVLNINFTKFGHLSYKAMNKIIPELEKGLIYDKACKNVGYEFKGRKNELQYKLPPVTELEDEILNSVVLRAVSQTRKVINAIIDKYGSPTAIYIETARELSKPYDERMKIEKRQKENAVNNDKIKEYIKETFGFDSKPFDIVKTKLWREQNGKCAYSGKPIPAERLYEENFVQVDHIIPFSRCFDDSYQNKVLVLTDENQKKKERTPFEYLGEDKERWHQFEEFVNLTYKFNTRKKENLLIKNFNEEKSKEWIQRNINDTKYISKFMYNYIANNLKFADSESKRKVYNINGQATSILRHYWGLKKDREESDKHHAQDAVIIACATNKNIKKVSDYSRRKLLYKNNEIIDEETGEIIDKKYNIDISIKEPWPKFREEVEARMEDADNNGQLYALVNGKFTNYDDVDITHIRPIFTSRMPERKITGRAHKDTMRSQKFIQQGQNFTVVKKPLKAISKQEIEGIINNPDFKNLYLSDKKLYDDIYQKMKEADFKAEKAFADEYRKYSKTGNSPIVRSIKVPSAGATGVQLKNGAIAENANMVRVDVFEKDNKNYLVPIYVSDFVRNELSNKAIVQNKSEDQWIEMTEEYKFKFSLYPNDLVKIKRKNEKEFYAYYCSTHRGTGAINLLAINGESKIDGIGAKSLEIFEKYQVDVLGNISKVNKEKREGVK

SEQ ID NO: 18202 - protein, 1183 aa, unidentified
  REGION 1..1183: note = Cas Enzyme sequence
MGIKIMKYRLSLDLGVCSIGVAVLSLDEQNRVTDIKDKGVCIFEVSEGAEDRRLKRSQRKNTERTRKRLSLLSETLAEAGLWSFDEDTQDRLIKLSPYAIRAQGVNGKLNDIMQLGRAVLHMAKHRGAGFVEMQKVELENKKDEDEDNSTRKKKTTVSEYAKLAKCLEDTGAKTIGEYFFMRLHKSYKNNNIEDENRRYVRQRKTGDKVKVDYAIPRYLVKEEFNLLWDKQANYYKALEGKILKQRIHDILFYEKYHRPYATGKCIFVDTEPRLCKAHPLNEKRRIYESVNNIRIQELKEQRKLTKDERDLIIEELLLKGQKIGQKGQAIRKQLKIDKNFTIVLADSIKPYLYSTPEYMAIDFLSKLDDEKLTEIVEFMAEPRLEDGREYLYNDQQVIDKLKEKLGIGDEKQISQLLAMLPKGRGSLGITATVKILELLKKDVISIREATDQLAKTDKRFIAEEERARAIQGKYDKLPYYGEILKTDTQPIADWQKKTNKSLNPLEAEYGKIANPAVHRILNQLRKVVNDIIRIYGKPYDINIELAREMGMSTKRKAKYERLQKEHRAKNEKAVDYLKEHKIRVTRDNILKWRLADEQNWKDAFDLERIHPRFEGFEIEHLIPDSLGGTDAPMNRVLIKRSDNLNKGNMYPYEYLQNKHGDNIYGILKEIRVNRNMPDGKRWRFESDAKEKFESGEDTDSITRYLTDTRYVCKLSARYLRAIIDYKQGDENNTRVLTINGAHTAKLRGIWNLDGIEYDLMGLNEEVPKYLPDKTHFVNLDTGEVLYQEKLDIDGNWKRLETQKNKHWKKKPRIDHRHHIVDAITIGFVNRADMQNINWHDKRGYEIPFMQLPVPLSSEDEGDRKKQLVIFRDKLKETLSDVKVYHKPEHSKNGQLHKETARLAFMKNPDKPTEIITKYQRPISAVLDKKSSLGKLLINTKTIRPKWHAAIAKCAEEMIRLKAAIESHFDESEEKLKQENQQLVKDGKKEKKISEAMIVQRAFNITLSNGEYKFTTFPEYQNKKSFVDIPKHKVVYDSGNNYCLDFYQDENGKVGWEVVNQFNANQKDFIPQWKQKGFKLIWSVQQGDVIELDTPQQWKRYNPEKKCLAVIKKLEKGFTYIKYQTDARAENKKEKDNLHIKQDFIGGGLSFYVESGARKVEITSFGKIKRKHKKLCNGKKETVK

SEQ ID NO: 18203 - protein, 1187 aa, unidentified
  REGION 1..1187: note = Cas Enzyme sequence
MKYRLSLDIGVGSIGPVVLSLDERNKVTDIIDKGVCIFEVSEGAEERRLKRTQRKTTQRTKQRLNLLSKTLADAGLWSLDDDIQADLINLSPYRIRAQGVNGKLNNLMELGRAILHMAKHRGASFVEMHKLEIELEKAAEDKEDGTKKKKKEPSEYARLVEYLKESGAKTIGEYFFMRLHKSYKTNNIDLDDKSRRYVRQRKGLSDKKAKVDYAIPRYLVKEEFNLLWDKQANYYKHLKDKELKKKIYDILFYESDHRPYATGNCIFIENEKRLAKAHPLSEKRRIYEAVNNIRIQELKEQRKLAKDKRDLIINELLLKGQKVGEKGQAIKKLLNLKNVNIILADSIKPYLYSMPEYKAIDFLRNLDDDKLAQIVEFMAEPIKPNKKDYLYNDEQLIEILKKDFGTDDEQQISQLLAMLPKGRGSLGKTATVKILELLEKDVISIREATDKLAKTDNRFIAEEERAKAIQGKYDELPYYGEILKTDTQPIADWQKQTNKSLNPLEAKYGKIANPAVHRILNQIRKVVNDIIRIYGKPYDINIELAREVGMSSKKKAEYEKKQKENRDKNEQAAQYLKEHKIRVTSDNILKCRLAEEQNWKDAFAPLERIHPRFEGFEIEHLIPDSLGGTDARSNRVLIKRSDNLNKGNMYPYDYLQNKHGDKVYGILKEIRANRNMPDGKKWRFESDAKEKFESGQDADNITRYLTDTRYVCKLAARYLKAIVDYKQGDENNTRVLAINGGHTAKLRGIWNLDGIEYDLMGLNEEVPEYLPEKTHFVNLDTGEVLYQEELDIDGNWKKCENRKNEHWQKKPRIDHRHHIVDAITIGCVSRADMQKINWHDKRGYEIPFMQLPVPLSDNGDTDRKKQLVVFRDKVIDLLRNVKVYHKPEHSKSGQLHEATGKYALMANPVDPHKIIVRYNRPVSKILERTANLKNLLIKTSTIKPQWHKDISEDAQEMIRLKAAIESRFDEAEKNLKQENQQLVKDGKKEVKISEAIILKRAFKMVRDCREYKLDTYPVYDNSESLIFVDKHKVAYKGGRNYRLDFYQDDKGKVGWELINRFDANRKDSVPQWKLGGFMPIWSLYKGDMIELKTPESWKRYTDTNRCLAVVEEFSAGKIGIKYHSDARQENRDEKENLHIKQDCISDKGLIFCTRSAFGKIELTPFCKVGRRHKKLWDGKKEATKQPK

SEQ ID NO: 18204 - protein, 1146 aa, unidentified
  REGION 1..1146: note = Cas Enzyme sequence
MKYRLGLDLGVGSIGSAIIELDNEGNAKDIIDAGVRIFEVSEGAEERRLKRTARKNLVRTKKRLELLAKKLFENGLWSDENPEGTDKLKSKSPYKIRTDALNERLASPYYVGRAVLHIAKHRGAGFVSASEETEEEILEEGEKSKAKKSSYDMMLHHLKETNSKTIGEFFYNKIISGKGNDKTVRQKKYAIEKNIVDYAIPRYLVKDEFNQIWDKQAEFYLQMKKENLKKEIYDILFYERPAAPYATGKCIYFREEDRLLKAHPLSEMRRIYEEVNNIRILNDMGKRKLTLEERDSIVNELLLKGQNAGKQAIKKLLNLSAQHKISLVDDRVIKAYLYSRPEFANNEYLQNMNEDELSSFIEFLAEPKMSKDKNARLYNEDALIEYLKPILKIDDEKEIGNLLTKLPKGRGMLGISATKIILEKLKEDVVTHREITDKLAETDKRFMAEEEIARQNQGKCFQLPYYGEILQTDTAPLPPLMINNNKSLNPDEIKWGKITNPAVHMILNQIRLVVNEIIKIYGKPYDINIELGRDVGMSTKKKKEFENRQKQNERLNEEAKNHLKEHKIAINSKNILKYKLAKEQGWKDAYNPTQNISSVFTGMEIEHIIPQAKGGTDTYNNLCLVNRNDNLNKGDRYAYEYFEETKTPEEIREILKNARSRTPDKSWRFEADAREKYEESGDKEESTRYLTDTRYVAKMAQRYLRVVVDCSDCDEVMQNRILAVKGGQTAKLRQRWNLYGLEYNLMGLDIPRYVDCSPYWLEQDTGEIIDGINKPDIDGKWKFFDKAKNKEWQPKPRIDHRHHAMDAITVACASRGLIQRMAEENDINKIHYPLPLTSVESVADFRRKVISCLKDVKVSHKPNHSKAGQFHKETARTVVWANPKDPCKVIAFYKKRILDTVKSINDIDKLLLSEKIKDEYHPQISKDRQTHKSLVDNFILHLDDARQKLLEENEKKLLDGKKETKITDTMILSKALSIIRKAKLWNSDKYHCYENNSSLVYISKHKITYENGNNHCVDFYVKDGKVGWEVIKRFDANQADFEPQWKKEGGKIIYSIYKGDILELNTPEKWKQYTDKKRCLAKVRKFSSGITIELVNDARDDKNIDKLPDRGLSFYLEHKARKVELTPFGKIKKKHKVLWNGSKTAA

SEQ ID NO: 18205 - protein, 1155 aa, unidentified
  REGION 1..1155: note = Cas Enzyme sequence
MKYRLGLDLGVGSIGSAIIELDNEGNAKDIIDAGVRIFEVSEGAEERRLKRTARKNLVRTKKRLELLAKKLFENGLWPDENPEGTDKLKSKSPYKIRTDALNEQLASPYYVGRAVLHIAKHRGAGFVSASEETEEEILEEGEKSKAKKSSYDMMLHHLKETNSKTIGEFFYNKIISGKGNDKTVRQKKYAIEKNIVDYAIPRYLVKDEFNQIWDKQAEFYPQMKKENLKKEIYDILFYERPAAPYATGKCIYFREEDRLLKAHPLSEMRRIYEEVNNIRILNDMCKRKLTLEERDSIVNELLLKGQNAGKQAIKKLLNLSAQHKISLVDDRVIKAYLYSRPEFANIEYLQNMNEDELSSFIEFLAEPKMSKDKNARLYNEDALIEYLKPILKIDDEKEIGNLLTKLPKGRGMLGISATKIILKKLKEDVLTHREITDKLAETDKRFMAEEEIARQNQGKCFQLPYYGEILQTDTAPLPPLMINNNKSLNPDEIKWGKIANPAVHMILNQIRLVVNEIIRIYGKPYDINIELGRDVGMSTKKKKEFENRQKQNEKLNEEAKNYLKEHKIAINNKNILKYKLAKDQGWKDAYNPTQNISSVFTGMEIEHIIPQAKGGTDTYNNLCLVNRNDNLNKGDRYAYEYFEEAKMPEEIREILKNARSRTPDKSWRFEADAREKYEESGDKEESTRYLTDTRYVAKMAQRYLRAVVDCSDCDEVMQTRILAVKGGQTAKLRQRWNLHGLEYDLMGLDIPRYVDCSPYWLEQNTGEIIDGINKPDIDGKWKFFDKAKNKEWQPKPRIDHRHHAMDAITVACANRGLIQKMAEENDINKIHYPLPLTSVESVADFRRKVISCLKNVKVSHKPNHSKAGQFHKETGRTVLCQNPEDPNSLITVYSRKILQVVKSAKDLTKLLIPETIKNEWHEDIAEHKAKQAKLVQDFELYMNTAEQILIAENEQGVAEGKKEIKITEGRILLKAFRIIQDKGLWKGDKFRCYSNSSSMINIPKHGVAYEAQNNHCVDFYVKDGKVGWEVIKRFDANQADFEPQWKKEGGKIIWSVQQGDILELDTPDEWKQYTDKERCLAKVKKFSEGKFCIDYIADARMTSPKDKTLEYMFVNSIEKGLSYYTSHKTRKVELTPFGKIKKKHKVLWNGTKTAA

SEQ ID NO: 18206 - protein, 1155 aa, unidentified
  REGION 1..1155: note = Cas Enzyme sequence
MKYRLGLDLGVGSIGSAVIELDNEGNAKNIIDAGVRIFEVSEGAEERRLKRTARKNLIRTKKRLKLLAKKLFENDLWPNENPEGTDRLKSKSPYKIRTDALSEKLANPYYVGRIILHMAKYRGAGFVSASEELEEEILEEGEKSKAKKSSYDMMLHYLKETNSRTIGEFFYNKIISGKGNNKTVRQKKYAIEKNIVDYAIPRYLVKDEFNKIWDKQAEFYPQMKKENLKKEIYDILFYERPAAPYATGKCIYFREEDRLLKAHPLSEMRRIYEEVNNIRILNDMGKRKLTIEERNSIVNELLLKGQNAGKQAIKKLLNLSAQHKISLVDDKVIKAYLYSRPEFVNNEHLQNMNEDELSSFIDFLAEPKMSKAENARLYNEDALIEYLKPILKINDEKEIGNLLTKLPKGRGMLGISATKIILEKLKEDVLTHREITDKLAETDKRFMAEEEIARQNQGKYFQLPYYGKILQTDTAPLPPLMINNNKSLNPDEIKWGKIANPAVHMILNQIRLVVNEIIKIYGKPYDINIELGRDVGMSTKKKNDFEKQQKQNEKLNQEAKNHLKEHKIAINNKNILKYKLAKEQGWKDAYNPTKNISSTFMGMEIEHIIPQAKGGTDTYNNLCLVNRNDNLNKGDRYAYEYFEATKTQEEIREILKNARSRTPEKSWRFEADAREKYEESGDKEESTRYLTDTRYVAKMAQRYLRAIVDCSDCDEVMQNRILAIRGGQTAKLRQHWNLYGLEYDLMGIDIPRYVNCSPYWLELDTGEIIDGINKPNIDGKWKFFDKAKNKEWHPKPRIDHRHHAMDAITVACANRGLIQKMAEENDVNKIHYPLPLTSIESVADFRRKVISCLKNIKVSHKPNHSKAGQFHKETGRTVLCQNPDDTNSLITVYSRKILQVVKSVKDLDKLLIPETIKNEWHEAIAEDKAKQAKLVQDFELYMNTAEQKLIAENEQSVADGKKEIKITEGRILLKTFRIIQDKGLWKGDKFKCYENNSSLVYIKKHGVAYEGRNNHCVDFYQKDGKVGWEVIKRFDANQADFEPQWKKDEGKIIWSIQQGDILELDTPDEWKQYTNKERCLAKVKKFSNGKFCVDYITDARMTSPKDKTLQYTFVNTLEKGLSYYTSHKARKVELTAFGKIKKKHKVLWNGTKTAS

SEQ ID NO: 18207 - protein, 1155 aa, unidentified; identical to SEQ ID NO: 15060
  REGION 1..1155: note = Cas Enzyme sequence

SEQ ID NO: 18208 - protein, 1156 aa, unidentified
  REGION 1..1156: note = Cas Enzyme sequence
MKYRLGLDLGVGSIGSAVIELDNENNAKDIIDAGVRIFEVSEGAEERRLKRTARKNLVRTKKRLELLAKKLFENGLWPNENPEGTDKLKSKSPYKIRTDALNEKLASPYYVGRAVLHIAKHRGAGFVSASEETEEEILEEGEKSKAKKSSYDMMLHHLKETNSKTIGEFFYNKIISGKGNDKTVRQKKYAIEKNIVDYAIPRYLVKDEFNKIWDKQAEFYPQMKKENLKKEIYDILFYERPAAPYATGKCIYFREEDRLLKAHPLSEMRRIYEEVNNIRILNDMNKRKLTLEERDSIVNELLLKGQNAGKQAIKKLLNLSAQHKISLVDDRVIKAYLYSRPEFANNEHLQNMNENELSSFIEFLAEPKMSKDKNARLYNEDALIEYLKPILKIDDEKEIGNLLTKLPKGRGMLGISATKIILEKLKEDVLTHREITDKLAETDKRFMAEEEIARQNQGKCFQLPYYGEILQTDTAPLPPLMINNNKSLNPDEIRWGKIANPAVHMILNQIRLVVNEIIKIYGKPYDINIELGRDVGMSTKKKKEFENQQKQNEKLNEEAKNYLKEHKIAINNKNILKYKLAKEQGWKDAYNPTQNISSIFTGMEIEHIIPQAKGGTDTYNNLCLVNNNDNLNKGDRYAYEYFEETKTQEEIREILKNARSRTPQKSWRFEADAREKYEESGDKEESTRYLTDTRYVAKMAQRYLRAIVDCSDCDEVMQTRILAVKGGQTAKLRQHWNLYGLEYDLMGLDIPRYVNCPPYWLELDTGEIIEGINKPDIDGKWKFFDKAKNKEWQPKPRIDHRHHAMDAITVACANRGLIQKMAEENDINKIHYPLPLTSVESLADFRRKVISCLKDIKVSHKPNHSKAGQFHKETGRTVLCQNPDDPNSLITVYSRKILQVVKSAKDLTKLLIPETIKNEWHEDIAEHKAKQAKLVQDFELYMNTAEQILIAENEQGVAEGKKEIKITEGRILLKAFRIIQDKGLWKGDKFRCYENNSSLVYIKKHGVAYEGRNNHCVDFYQKNGKIGWEVIKRFDANQADFEPQWKKEGGKIIWSVQQGDILELDTPDEWKQYTDKERCLAKVKKFSNGAVTIDFVSDARMTSPKDKNLQYMFVDSLVNRGLSYFTNNKARKIELTPFGKIKKKHKALWNGTKTAA

SEQ ID NO: 18209 - protein, 1155 aa, unidentified; identical to SEQ ID NO: 15035
  REGION 1..1155: note = Cas Enzyme sequence

SEQ ID NO: 18210 - protein, 1156 aa, unidentified
  REGION 1..1156: note = Cas Enzyme sequence
MKYRLGLDLGVGSIGSAVIELDNENNAKDIIDAGVRIFEVSEGAEERRLKRTARKNLVRTKKRLELLAKKLFENGLWQNENPEGTDKLKSKSPYKIRTDALNEKLASPYYVGRAVLHIAKHRGAGFVSASEETEEEILEEGEKSKAKKSSYDMMLHHLKETNSKTIGEFFYNKIISGKGNDKTVRQKKYAIEKNIVDYAIPRYLVKDEFNKIWDKQAEFYPQMKKENLKKEIYDILFYERPAAPYATGKCIYFREEDRLLKAHPLSEMRRIYEEVNNIRILNDMNKRKLTLEERDSIVNELLLKGQNAGKQAIKKLLNLSAQHKISLVDDRVIKAYLYSRPEFANNEHLQNMNENELSSFIEFLAEPKMSKDKNARLYNEDALIEYLKPILKIDDEKEIGNLLTKLPKGRGMLGISATKIILEKLKEDVLTHREITDKLAETDKRFMAEEEIARQNQGKCFQLPYYGEILQTDTAPLPPLMINNNKSLNPDEIRWGKIANPAVHMILNQIRLVVNEIIKIYGKPYDINIELGRDVGMSTKKKKEFENQQKQNEKLNEEAKNYLKEHKIAINNKNILKYKLAKEQGWKDAYNPTQNISSIFTGMEIEHIIPQAKGGTDTYNNLCLVNNNDNLNKGDRYAYEYFEETKTQEEIREILKNARSRTPQKSWRFEADAREKYEESGDKEESTRYLTDTRYVAKMAQRYLRAIVDCSDCDEVMQTRILAVKGGQTAKLRQHWNLYGLEYDLMGLDIPRYVNCPPYWLELDTGEIIEGINKPDIDGKWKFFDKAKNKEWQPKPRIDHRHHAMDAITVACANRGLIQKMAEENDINKIHYPLPLTSVESLADFRRKVISCLKDIKVSHKPNHSKAGQFHKETGRTVLCQNPDDPNSLITVYSRKILQVVKSAKDLTKLLIPETIKNEWHEDIAEHKAKQAKLVQDFELYMNTAEQILIAENEQGVAEGKKEIKITEGRILLKAFRIIQDKGLWKGDKFRCYENNSSLVYIKKHGVAYEGRNNHCVDFYQKNGKIGWEVIKRFDANQADFEPQWKKEGGKIIWSVQQGDILELDTPDEWKQYTDKERCLAKVKKFSNGAVTIDFVSDARMTSPKDKNLQYMFVDSLVNRGLSYFTNNKARKIELTPFGKIKKKHKALWNGTKTAA

SEQ ID NO: 18211 - protein, 1146 aa, unidentified
  REGION 1..1146: note = Cas Enzyme sequence
MKYRLGLDLGVGSIGSAVIELDNENNAKDIIDAGVRIFEVSEGAEERRLKRTARKNLVRTKKRLELLAKKLFENGLWPNENPEGTDKLKSKSPYKIRTDALNEKLASPYYVGRAILHIAKHRGAGFVSASEETEEEILEEGEKSKAKKSSYDMMLHHLKETNSKTIGEFFYNKIISGKGNDKTVRQKKYAIEKNIVDYAIPRYLVKDEFNKIWDKQAEFYPQMKKENLKKEIYDILFYERPAAPYATGKCIYFREEDRLLKAHPLSEMRRIYEEVNNIRILNDMNKRKLTLEERDSIVNKLLLKGQNAGKQAIKKLLNLSAQHKISLVDDRVIKAYLYSRPEFANNEHLHNMNENELSSFIEFLAEPKMSKDKNARLYNEDALIEYLKPILKIDDEKEIGNLLTKLPKGRGMLGISATKIILERLKEDVLTHREITDKLAETDKRFMAEEEIARQNQGKCFQLPYYGEILQTDTAPLPPLMINNNKSLNPDEIRWGKIANPAVHMILNQIRLVVNEIIKIYGKPYDINIELGRDVGMSTKKKKEFENQQKQNEKLNEEAKNYLKEHKIAINNKNILKYKLAKEQGWKDAYNPTQNISSIFTGMEIEHIIPQAKGGTDTYNNLCLVNSNDNLNKGDRYAYEYFEETKTQEEIREILKNARSHTPQKSWRFEADAREKYEESGDKEESTRYLTDTRYVAKMAQRYLRAIVDCSDCDKVMQTRILAVKGGQTAKLRQHWNLYGLEYDLMGLDIPRYVNCPPYWLELDTGEIIEGINKPDIDGKWKFFDKAKNKEWQPKPRIDHRHHAMDAITVACANRGLIQKMAEENDINKIHYPLPLTSVESLADFRRKVISCLKDIKVSHKPNHSKAGQFHKETARTVVWANPKDPSKVIAFYKKRILDTVKSINDIDKLLLSEKIKDEYHPQISKDRQTHKSLVDNFILHLDDARQKLLEENEKKLLDGKKETKITDTMILSKALGIIRKAKLWNSDKYHCYENNSSLVYISKHKITYENGNNHCVDFYVKDGKVGWEVIKRFDANQADFEPQWKKEGGKIIYSIYKGDILELDTPEKWKQYTDKKRCLAKVRKFSSGITIELVNDARDDKNIDKLPDRGLSFYLEHKARKVELTPFGKIKKKHKVLWNGSKTAA

SEQ ID NO: 18212 - protein, 1156 aa, unidentified
  REGION 1..1156: note = Cas Enzyme sequence
MKYRLGLDLGVGSIGSAVIELDNENNAKDIIDAGVRIFEISEGAEERRLKRTARKNLVRTKKRLELLAKKLFENGLWPNENPEGTDKLKSKSPYKIRTDALNEKLASPYYVGRAILHIAKHRGAGFVSASEETEEEILEEGEKSKAKKSSYDMMLHHLKETNSRTIGEFFYNKIISGKGNDKTVRQKKYAIEKNIVDYAIPRYLVKDEFNKIWDKQTEFYPQMKKENLKKEIYDILFYERPAAPYATGKCIYFREEDRLLKAHPLSEMRRIYEEVNNIRILNDMNKRKLTLEERDSIVNKLLLKGQNAGKQAIKKLLNLSAQHKISLVDDRVIKAYLYSRPEFANNEHLRNMNENELSSFIEFLAEPKMSKDKNARLYNEDALIEYLKPILKIDDEKEIGNLLTKLPKGRGMLGISATKIILEKLKEDVVTHREITDKLAETDKRFMAEEEIARQNQGKCFQLPYYGEILQTDTAPLPPLMINNNKSLNPDEVKWGKIANPAVHMILNQIRLVVNEIIKIYGKPYDINIELGRDVGMSTKKKKEFENRQKQNEKLNEEAKNYLKEHKIAINNKNILKYKLAKEQGWKDAYNPTQNISSVFTGMEIEHIIPQAKGGTDTYNNLCLVNCNDNLNKSDRYAYEYFEETKTQEEIREILKNARSRTPEKSWRFEADAREKYEESGDKEESTRYLTDTRYVAKMAQRYLRAIVDCSDCDEVMQTRILAVKGGQTAKLRQHWNLYGLEYDLMGLDIPRYVNCPPYWLELDTGEIIEGINKPDIDGKWKFFDKAKNKEWQPKPRIDHRHHAMDAITVACANRGLIQKMAEENDINKIHYPLPLTSVKSVADFRRKVISCLKDVKVSHKPNHSKAGQFHKETGRTVLCQNPDDPNSLITVYSRKILQVVKSAKDLTKLLIPETIKNEWHEDIAEHKAKQAKLVQDFELYMNTAEQILIAENEQGVADGKKEIKITEGRILLKAFRIIQDKGLWKGDKFRCYSNSSSMINIPKHGVAYEAQNNHCVDFYQKNGKIGWEVIKRFDVNQTDFEPQWKKESGKIIWSVQQGDILELDTPDEWKQYTDKERCLAKVKKFSDGKIAIDLITDARMTSPKNKELKYMFVNTISDKGLTYLINHKTRKVELTPFGKIKKKHKVLWNGTKTAA

SEQ ID NO: 18213 - protein, 1156 aa, unidentified
  REGION 1..1156: note = Cas Enzyme sequence
MKYRLGLDLGVGSIGSAVIELDNKNNAKDIIDAGVRIFEVSEGAEERRLKRTARKNLVRTKKRLELLAKKLFENGLWPNENPEGTDKLKSKSPYKIRTDALNEKLASPYYVGRAVLHIAKHRGAGFVSAIEETEEEILEEGEKSKAKKSSYDMMLHHLKETNSKTIGEFFYNKIISGKGNDKTVRQKKYAIEKNIVDYAIPRYLVKDEFNKIWDKQAEFYPQMKKENLKKEIYDILFYERPAAPYATGKCIYFREEDRLLKAHPLSEMRRIYEEVNNIRILNDMNKRKLTLEERDSIVNELLLKGQNAGKQAIKKLLNLSAQHKISLVDDRVIKAYLYSRPEFANNEHLQNMNENELSSFIEFLAEPKMSKDKNARLYNEDALIEYLKPILKIDDEKEIGNLLTKLPKGRGMLGISATKIILEKLKEDVLTHREITDKLAETDKRFMAEEEIARQNQGKCFQLPYYGEILQTDTAPLPPLMINNNKSLNPDEIRWGKIANPAVHMILNQIRLVVNEIIKIYGKPYDINIELGRDVGMSTKKKKEFENQQKQNEKLNEEAKNYLKEHKIAINNKNILKYKLAKEQGWKDAYNPTQNISSIFTGMEIEHIIPQAKGGTDTYNNLCLVNSNDNLNKGNRYAYEYFEETKTQEEIREILKNARSRTPQKSWRFEADAREKYEESGDKEESTRYLTDTRYVAKMAQRYLRAIVDCSDCDEVMQTRILAVKGGQTAKLRQHWNLYGLEYDLMGLDIPRYVNCPPYWLELDTGEIIEGINKPDIDGKWKFFDKAKNKEWQPKPRIDHRHHAMDAITVACANRGLIQKMAEENDINKIHYPLPLTSVESLADFRRKVISCLKDIKVSHKPNHSKAGQFHKETGRTVLCQNPDDPNSLITVYSRKILQVVKSAKDLTKLLIPETIKNEWHEDIAEHKAKQAKLVQDFELYMNTAEQILIAENEQGVAEGKKEIKITEGRILLKAFRIIQDKGLWKGDKFRCYENNSSLVYIKKHGVAYEGRNNHCVDFYQKNGKIGWEVIKRFDANQADFEPQWKKEGGKIIWSVQQGDILELDTPDEWKQYTDKERCLAKVKKFSNGAVTIDFVSDARMTSPKDKNLQYMFVDSLVNRGLSYFTNNKARKIELTPFGKIKKKHKALWNGTKTAA

SEQ ID NO: 18214 - protein, 1156 aa, unidentified
  REGION 1..1156: note = Cas Enzyme sequence
MKYRLGLDLGVGSIGSAVIELDNENNAKDIIDAGVRIFEISEGAEERRLKRTARKNLVRTKKRLELLAKKLFENGLWPNENPEGTDKLKSKSPYKIRTDALNEKLASPYYVGRAILHIAKHRGAGFVSASEETEEEILEEGEKSKAKKSSYDMMLHHLKETNSRTIGEFFYNKIISGKGNDKTVRQKKYAIEKNIVDYAIPRYLVKDEFNKIWDKQTEFYPQMKKENLKKEIYDILFYERPAAPYATGKCIYFREEDRLLKAYPLSEMRRIYEEVNNIRILNDMNKRKLTLEERDSIVNKLLLKGQNAGKQAIKKLLNLSAQHKISLVDDRVIKAYLYSRPEFANNEHLRNMNENELSSFIEFLAEPKMSKDKNARLYNEDALIEYLKPILKIDDEKEIGNLLTKLPKGRGMLGISATKIILEKLKEDVVTHREITDKLAETDKRFMAEEEIARQNQGKCFQLPYYGEILQTDTAPLPPLMINNNKSLNPDEVKWGKIANPAVHMILNQIRLVVNEIIKIYGKPYDINIELGRDVGMSTKKKKEFENRQKQNEKLNEEAKNYLKEHKIAINNKNILKYKLAKEQGWKDAYNPTQNISSVFTGMEIEHIIPQAKGGTDTYNNLCLVNCNDNLNKSDRYAYEYFEETKTQEEIREILKNARSRTPEKSWRFEADAREKYEESGDKEESTRYLTDTRYVAKMAQRYLRAIVDCSDCDEVMQTRILAVKGGQTAKLRQHWNLYGLEYDLMGLDIPRYVNCPPYWLELDTGEITEGINKPDIDGKWKFFDKAKNKEWQPKPRIDHRHHAMDAITVACANRGLIQKMAEENDINKIHYPLPLTSVKSVADFRRKVISCLKDVKVSHKPNHSKAGQFHKETGRTVLCQNPDDPNSLITVYSRKILQVVKSAKDLTKLLIPETIKNEWHEDIAEHKAKQAKLVQDFELYMNTAEQILIAENEQGVADGKKEIKITEGRILLKAFRIIQDKGLWKGDKFRCYSNSSSMINIPKHGVAYEAQNNHCVDFYQKNGKIGWEVIKRFDVNQTDFEPQWKKESGKIIWSVQQGDILELDTPDEWKQYTDKERCLAKVKKFSDGKIAIDLITDARMTSPKNKELKYMFVNTISDKGLTYLINHKTRKVELTPFGKIKKKHKVLWNGTKTAA

SEQ ID NO: 18215 - protein, 1155 aa, unidentified
  REGION 1..1155: note = Cas Enzyme sequence
MKYRLGLDLGVGSIGSAVIELDNKNNAKDIIDAGVRIFEVSEGAEERRLKRTARKNLVRTKKRLELLAKKLFENGLWPNENPEGTDKLKSKSPYKIRTDALNEKLASPYYVGRAVLHIAKHRGAGFVSASEETEEEILEEGEKSKAKKSSYDMMLHHLKETNSKTIGEFFYNKIISGKGNDKTVRQKKYAIEKNIVDYAIPRYLVKDEFNKIWDKQAEFYPQMKKENLKKEIYDILFYERPAAPYATGKCIYFREEDRLLKAHPLSEMRRIYEEVNNIRILNDMNKRKLTLEERDSIVNELLLKGQNAGKQAIKKLLNLSAQHKISLVDDRVIKAYLYSRPEFANNEHLQNMNENELSSFIEFLAEPKMSKDKNARLYNEDALIEYLKPILKIDDEKEIGNLLTKLPKGRGMLGISATKIILEKLKEDVLTHREITDKLAETDKRFMAEEEIARQNQGKCFQLPYYGEILQTDTAPLPPLMINNNKSLNPDEIRWGKIANPAVHMILNQIRLVVNEIIKIYGKPYDINIELGRDVGMSTKKKKEFENQQKQNEKLNEEAKNYLKEHKIAINNKNILKYKLAKEQGWKDAYNPTQNISSIFTGMEIEHIIPQAKGGTDTYNNLCLVNSNDNLNKGDRYAYEYFEETKTQEEIREILKNARSRTPQKSWRFEADAREKYEESGDKEESTRYLTDTRYVAKMAQRYLRAIVDCSDCDEVMQTRILAVKGGQTAKLRQHWNLYGLEYDLMGLDIPRYVNCPPYWLELDTGEIIEGINKPDIDGKWKFFDKAKNKEWQPKPRIDHRHHAMDAITVACANRGLIQKMAEENDINKIHYPLPLTSVESLADFRRKVISCLKDIKVSHKPNHSKAGQFHKETGRTVLCQNPDDPNSLITVYSRKILQVVKSAKDLTKLLIPETIKNEWHEDIAEHKAKQAKLVQDFELYMNTAEQILIAENEQGVAEGKKEIKITEGRILLKAFRIIQDKGLWKGDKFRCYSNSSSMINIPKHGVAYEAQNNHCIDFYQKNGKIGWEVIKRFDANQADFEPQWKKEGGKIIWSVQQGDILELDTPDEWKQYTDKERCLAKVKKFSEGKFCIDYITDARMTSPKDKTLEYMFVNSLEKGLSYYTSHKARKVELTPFGKIKKKHKVLWNGTKTAA

SEQ ID NO: 18216 - protein, 1156 aa, unidentified
  REGION 1..1156: note = Cas Enzyme sequence
MKYRLGLDLGVGSIGSAVIELDNENNAKDIIDAGVRIFEISEGAEERRLKRTARKNLVRTKKRLELLAKKLFENGLWPNENPEGTDKLKSKSPYKIRTDALNEKLASPYYVGRAILHIAKHRGAGFVSASEETEEEILEEGEKSKAKKSSYDMMLHHLKETNSKTIGEFFYNKIISGKGNDKTVRQKKYAIEKNIVDYAIPRYLVKDEFNKIWDKQVEFYPQMKKENLKKEIYDILFYERPAAPYATGKCIYFREEDRLLKAHPLSEMRRIYEEVNNIRILNDMNKRKLTLEERDSIVNELLLKGQNAGKQAIKKLLNLSAQHKISLVDDRVIKAYLYSRPEFANNEHLHNMNENELSSFIEFLAEPKMSKDKNARLYNEDALIEYLKPILKIDDEKEIGNLLTKLPKGRGMLGISATKIILEKLKEDVLTHREITDKLTETDKRFMAEEEIARQNQGKCFQLPYYGEILQTDTAPLPPLMINNNKSLNPDEIRWGKIANPAVHMILNQIRLVVNEIIKIYGKPYDINIELGRDVGMSTKKKKEFENQQKQNEKLNEEAKNYLKEHKIAINNKNILKYKLAKEQGWKDAYNPTQNISSIFTGMEIEHIIPQAKGGTDTYNNLCLVNSNDNSNKGDRYAYEYFEETKTQEEIREILKNARSRTPQKSWRFEADAREKYEESGDKEESTRYLTDTRYVAKMAQRYLRAIVDCSDCDEVMQTRILAVKGGQTAKLRQHWNLYGLEYDLMGLDIPRYVNCPPYWLELDTGEIIEGINKPDIDGKWKFFDKAKNKEWQPKPRIDHRHHAMDAITVACANRGLIQKMAEENDINKIHYPLPLTSVESLADFRRKVISCLKDIKVSHKPNHSKAGQFHKETGRTVLCQNPDAPNSLITVYSRKILQVVKSAKDLTKLLIPETIKNEWHKDIAEHKAKQAKLVQDFELYMNTAEQILIAENEQGVAEGKKEIKITEGRILLKAFRIIQDKGLWKGDKFRCYENNSSLVYIKKHGVAYEGRNNHCVDFYQKNGKIGWEVIKRFDANQADFEPQWKKEGGKIIWSVQQGDILELDTPDEWKQYTDKERCLAKVKKFSNGAVTIDFVSDARMTSPKDKNLQYMFVDSLVNRGLSYFTNNKARKIELTPFGKIKKKHKVLWNGTKTAA

SEQ ID NO: 18217 - protein, 1156 aa, unidentified
  REGION 1..1156: note = Cas Enzyme sequence
MKYRLGLDLGVGSIGSAVIELDNENNAKDIIDAGVRIFEVSEGAEERRLKRTARKNLVRTKKRLELLAKKLFENGLWPNENPEGTNKLKSKSPYKIRTDALNEKLVSPYYVGRAVLHIAKHRGAGFVSANEETEEEILEEGEKSKAKKSSYDMMLHHLKETNSKTIGEFFYNKIISGKGNDKTVRQKKYAIEKNIVDYAIPRYLVKDEFNKIWDKQAEFYPQMKKENLKKEIYDILFYERPAAPYATGKCIYFREEDRLLKAHPLSEMRRIYEEVNNIRILNDMNKRKLTLEERDSIVNELLLKGQNAGKQAIKKLLNLSAQHKISLVDDRVIKAYLYSRPEFANNEHLQNMNENELSSFIEFLAEPKMSKDKNARLYNEDALIEYLKPILKIDDEKEIGNLLTKLPKGRGMLGISATKIILEKLKEDVLTHREITDKLAETDKRFMAEEEIARQNQGKYFQLPYYGEILQTDTAPLPPLMINNNKSLNPDEIRWGKIANPAVHMILNQIRLVVNEIIKIYGKPYDINIELGRDVGMSTKKKKEFENQQKQNEKLNEEAKNYLKEHKIAINNKNILKYKLAKEQGWKDAYNPTQNISSIFTGMEIEHIIPQAKGGTDTYNNLCLVNSNDNLNKGDRYAYEYFEETKTQEEIREILKNARSRTPQKSWRFEADAREKYEESGDKEESTRYLTDTRYVAKMAQRYLRAIVDCSDCDEVMQTRILAVKGGQTAKLRQHWNLYGLEYDLMGLDIPRYVNCPPYWLELDTGEIIEGINKPDIDGKWKFFDKAKNKEWQPKPRIDHRHHAMDAITVACANRGLIQKMAEENDINKIHYPLPLTSVESLADFRRKVISCLKDIKVSHKPNHSKAGQFHKETGRTVLCQNPDDPNSLITVYSRKILQVVKSAKDLTKLLIPETIKNEWHEDIAEHKAKQAKLVQDFELYMNTAEQILIAENEQGVAEGKKEIKITEGRILLKAFRIIQDKGLWKGDKFRCYENNSSLVYIKKHGVAYEGRNNHCVDFYQKNGKIGWEVIKRFDANQADFEPQWKKEGGKIIWSVQQGDILELDTPDEWKQYTDKERCLAKVKKFSNGAVTIDFVSDARMTSPKDKNLQYMFVDSLVNRGLSYFTNNKARKIELTPFGKIKKKHKALWNGTKTAA

SEQ ID NO: 18218 - protein, 1155 aa, unidentified
  REGION 1..1155: note = Cas Enzyme sequence
MKYRLGLDLGVGSIGSAVIELDNENNAKDIIDAGVRIFEVSEGAEERRLKRTARKNLVRTKKRLELLAKKLFENGLWPNENPEGTDKLKSKSPYKIRTDALNEKLASPYYVGRAVLHIAKHRGAGFVSANEETEEEILEEGEKSKAKKSSYDMMLHHLKETNSKTIGEFFYNKIISGKGNDKTVRQKKYAIEKNIVDYAIPRYLVKDEFNKIWDKQAEFYPQMKKENLKKEIYDILFYERPAAPYATGKCIYFREEDRLLKAHPLSEMRRIYEEVNNIRILNDMNKRKLTLEERDSIVNELLLKGQNAGKQAIKKLLNLSAQHKISLVDDRVIKAYLYSRPEFANNEHLQNMNENELSSFIEFLAEPKMSKDKNARLYNEDALIEYLKPILKIDDEKEIGNLLTKLPKGRGMLGISATKIILEKLKEDVLTHREITDKLAETDKRFMAEEEIARQNQGKCFQLPYYGEILQTDTAPLPPLMINNNKSLNPDEIRWGKIANPAVHMILNQIRLVVNEIIKIYGKPYDINIELGRDVGMSTKKKKEFENQQKQNEKLNEEAKNYLKEHKIAINNKNILKYKLAKEQGWKDAYNPTQNISSIFTGMEIEHIIPQAKGGTDTYNNLCLVNSNDNLNKGDRYAYEYFEETKTQEEIREILKNARSRTPQKSWRFEADAREKYEESGDKEENTRYLTDTRYVAKMAQRYLRAIVDCSDCDEVMQTRILAVKGGQTAKLRQHWNLYGLEYDLMGLDIPRYVNCPPYWLELDTGEIIEGINKPDIDGKWKFFDKAKNKEWQPKPRIDHRHHAMDAITVACANRGLIQKMAEENDINKIHYPLPLTSVESLADFRRKVISCLKDIKVSHKPNHSKAGQFHKETGRTVLCQNPDDPNSLITVYSRKILQVVKSAKDLTKLLIPETIKNEWHEDIAEHKAKQAKLVQDFELYMNTAEQILIAENEQGVAEGKKETKITEGRILLKAFRIIQDKGLWKGDKFRCYSNSSSMINIPKHGVAYEAQNNHCIDFYQKNGKIGWEVIKRFDANQADFEPQWKKEGGKIIWSVQQGDILELDTPDEWKQYTDKERCLAKVKKFSEGKFCIDYITDARMTSPKDKTLEYMFVNSLEKGLSYYTSHKARKVELTPFGKIKKKHKVLWNGTKTAA

SEQ ID NO: 18219 - protein, 1155 aa, unidentified
  REGION 1..1155: note = Cas Enzyme sequence
MKYRLGLDLGVGSIGSAVIELDNENNAKDIIDAGVRIFEVSEGAEERRLKRTARKNLVRTKKRLELLAKKLFENGLWPNENPEGTDKLKSKSPYKIRTDALNEKLASPYYVGRAVLHIAKHRGAGFVSASEETEEEILEEGEKSKAKKSSYDMMLHHLKETNSKTIGEFFYNKIISGKGNDKTVRQKKYAIEKNIVDYAIPRYLVKDEFNKIWDKQAEFYPQMKKENLKKEIYDILFYERPAAPYATGKCIYFREEDRLLKAHPLSEMRRIYEEVNNIRILNDMNKRKLTLEERDSIVNELLLKGQNAGKQAIKKLLNLSAQHKISLVDDRVIKAYLYSRPEFANNEHLQNMNENELSSFIEFLAEPKMSKDKNARLYNEDALIEYLKPILKIDDEKEIGNLLTKLPKGRGMLGISATKIILEKLKEDVLTHREITDKLAETDKRFMAEEEIARQNQGKCFQLPYYGEILQTDTAPLPPLMINNNKSLNPDEIRWGKIANPAVHMILNQIRLVVNEIIKIYGKPYDINIELGRDVGMSTKKKKEFENQQKQNEKLNEEAKNYLKEHKIAINNKNILKYKLAKEQGWKDAYNPTQNISSIFTGMEIEHIIPQAKGGTDTYNNLCLVNNNDNLNKGDRYAYEYFEETKTQEEIREILKNARSRTPQKSWRFEADAREKYEESGDKEESTRYLTDTRYVAKMAQRYLRAIVDCSDCDEVMQTRILAVKGGQTAKLRQHWNLYGLEYDLMGLDIPRYVNCPPYWLELDTGEIIEGINKPDIDGKWKFFDKAKNKEWQPKPRIDHRHHAMDAITVACANRGLIQKMAEENDINKIHYPLPLTSVESLADFRRKVISCLKDIKVSHKPNHSKAGQFHKETGRTVLCQNPDDPNSLITVYSRKILQVVKSAKDLTKLLIPETIKNEWHEDIAEHKAKQAKLVQDFELYMNTAEQILIAENEQGVAEGKKETKITEGRILLKAFRIIQDKGLWKGDKFRCYSNSSSMINIPKHGVAYEAQNNHCIDFYQKNGKIGWEVIKRFDANQADFEPQWKKEGGKIIWSVQQGDILELDTPDEWKQYTDKERCLAKVKKFSEGKFCIDYITDARMTSPKDKTLEYMFVNSLEKGLSYYTSHKARKVELTPFGKIKKKHKVLWNGTKTAA

SEQ ID NO: 18220 - protein, 1156 aa, unidentified
  REGION 1..1156: note = Cas Enzyme sequence
MKYRLGLDLGVGSIGSAVIELDNENNAKDIIDAGVRIFEVSEGAEERRLKRTARKNLVRTKKRLELLAKKLFENGLWPNENPEGTDKLKSKSPYKIRTDALNEKLASPYYVGRAVLHIAKHRGAGFVSASEETEEEILEEGEKSKAKKSSYDMMLHHLKETNSKTIGEFFYNKIISGKGNDKTVRQKKYAIEKNIVDYAIPRYLVKDEFNKIWDKQAEFYPQMKKENLKKEIYDILFYERPAAPYATGKCIYFREEDRLLKAHPLSEMRRIYEEVNNIRILNDMNKRKLTLEERDSIVNELLLKGQNAGKQAIKKLLNLSAQHKISLVDDRVIKAYLYSRPEFANNEHLHNMNENELSSFIEFLAEPKMSKDKNARLYNEDALIEYLKPILKIDDEKEIGNLLTKLPKGRGMLGISATKIILEKLKEDVLTHREITDKLAETDKRFMAEEEIARQNQGKCFQLPYYGEILQTDTAPLPPLMINNNKSLNPDEIRWGKIANPAVHMILNQIRLVVNEIIKIYGKPYDINIELGRDVGMSTKKKKEFENQQKQNEKLTEEAKNYLKEHKIAINNKNILKYKLAKEQGWKDAYNPTQNISSIFTGMEIEHIIPQAKGGTDTYNNLCLVNSNDNLNKGNRYAYEYFEETKTQEEIREILKNARSRTPQKSWRFEADAREKYEESGDKEESTRYLTDTRYVAKMAQRYLRAIVDCSDCDEVMQTRILAVKGGQTAKLRQHWNLYGLEYDLMGLDIPRYVNCPPYWLELDTGEIIEGINKPDIDGKWKFFDKAKNKEWQPKPRIDHRHHAMDAITVACANRGLIQKMAEENDINKIHYPLPLTSVESLADFRRKVISCLKDIKVSHKPNHSKAGQFHKETGRTVLCQNPDDPNSLITVYSRKILQVVKSAKDLTKLLIPETIKNEWHEDIAEHKAKQAKLVQDFELYMNTAEQILIAENEQGVAEGKKEIKITEGRILLKAFRIIQDKGLWKGDKFRCYENNSYLVYIKKHCVAYEGRNNHCVDFYQKNGKIGWEVIKRFDANQADFEPQWKKEGGKIIWSVQQGDILELDTPDEWKQYTDKERCLAKVKKFSNGAVTIDFVSDARMTSPKDKNLQYMFVDSLVNRGLSYFTNNKARKIELTPFGKIKKKHKALWNGTKTAA

SEQ ID NO: 18221 - protein, 1156 aa, unidentified
  REGION 1..1156: note = Cas Enzyme sequence
MKYRLGLDLGVGSIGSAVIELDNENNAKDIIDAGVRIFEVSEGAEERRLKRTARKNLVRTKKRLELLAKKLFENGLWPNENPEGTDKLKSKSPYKIRTDALNEKLASPYYVGRGAVLHIAKHRGAGFVSASEETEEEILEEGEKSKAKKSSYDMMLHHLKETNSKTIGEFFYNKIISGKGNDKTVRQKKYAIEKNIVDYAIPRYLVKDEFNKIWDKQAEFYPQMKKENLKKEIYDILFYERPAAPYATGKCIYFREEDRLLKAHPLSEMRRIYEEVNNIRILNDMNKRKLTLEERDSIVNELLLKGQNAGKQAIKKLLNLSAQHKISLVDDRVIKAYLYSRPEFANNEHLQNMNENELSSFIEFLAEPKMSKDKNARLYNEDALIEYLKPILKIDDEKEIGNLLTKLPKGRGMLGISATKIILEKLKEDVLTHREITDKLAETDKRFMAEEEIARQNQGKCFQLPYYGEILQTDTAPLPPLMINNNKSLNPDEIRWGKIANPAVHMILNQIRLVVNEIIKIYGKPYDINIELGRDVGMSTKKKKEFENQQKQNEKLNEEAKNYLKEHKIAINNKNILKYKLAKEQGWKDAYNPTQNISSIFTGMEIEHIIPQAKGGTDTYNNLCLVNSNDNSNKGDRYAYEYFEETKTQEEIREILKNARSRTPQKSWRFEADAREKYEESGDKEENTRYLTDTRYVAKMAQRYLRAIVDCSDCDEVMQTRILAVKGGQTAKLRQHWNLYGLEYDLMGLDIPRYVNCPPYWLELDTGEIIEGINKPDIDGKWKFFDKAKNKEWQPKPRIDHRHHAMDAITVACANRGLIQKMAEENDINKIHYPLPLTSVESLADFRRKVISCLKDIKVSHKPNHSKAGQFHKETGRTVLCQNPDDPNSLITVYSRKILQVVKSAKDLTKLLIPETIKNEWHEDIAEHKAKQAKLVQDFELYMNTAEQILIAENEQGVAEGKKETKITEGRILLKAFRIIQDKGLWKGDKFRCYSNSSSMINIPKHGVAYEAQNNHCIDFYQKNGKIGWEVIKRFDANQADFEPQWKKEGGKIIWSVQQGDILELDTPDEWKQYTDKERCLAKVKKFSEGKFCIDYITDARMTSPKDKTLEYMFVNSLEKGLSYYTSHKARKVELTPFGKIKKKHKVLWNGTKTAA

SEQ ID NO: 18222 - protein, 1156 aa, unidentified
  REGION 1..1156: note = Cas Enzyme sequence
MKYRLGLDLGVGSIGSAVIELDNENNAKDIIDAGVRIFEISEGAEERRLKRTARKNLVRTKKRLELLAKKLFENGLWPNENPEGTDKLKSKSPYKIRTDALNEKLASPYYVGRAILHIAKHRGAGFVSASEETEEEILEEGEKSKAKKSSYDMMQHHLKETNSRTIGEFFYNKIISGKGNDKTVRQKKYAIEKNIVDYAIPRYLVKDEFNKIWDKQAEFYPQMKKENLKKEIYDILFYERPAAPYATGKCIYFREEDRLLKAHPLSEMRRIYEEVNNIRILNDMNKRKLTLEERDSIVNKLLLKGQNAGKQAIKKLLNLSAQHKISLVDDRVIKAYLYSRPEFANNKHLQNMNENELSSFIEFLAEPKMSKDKNARLYNEDALIEYLKPILKIDDEKEIGNLLTKLPKGRGMLGISATKIILEKLKEDVVTHREITDKLAETDKRFMAEEEIARQNQGKCFQLPYYGEILQTDTAPLPPLMINNNKSLNPDEIKWGKIANPAVHMILNQIRQVVNEIIKIYGKPYDINIELGRDVGMSTKKKKEFENRQKQNEKLNEEAKNYLKEHKIAINNKNILKYKLAKEQGWKDAYNPTQNISSVFTGMEIEHIIPQAKGGTDTYNNLCLVNCNDNLNKSDRYAYEYFEETKTQEEIREILKNARSRTPEKSWRFEADAREKYEESGDKEESTRYLTDTRYVAKMAQRYLRAIVNCSDCDEVMQTRILAVKGGQTAKLRQHWNLYGLEYDLMGLDIPRYVDCSPYWLELDTGEITEGINKPDIDGKWKFFDKAKNKEWQPKPRIDHRHHAMDAITVACANRGLIQKMAEENDINKIHYPLPLTSVKSVADFRRKVISCLKDVKVSHKPNHSKAGQFHKETGRTVLCQNPDDPNSLITVYSRKILQVVKSAKDLTKLLIPETIKNEWHEDIAEHKVKQAKLVQDFELYMNTAEQILIAENEQGMAEGKKEIKITEGRILLKAFRIIQDKGLWKGDKFRCYSNSSSMINIPKHGVAYEAQNNHCVDFYQKNGKIGWEVIKRFDVNQTDFEPQWKKEGGKIIWSVQQGDILELDTPEEWQTYTDKERCLAKVKKFSDGKIAIDFITDARMTSPKNKELKYMFVNTISDKGLTYLINHKTRKVELTPFGKIKKKHKVLWNGTKTAA

SEQ ID NO: 18223 - protein, 996 aa, unidentified
  REGION 1..996: note = Cas Enzyme sequence
MRRRVFGFDLGIASIGWAVVDFDNEYYDMETGEILADKAKGSVEIAQGKIIDCGVRCFPVAENPKDGSSLAAARREKRLARRACRRKARRKEGLRGLFVAKGLVANSEEFTEEICKNQFGGDVWDLRVKALHEKLSKEELLRVLYHLAKHRGFKSARKAQEEKDKDSGKVLSAIRVNMALKEEGKSLAQIIVEKAGVNGKKRNFTVSVKKGKNEKEVEADYRNSIPRSEILAELNMIFAEQKEYGIFTQDLYDDFIRIAFRQRGIKSVGDMVGRCTFEKDEKRAPKEAPTSEFFVAWSKINNLAVYEDDEKRFLTTEERQLLFELLKKTKEIKYKAISAKIFKDKNIQFACLKYGSKSEIDDNREEKNADPENAVFYSMKGWYKLQSAFKALPHIFDDIEKLDKAVTIIAEEKEDREIKEKLENLGYSQEIIAQFLTLTFDTFINLSLKALYKINPYLEKGEKYDKACASAGYDFKEISEKLVEKKGKLLPVIDKDKQTKVPVVNRTVAQFRKVYNALARKYGTPDQINLETGRELKKSFEERREISKRQEENRNKNQSAVTQIEEKGYKATGTNILKWLLYLEQDCKCIYSGKPMDINRLFEVGYVEIDHILPYSRSFDNSYSNKVLVLSTENQEKGNRTPFEYIGKNNAGSEKWMEFIGRVSSHVNLHRSKKEKLLNETFNERELEFRERNANDNSYIALYVKRYLEDGIDFSESLHTNIKNKVQVRSGNVTAFLRHQWGLEKNRTESDKHHAQDAIVIACATQSMVQALSKISRKEGLVHREHVHKKYVMAKPWGNFREDVLIALDKVFVSRPPRKKATGGLHGETIYTLNEKKKQFEAKNVKSGFYVRGGIAGNSDMLRTDVFCKKNKKGKNEFYLVPIYKSDLGKNLPNKAIVAGKGEDEWIVIDESFTFMFSLFMDDLVKVQKGETVYFGYYKGVHRGTAGITIEEHDRSRKYEGVGSKKLDSIKKYQVNLLSNYFEVKGEKRQLLTHKK

SEQ ID NO: 18224 - protein, 996 aa, unidentified; identical to SEQ ID NO: 18223
  REGION 1..996: note = Cas Enzyme sequence

SEQ ID NO: 18225 - protein, 1028 aa, unidentified
  REGION 1..1028: note = Cas Enzyme sequence
MKHILGLDIGISSVGFSLINHESKTIEIMGAHLFDAAEDAKTGASLAEPRREAKGIRRVINRRSMRKKALLKFLENVHFSDLDKVKSPHSLSPWALRSEGLHRKLSDLEFARALYHIAKHRGFKSNRKESKKSNDEESKMKEGLNKLEKAFEASGKETIGAYLNDCEKKRNSQGEYSHTVKRERIESEIGILFEKQKTLGNIKATEAIKEEAKKIILFQRPLKSVTDMRGFCTHLSEEKRAAKFSFSAELFLFYSKINNLKLQKKDGEAFLITTEMKEKILEEGLSKSSPITYTKIRKLWTIEEDFLFNHVKYFKSKKKKSHSTEEDNHKEADEKAFKLSDYEKEKFFDFKGYHTLRQAIEKEDKLLWEKLKENQEILDFIAEIVSFNFDEKEIKEALKEKLQEVPEAILNNLADIDTFSKTINLSIKAVNILLPDLKKGKRYDEAVAEAKSSGKFKEKEKQKTNHKLPRLEKTNNPVVDRAVSQARKIINAIIERYGKPDSIHIELARDIGKSKASRDKIEKTQAQNRNDNESIKKEIREEHGFEPKRDDVIKYKLWEEQQGFCAYSQEYIKPQILFDGTSTEVDHIVPFSRSYDDSYTNKVLVFTQYNRDKGDQTPYEKWGQTLEWEKFEVFAKRLSIPKQKKYLLKEFKEEDWKERNLNDTRYMACYLKEHIKNNLPVKVSTISGGITSFLRHGWGLGSKDREKDHKHHAVDATIIACATPSMVKKVTSFNKRKEWESWRKKGESTPKPHMPPPWESFRKDVKDKEESIHVSRLPDRKMQGEAHKQTIKSFRKENPEGKQIIKRINLSSVTLTTLESMVDKERNKKLYDLLKEKLESNDDNAKKAFSSPIYMPRNNGTKGPQVKGIRIYDDSKSGLEIRGGHADNGEMIRIDVFSKANKKGHLDYYICPVYVMDFLKGELPNKVFDKKEFVEITPEHTFKFSLYKNDFVKLEKNNGEAIEGYYRGFDRATGNIDIIEHNKEEPKRGNGVKTLKSFNKYHVNYFGERFLIKKEKRLGFNHKKIMKD

SEQ ID NO: 18226 - protein, 1008 aa, unidentified
  REGION 1..1008: note = Cas Enzyme sequence
MKKTLGLNIGTASIGFSVIDEKSSKIDAIGVHLFELSENAAGASLASIRRQKINGRILLKRRASRMENILKYLKEASFECAEDVKKHHSESPWVLRKEGLERLLTDIEFSRVIYHLAKHRGFQSNRKSHIKTTEDQVINAAIQKIEDNFERSGLETIGAYLCGLERQRNSSYTYSYTVTRQMVLDEVNILFEQQRAFGNDKATEKLQEQVWQEIKFQRPLQSVAKLVGSCTYFPEEKRAPKCSLSAEMFLFYSKLNNLKILKENGTLVPITSNMRQMLWEEALKYKEIKYSKIRKLWKLDDDVFFNLVFYNNKKEVHDSLEKIKSYTEQKEVFCKFHGYYTLKNIFEENIWETLKEQRSVIDHIVRIVSFEFDEKTIIQKLWKIPLLKTLNEETIKKIAQIDSLGQTINLSFKAVSLLLPLLIKGKRYDEAVKEAEKKGLFPVEEPGNQNKLAPFGKTNNAIVDRALAQTRKVMNACIRRFGMPNVVQIEIARDLGKSKKERIFILKEQQKNRAKNENAKRQIKEEFKIDSPAHDDILRYKLWCEQDKRCAYSGEYIAPHDLFTSIVQVDYILPYSRSWDNSYMNKVLCFARQNQEKANFTPFEKWGQDKEKWSQLEKMAMNFPLAKRHNFLLEVFDEEEWKNRSLNDTRYITKYFQKQLEKQLPSIKIICVKSAITNTLRHRWGFGEKDRETDTRHYGVDAVVVACAKRKFIEKITEFYKEARKDNLSESNGHKYRTPQPWNGFRNDVLQMKENLFVSRMPRRSLNGEGHAETIKSYRKETEKVVKRIKLSTLKNADIFEALVDKELNHNFYKLLKERVDEYAGDIKKAFSVPLFRPNQKHPITSIRVYDNSKTYNFIRNGCADNAEIVRVDVFSKKNHRDVLQYYLCPLYVKDLLSQTLPDKVCVPYKNEDEWLIINDAYKFEFSLYKNDLFEIEEKNGNKLLLYYRSMNRVLATIIGVEHFHAMQNLTIKGVKTLKSFKKYSVNYFGERFEVTAEKRLDFSLRKN

SEQ ID NO: 18227 - protein, 1086 aa, unidentified
  REGION 1..1086: note = Cas Enzyme sequence
MSYGLGIDCGIASVGSGTVLLNEKEEPYKIDFMCVRTFDKAETGTGKSLAAERRSFRGSRRTHRRKTHRKDRIKKLICDTMNVDFKYIQSIYERKNLSDIYEIRYEALNRKLTKDEFIRLLIHLSQRRGFKSNRKIDAKNKNSDDGKMLKEIEKNKSIFTDNGYRTIGEMLFKNEKFIQRKRNKSDYSMTFLRVDYENEIKVIFNQQRKFNNQHATESFENEYLKIYLSQRNFDDGPDESSPYGGNLIGKMVKNCTFEPTLKAAPKASYSFEYSNLLTKVNSMKILYNGNRRPLTKEEREKVVTLAFKKNKITYSSIRTELGLSNEEFFNISYNSKDYTETEKKTKFSYLTAYYEFKKAYGSSYLEWSVEKKNTLATILTLHKNDSKIIEEMKEKNFLEDEINVALTIPSFTKFGNLSIAVLNKMIPYLEDGMLYNEAITALGYNFKDDDKCQQMYLPSNPKDAPELDEIRNPVVRRTVSQTIKVINSIIREKGESPTYINIELARELAKSYKERKNIESNQKSNREKNEKSFEELKKLGVVKPTAFDLVKYKLWKEQDGICVYSQKPLNIEKLFSEGYAEVDHIVPYSISFDDSYSNKVLVHTNENQNKGNRIPLNYLSGKERDEFIVWVKNSHLSFRKKQNLLKEKISEDDFDGFKNRNLKDTQYLSRFLLKFIKKYLKFAPSSTNRKETVIAVNGAITSYIRKRWGIEKIRANGDAHHATDAIVIACVTKSMIKRISEYSKYKETLYIKNNNETLDVDKITGEVKNYFPMPYKWFRTELDIRCSKNPERLLASNPIPTYARDEKVKPIFVSRMVNRKVTGPAHQDTLRRMVVENGQKYEVVKTDLNKLSLDNNNEIANYYNPDDDRLLYDALKNHLIKFKEMHKEENGKKKVEDAFTEPFYKPKSDGSKGPLVKSVKIIKKITSSVTLNNNTTIAKNGDMIRTDVFRTEDGYYLVPIYVADTVKNELPNKAIVQGGEWKAMNDEDFLFSLYRNDLIKIKSNSDVTFSLMNESSSLPKTESLREEFVYFKGTSINTASIRVVTHDNCYIKKSLGVKNLQSLEKYQVDVLGNVSKVKKEKRMGFR

SEQ ID NO: 18228 - protein, 1357 aa, unidentified
  REGION 1..1357: note = Cas Enzyme sequence
MEQILGLDLGTNSIGWAVVERENKEFRLVKKGVRIFQEGVKIEKGIESSKAAERTEHRSSRRLKFRRKLRKIETLKVLSEHGFCPRLTLEQLIDWRYKKIYPANIAFRDWLRTDINTSKDERQRQIRNPYYYRNLAVTCKLNLNSEEDRYKIGRAFYHIAQRRGFISNRLEGTKESDGAVKESISELNVAKGDKTLGQYFYSNYCNNEKIRNVYTHREEHYLQEFNTICEYQNIPGEIKEKLYKAIFYQRPLKSQKGLIGKCVFEADKQRCSASHPKFEEYRMLCFINNIKIKTPNDDKLRFLNEDERGKIKPLFFRKSKEVFDFEDIAKAVSPKKRYKFFKSPNTEPGDFLFNFSMKTAVSGNPVSSRLKELFGDSFMDVEFEYTREKDGKQSVIDINDIWHVVYTFDSSDKLKEFGGKRLGLNDEQAESFVKIHPKREYSSLSLKAINKILPYLREGLIYSHAVFLANMEQIIPDFVWNDPQNKKIISEGIKRIIETQNEEKIIIDVINGLIKNARYKSYVWSDEAKGIYKKDLFGEIRSQLGEKKYSSFSVAEKQYIEKNSLGLFEEQMNKNMGRGEFLQSKRIEDRVKSFLSDNFDIDDSRLQLLYHPSAIEVYKPPYRAEDGKYYLGSPMITSVRNPMAMRSLHQLRKLINELIRNEIIDKDTKINIEMARNLMNSNERKAYQEWQRDRENLRKTYYNRIKEYYAYSGSNAEPSQDDILKYQLWEEQNHKCIYTGKEIAVSQFLGANPSYDIEHTIPRSQSFDNSQVNKTLCNNVFNRDIKKNKIPFELKNHEEILARVEHWKNKYEDLEKQIQNTVKQARGNIDKQKKDRIIQKRHRLRFERYYYYNKYRRFVMEDVPEGFKNSQIVDTGIITKYARLYLKTLFSNVYTVKGNTVADFRVLWGLNKEYIKKERVNHIHHCIDAVTIACITKESYENLAKFYHEWEYLEKAGMERKPKVNKPWSTFVEDIKDLEKEVLVSHYTPDVFPKQTKKKLRKKSIVKKNKDGVPIYQRGDTVRGSLHQETFYGAIEQEIQNKEGEKEKQIKYVVRKPLDDLDNNGIEKIVDDRVRNIIINARKKEKELRVDLEDLRKQMNNAEEYEERDIQREIEKIENDIKKLYCLPNKNGNPVPIRKVRVYTPMLTNPIHLKEHRDKSMKRRYPHKEQYHVANDGNYMIAIYEGKNEKGKTKRDFEIVNNLEAGEYFKLSVQREFKPKGVGKYEGLISALKENEDIQMPLKGILKIGTMIILWEDNPEEVWEIEQEEISKRLYKVIGLSNQRIKSKAGKINEYATIVLRFHQESRPSSELKVQDGVFVRNEDYKAQRKLNHNQFNALIEGLNFEISTLGEIKRMD

SEQ ID NO: 18229 - protein, 1373 aa, unidentified
  REGION 1..1373: note = Cas Enzyme sequence
MAKNQNFKNYVGDYFIGLDIGTNSVGWAVVDDKMNLLKFNGKLTWGSRLFDEAKSAQDRRTKRNMRRRLVRRRVRIQLLRELMEPMIDDKDFFVRLDDSFFLREDRKLKNKWNIFNDVDYNDSDFYAEYPTIYHLRNALIKNENQKFDPRLIYLAVHHIMKYRGNFLFPNLSMDGDDGLEEKFQEILDAFKEDGFEYKFEQTNKEVLEILLDNDKNATQKIKELTYEDNKEFLKLILGQKVDLNKVFDGHDFEDNKNLKLNDSAATENIGKIQSPDIQNRLMSCYELFNMLVFKKVMKDTNYISELMIKRYDKYKNDLVQLKRILKANMPVADFESYFRALTGKGNEHNYAHYTERGGACKYEDFKTELKKILLNIKANTTDLALQDEITQIDNELTEDIYLRKLKTSENTAFPMQVNIFELKKILNNQEKFYPYIAEIKDKIIKIFEFRIDYFVGPLSTKADGSFGWIERNPGYENVTINALNYKDAVDFEASQEKFIKRMTRDCTYILGEKALPKNSIYYVAFNLLNELNNIRFTDANGYKPLSASTREKVFAHLINYKNTISRKELAHYIGMETDGKFDPSCIKMSGVDKLNSNLKSIRDFVNILGDVNLSNIAMIEDIIEWITILGESKDTLERKIRRYYGHLLTDTQIKQIRSLNYAGWGRLSRKLIHGITIQLGGTNKTILELMQEPGKSGWYGNFNHFYSRYGFKDRVEKLNIDNTQQTISERIKDLAGSPAIKRGINQAYKIVDELVSIFKRPPARIFVEFARDEQEKGDKGRKSDRKQQIVDKYKGIDANYRYILNSMEEQAHDILKQKDNEKEFDRDKFFLYYLQAGRCAYTGEQLYLDELDQYHIDHIVPQSLIKDDSLDNRVLVTSYANEKKGWEDTVPDVFREKMKGTWAVWRACGLLTAEKYSRLTKPTLSDEDKKRFINRQLVETRQITLNTCAILQTYFEKKFGKGKDGNPVVEIKPVRAKLTSQFRDMFGYYKGLGGREINDFHHAKDAYIAVFLGEYLAQNFANLSENFDILHYQKKSTKQPRGYGFVLNTLLIDDEKWGSMDLYNDEAMANFDRNYYYTNILWTKKTIKDPEGAFYDETVYKSVKNQEKFFGKIQDNDLITLGKKGKTEFIDAEIYGGHKSRNPYSFALIKGIKNNKSQKPIIKFVMLPKYYLSGNDKVELDKFIADKFNIKDYTVLALMPKYQMYKMNGCRCFITGLRYSAQARQLVFGRENKELYEFIYHIYKNDNFKTLKIQESEDRETKIDEYVTRNYEKFKNIYLDHMDKCYYPDKVGFTQKIVENFDKYSDTRENKIFAIKELLKNTKCSSSMSKVIDLSLPNQFSIDAEGEDTYIIDQSITGLFEHCTKVLDLGKQV

SEQ ID NO: 18230 - protein, 1431 aa, unidentified
  REGION 1..1431: note = Cas Enzyme sequence
MKTKNILGLDLGTTSIGFAHVIEGEKPENSSINMLGVRIIPLSIDEQTNFEKGKSVSINADRTLKRGARRILNRYKDRRKNLIEVLRKANVISEETVLTEDGKNTTHETWGLRAKAVLERVEKDQIARMLLAINKKRGYKSSRKSKNEDEGKAIDGMTIAKQLYEQNLTPGQLVYQHLKDGKKYIPDFYRSDLQREFDTVWECQSKFYPEIFNNEFYQELLGKGLRGTSSSFWAKYKFNTAENKGTREEKLIRAYEWRSKAITDKLNKEEAAYVISEINSNINNSSGYLGSISDRSKELYFNKETVGQYLYKQLKQNPHTKLKNQVFYRQDYLDEFEAIWKEQSKHHSELTAVLKTEIRDIIIFYQRRLKSQKDLISLCEFEKKQIQIKKEGKIVETTVGMKVTPKSSPLFQEFKIWQTLNNCLLKRKRKSKNKLSAEIIQNSETEITLDLTAKQVLFDELNVKGNIKSDVAIKLLGYETSEWELNYPELEGNNTNKVLLQAYLEILEIEGYDTKDILKIKQSKDEIDLSKIDVSANEIKRIVREIFNSLNIKTQILEFDSELKNKEFEQQLSYQLWHLLYSYEGDNSVSGNDKLYKALEDKFGFKKEHAQILANIVLQDDYGSLSTKAIRKIFPFIKENKYSEACALAGYKHSAESLTKEEINSRPLKPKLEILKKNSLRNPVVEKILNQMINVVNTLIEVNSKKDEGGEIIKPFHFDEIRIELARELKKSAKERSEMSANIGAAKIQHEKIVKLLQSEFGVKNPSRNDIIRYKLYEELKNNGYKDLYTDTYIPREILFSKQIDIDHIIPQARLFDDSFSNKTVIYRKDNLKKSNRTAFDYIESEYGKSKAEEFLQRIEKLFEVNKKNNIEGIGKAKFLKLQKRESEIGDGFIERDLRDTQYIAKQAKKMLLEITRSVLSTTGSITERLREDWGLVNLMQELNFDKFKKLGLTEKVEKKDGTFKERIIDWNKRNDHRHHAMDALTVAFTKHSHIQYLNNLNARYYESHKEYKNIKHIEEKETHVVKDDSGSNKRVFNLPIPNFRVLAKEQLENVLVSHKAKNKVVTKNKNKIPTSKGVKIKTELTPRGQLHKETVYGKYFYPVQKEEKVSAKFDLENINKVSNPTYKMHLLTRFNENGNDPKKAFSGKNSLSKNPIYLDEKKSEIMPEIVTLSWLESDYSIRKDVTPENFKDDKTIEKVLDAKVRQILSDRFKEFGNDPKKAFSDLDKNPIWLNRDKGISIKRVTISGVSNAQPLHVKKDHFGKEILDKNGNAIPVDFVSTGNNHHVAIYKDEKGILQERVVSFFDAVELINAGLPVKDTEFNKNLGWQFMFTMKQNEYFVFPNEKTGFNPKEINLLDSKNYKQISPNLFRVQKIATKNYMFRHHLETNVNEIKELVNIAYVNIRSTPPLVGIVKVQINHIGQIVKVGEY

SEQ ID NO: 18231 - protein, 1169 aa, unidentified
  REGION 1..1169: note = Cas Enzyme sequence
MNRENTQVCASRKTIWSFDLGKASIGEAVRDLKDDSFPHAESLLIPHEFAETQSAASRRRMWRTRIAHHAREDWLASIVRIAGFEPLRGRQMEKTAEGWRQVPESAEEKKRRAMLEREFPAKGDETQYNSAALRILLLEGKAKLEEWQIYKALRSAIQKRGYGRVPWSNREEKRGGKSEAEIEKEMATKDPSYRAAIEAWPKFKQETPPDFHSPCYYDASHMGLWDAANPSVVKLRQDHHAASTRRVRFDRLDVEREIARLAEAAAAEWPALRGAFERIRAEGWRYVERATKRERTLPVVAETLGEFLVHGPAGAPSAEALADFHRYLEQRRARGIRPGTEDDWQAATGQKTPRFDNRIVEPCALLDDLRVCSVAVRPDPKTKAAQPDSLLYAEVTFLMKLKNTRVQAAGGQRALTVEEVRQILDVVKKEACAVPVDAKNFGRKVAACYALRKANWGRHKQIKSLALRPMPGHEEIKSPKTEGRSRFSRPALKLIRALLLSGQKPSVFRARLLAREKALLDELDLDVLNAPPMRHVNGATVYVKQPRPWILVKHLKFLEDLASESDTWEKIHVPEQRLDALEARHTTDGHLDREAAVRELIGSINDPIVRHRLGVFTDRLRDLEKEFGTPEQIVLEFVREDFMGAKAKMDLFKFQNEREKTRKKAREQAATAGASGKMAGLKFELYEAQGCACLYCGQSFDYTSLDDYRIEHVVPRAQNGPDAVVNYVLAHEKCNDDKGDRTPYQWLYGSEGWDAYVRRVTACGTALRNKKVQLLTREDAQELVQRYTALAETAWISRLAQKIAGLWFGWRNGNDDAGEKRIVVIAGGLTARIRRRYRLNTLLNPAPADCTDPVAWEESAEKNRDDDRHHALDAMVINFLPQWTRNAKKEHFFRFPAAIHTNAKAFFEKRLAAVTPRRIVRERAAMEETFYGKRQLLGQAFMVKRRPLFDLATKEEKGKVKIKPRKDIKTQKIVDGAVRRVVEEFLETKDELTLEAWTAFCVQARRGANGPRIVQALMTETEPGAVDEYGNFAKAGGSARGQYRRAASHAGYFILTRLAPTAKEPEKKRIQVRPVFAFQSEKDVRALLCSEPGVAIVDYFWSNCQVLIRQEWELKGEVYPAGEYTLKTLWVQGNAVLKHGGCGTIGAKPKHNAPIPLRTLVDAGIKRVK

SEQ ID NO: 18232 - protein, 1227 aa, unidentified
  REGION 1..1227: note = Cas Enzyme sequence
VLPLPLSASLPEPKYVIPRARHPFIGALPRCVRATETCARQSVVRPALLSVNPYEEHGMKKTAPPVGSLPTTIWSFDLGKASIGEAVRDLRDDSFLHAESLLIPFEFAETQSAASRRRMWRTRIAHHAREDWLAGIMKLAGFESLQGRRMEKTAEGWRQVPESAEEKKRRAMLEREFPAKGDETQYNSAVLRILLLEGKVKLEEWQVYKALRSAIQKRGYGRVPWSNRDEKRGGKSDEEMEKEMAKKDPGYRAAIEAWPKFKQQTPAEFHSPCYYDASHMGLWSAANPGVVKLRQDHHAASTRRVRFDREDVNKEIARLMEAAAAEWPALRGAFERIRSEGWRYTEHTTKRERTLPVVAETLGEFLVHGPAGAPSAEALSDFHRYLEERRARGIRPGTEDDWQAATGQKTPRFDNRIVEPCALLDGLRVCNVAVRLDPKTKAAQPNSLLYSEVTFLMKLKNTRVQPREGHPALSVEEIRHILEAVREDARCIPPDAKDYGKKVAASYALSKADWGKHKQIKPLALRPMAGQEEIKAPKMEGRSRFSRPALKLIRALVLSGQKPSVFRARLLAREKALLDELRLDVLDVPPVREVNGATVYVEQPRPWILVKHLKFLEDLAGESDTWERIHIPEQRLDALEARHTSDGHLDREAAVRELIGSINDPIVRHRLGVFTDRLRELEGKFGTPEQIVLEFVREDFMGAKAKLDLFKFQNERERKRKDAREKAALAGASGKMAGLKFELYEAQNCTCLYCGENFTYTSLDDYRIEHIVPRAQNGPDAVVNYVLAHESCNDDKDDRTPYQWLHGREGWDAYVKRVTACGTNLRNKKVQLLTREDAAELVQRYTALAETAWISRLAQKISGLWFGWRNGNDDAGEKRIVVIAGGLTARIRRRYRLNTLLNPAPADCTDPVAWEETAEKNRDDDRHHALDAMVINFLPQWTRNAKKEHFFRFPAAIHANAKAFFEKRLAAVTPRRIVRERAPMEETFYGKRQILGQVFMVKRRALFDLATKEEKGKVKIKPRKDIETKKIVDDAIRRVVEEFLETQEELTLEAWAAFCRQARRGASGPRIIQISMTETRAGAVDEYGNFAKAGDSARGQYRRGASHAGYFILTRPAPTAKEPEKKKIEVRPVFAFQSEKDVRALLCSEPGVAIIDYFWSNCQVLIREEWEFKGEVFPAGEYTLKTLWAQGNAVLKHGGRGMIGSKPKHNAPVPLRALVDAGIKRVK

SEQ ID NO: 18233 - protein, 1008 aa, unidentified
  REGION 1..1008: note = Cas Enzyme sequence
MKKRVFGFDVGISSLGWAVVDIDDDKDPEKQEEITGEIIAAGVRTFPKAENRKDGKSLAMPRRQKRLARRVCRRKALRKKDLKKLFVEKGLVGETDFVRKNVPLADVWDLRVQGLSRRLSGEELARVLLHLAKHRGFKSYRKAQEKEEEGGKVLEALSKNKALLSENENKTLAQIFVERGGKKRNFCREVIKNGRKETEACFDNLFTREEIIREAGLIFERQRAFGSEFASPEFEEAFREIAFRHREIQGVAKMLGDCPFEKGEKRAPKEAPSAEFFVAFGKINSMSVLEGGRKRFLTAGERGALFDLLKARKKVTYRDIRQKVFNSPSQDDFRFSDVEYNPRPKYNKKTKELIVNKKAPEEKEFYSLKGYHALKGLIGEAYDIPTQDKIVSVIAIQKNDKNIEGQLKELGIHPDDIEKLKGVSFSKFINLSLKAVYRLLPEMEAGKKYNEACEAVGYDFKSTGEPFSREKGRFLPPIPQNLLTRVPVVNRAVSQFRKVYNAMVRAYGTPDQINVEMGRDIYNNAQDRKKIQKAQKEFRELKDAARRNAEERLGVGNVSAKVLLKFRLYEEQDGKSVYSGRSIDLHRLANEPDYCDVDHIIPYSRCLDDSLNNKVLCFSSENREKSNRTPLEYLPAESRADFIGRVMSMKGIKSAKRDRLLIENFSAKEAEFRERNINDTRYMAKYLIKYLDDCIDFSGCSTVLKDRVQSRSGGLTDFLRHQWGLKKDRSENDLHHAQDAIVIACATNGYTKYLAHLSKIFENKQRYAEKYGEAWYKAFKRHLKAPWDGFYEDVQKALAKIFVSRPPRKNATGEIHEARIYTLKPASGKFKEENVKSGFKIRGGIAGNGEMLRVDVFSKKNKRGKEQYYLVPVYLKDMAAKVLPNKAVVVGKPEEEWLEMDESYTFKFSLFPDDLCFVQKGEKKILGYYNGTDRSTAAISLEGHDRSFMKRGIGVKTLDTIRKFQVDPLGRCVEVKSEKRLPLKPKSAEQRRQDRWKNDFYKKHPETK

SEQ ID NO: 18234 - protein, 1109 aa, unidentified
  REGION 1..1109: note = Cas Enzyme sequence
MGKLVLGLDIGITSVGYGVIDIDNNKFVDYGVRLFKEGDSNDNEKRRSYRSGRRLRRRKKNRLDDMKSLLLSAGILTKDYKPLNNIYEIRVKGLTEKLTNNELAAALLHITKNRGTTVEALETADADKEAAGTKDVLAKNAKDLEQFEYVCKVQLYRLEKYGNIRGTENNFNTSDYVKEARAILKCQDIDVELSESIVNIISRRREYYEGPGSEKSPTKYGRWIEKGAEPIDLIEKMRGKCSIYHDELRAPKSSYSAELFNLLNDLNNLSINGEKLTQNEKEIVIEEVNNNGKITIDKLKKLLNINDSKDVVEGFRINKSNELLLTNMAMYDQFKKIFDKHKEDAYQRDKYIIDQIAEINTAKKGIKERCDAIEKQFPNFDYNLIRDLAEMKKMTQYHSLSLKAIREINKEMIKSPYNQMQAIHELGLQHYRKSYKGMKKIQVDEEAILSPVVKRAQRETFKVINRLREIYGEFESIVVETTRDKNSKEKKERINKTQKYYEDRNKKVDELLKERGYNPDTINNKTKMKVKLYLDQNGKSAYTMTPLKLNLIITNPHAYEIDHIIPLSISQDDSFNNKVLITHEENQVKGNKTPIYTYLNNQFKNCDINKYKESVKNNHNFSRKKKFYMLYEKDITKYSNMKEFIARNLVDTSYASRVVLNTLTSYFRDNDISTNVHTIRGSATSLYRKRIGLKKDRDKDFLHHAIDALIVASIKKQSIFRKYLIKYNLSELYNEKTGELIKVEEDSKVIDPVFIEFISNLKTIYEQSYQYYNGYISRNKMKFKPIKISHKVDTKPNRKISDETIYSTRNVNGVERVVKKVKDIYDPKFDKLTNDIINNQYHNKWIMAEKDEQTFEIIKSIVMAHFNTYKEDKDIYKSKSKKGVTTWSLKGSNNPLSQFKEEHGKIRKYSKKGNGPEITSMKYYEDELGNHVNITKKYNVDNKNVVLLQISPYRTDFYVSPKGKYKFVTIRYCNVFYKESNKKYLIDKKWYEEEKKKKKIDDSYQFVCSLHHDEILGVKLEDGKPYIYDESNENDEGLKRYHKGQYEILKFTATNDDKKNIIEIKPTYTYCQKQLKRSCGTFIKLTKFATDVLGNMYEVKDNVLKLEFD

SEQ ID NO: 18235 - protein, 1144 aa, unidentified
  REGION 1..1144: note = Cas Enzyme sequence
VKPGSQNSSWYKKRVVKKDGEQLHLGLDLGSSSLGWAITKAVVENGAVVSQTIVGSGVHLYQSGLVPKSSASLTSVRSKKKSARRTKNRKNIRLRRLARHLHESGLAPKRGEVGFESYITLDPINCRARAVTELVAPFEFSRALMHMAKHRGYKSNRKDRRTLDSAANATVVVVTEEPADDVDKADAAEAKEKKKILARIASTKEVMTLKGWTAGQYLADERVRAGVNSIPVEEQSFFDRQMIDAEFLQIVEMQKRSGGALGLLDDRDVLIQSVSQAIFYQRKLAPGNVGRCTIDIAERRAAKYLATSELMRLAQDINHIRYFDMIGTSTSLTPAERDVLMVAALFQTEKKAPKRQSKKVKARVFFSHLRDTLARVQGGVRSGDDIILLNETEALDDIAVPLVLPLTAALIPGVDVQQIRRDIYGGDVEVAARAARAFIDIALAHLDTLDVLATALQAAEDDAAAEDVMRAICNTAGWDIDDDDVLCALAVMPESEYGNISLRVARDILPHLCAADSVNAFVTSVNNAGYSLPTIKERDALPYYGEVLPHITSPVQQPVGLSAEREAEWKKSVNDDEMKYGRVTNVNVHIGLGQLRKVHNKLAGKFGNFDAVSIETGREFGDSAKRKNKRNATHTKNRQAKVALNEKLAVLTQSQSAANRDRLTLFNSMKSEHRMCVYTGVPITLDNLFSGEIDVDHIVPRSRGGSDRLWNKVLVTRQSNRSKSDSTPFEKWGGSAAWDGIAGRANKVYEDEQKKMAMILKTSVDEGSDEFMPRQLTDNSMLSKRAVQYLSSVCPNVRSVSFEVSSKMRDYWGFDEILAPNNSAMKKFTLGEVDYFSWEKNRNDNRHHAVDALVLALMPSHLEGVVEMMRHARKHFGVHDSPDTFLPKGFASRGDLYAAVRKSVLSVRISLRPDRTSNMTFSDETNRRVLGLVGNGSEKPTSTKKSKLREVWESMTAEEKTDMLLGKPRNFYTPASGKKAKPGEVTSALMSFGFDRSGSAPVPVRAFELGSNAWIGVTLEGCKRHGGERTAFVQNAMGVARGTAQDCCIRIYKDDLVRFSESTAKKINAGSASGGALVSHHYVYRVKGMSKNARGAQVVGVSNINGGDPAHERMLTIAHLYDAAILSSSLLGGHKTRGCESLTN

SEQ ID NO: 18236 - protein, 1090 aa, unidentified
  REGION 1..1090: note = Cas Enzyme sequence
MRYGIGLDIGIESVGYAILELDYSDMPKRIMDLGVRIFDKAEHPKDGSSLAVPRREARGMRRRLRRHRHRLERIRGLIVSAGILSADQLDHLYEGNLSDIYGVRVKALDELVTPEEFARILIHLAQRRGFKSNRKADSQSKEGGALLSAIGANKTLLEEKGYRSIGEMMLLDEKFKEYKRNKGESYAFTVERDGIESETRLIFDSQRKFGAQFADEAIENKYLEILLSQRSFADGPACGPYSGNQAEKMIGRCTFLAEEPRAAKATYSFQAFNLWQHINHIRININGSAIPLSESERWTIFELAHNKKDLSFAQIRKALKLHESANFVGINCKPDERDAFEKKKKLNDLAFYHKVKACLDKADKTFFPSLSSNDLDIIGEALSKNYSDDKIVEILSQSGISTNIAEELLALPNEKKYGHLCIKVLRGIIPHLEQGLTYDKACEAAGYNFKADESEPKFTLDALPNDNNEITSPVARRAISQTIKVINAIIRKMGESPVYLNIELARELSRSYDDRKKLQKSQDENAKRNESALQQLKEYATVAPGGQDIVKFKLWQEQDGICPYSGEHIDIARITEPGYVDVDHIVPYSRCFDDRMVNKVLVLARENRQKSNRLPLEYLEGAKRERFIVWVNNHNFSYAKKSRLLKEKIEDEDDWKQRNLQDTQFASAFMHRYIKDNLLFAPFMTKKVKHVTAVNGTITAYMRKRWEIQKLRENGDLHHAVDAVVIGCITQGMINKISKHSYYKETYENGDYKLDEETGELISRFPAPWPHFRDELEIRLNPDAKKLRKQLFDVNYESYAEIDLDSIDPIFVSRMSNHKVTGAAHQETVRSAKKIEQGKVISKVPLSKLKLKDGEIDGYYNPDSDVLLYNALKERLQAFGGDGAKAFPEGYKFYKPRANGEQGPEVKKVKVEETTSLSVAVQQNTGIANNETMVRCDVFYIEGDGYYFVPIYVADTVKSELPKSAPTQTRDKITGQKIWKPMDERDFVFSLYPNDLFKIYSEKAIKLNVINEKSSLDKEKTFAGEKGVFLYFKGLDISTAFISGITHDNTYKHRSIGKTTMEIEKYEVDVLGKVRKVEKEQRQEFHIKHN

SEQ ID NO: 18237 - protein, 1355 aa, unidentified
  REGION 1..1355: note = Cas Enzyme sequence
MEGVTMNNKYVLGLDIGITSIGWSIIDEVKGKLLDMGVHMFEQATPAQEARLNRSARRTLRRRNWRKKQLKNAFIEFGLISKEEMNQRDYLSYTANSDTFTRPEEDTVYHLRLKALNDKVSLRELLLCLYNICGTRGHFLMENINFASSEPITFEFFVEQFYEFTHAYVNFEEDTKEFEQTILKPIFEKGKVKSNELKSLLKDEYTVEAEDNDALLEILKLICGFKCDLKKISESVVLVQEDKTKESVKLDELLQLDNLNEFLNNAVELHDVIAVSQILKDHNYICEVAVEKLNEVLKIQKLEHSDPDKYKEEKNNIQKKMSKAIGDRLRVVKNMENKYPNGLYVKEASDILHKQQEFYPNLITDNFIEACISTIKARIPYYIGPLSSQAKNSWIDRKDGTFKYGYDYCKDALVNEEESIQNWKLNMISHCTYLPEEYALPKGSFIAETFSLLNELNILTAIDKDENRYYLTREDKLKVFDELFLKRTDYVSHKEVAELLDLKSFGPKDSHKAGKFKNRYTLYQNIISVFPQFELHSIIDLFNENEKEKVNKIEDIILNLNLFDEEQSKVNYFTKKLNLDNDDAKKLARCKSNGFYAFSKQFIMETKMNVDGETLLEEMLRDNSENQKNEQMTLITEATDLDGNRINFDSNKYMTLLKDTKKLSIDLLIQDGKPFIPIARPVIRALNECFKLYEEVVNTYGVPDRVVIETARDLKDSAHDGDEPAKHFDQMKNLYDYLTKQIKERKDNAKISKQYLEDWDVIQPYLEKNKRKVELYIRQNGRDMVTGDEIDIQKLEDYEMDHILPRGFGDNSMDNLMLIKKEINGKKADRLPLEYIEAETVTNKAGKRIISSDFKRRCYELNEMKLISDKKLKRLLLASTDEAMGFINRNLVDTRYIIRELMAILRAYNTVNNYDTHIVSLRSSFTTVYRNAFNMKKNRDIGDQHHAHDASIVAIADMVLSTYYPNYDERGNNKYYQEFLKRMMESQGPDSDKSENQKLYGFIKYAYFKRFGNYPNDNDSLVSQVRAMVPLYSVKAEKNYKGAFFDATIYPQMDKKKNIPREKGVLGLLGVNNDKRIYSSINCVAVDFYKYTDKKGKKVHVGIHIPKVIVNNNGEINKEQYVKLIRDYYKVPELLDENGNVKECYFRMRVFKNDLIYDTNNYTIQKFNIGSIVNKKLEMKHLYVFSYDEIYKQVYFYKKELAGQFDFKLPKINPDGKKKFSDYKISEIISYCVDNLMDIRDLNRYKGTIEKILKEKTNYQEFLETMAYLDLIVNRNCTPPTIVGQYLPVAGSIDDKTDKENKAQYIKIKSSILGIRYTYNENGKLLISGPRKAPGKYSKIKKEKFSWKICSDVLQ

SEQ ID NO: 18238 - protein, 1350 aa, unidentified
  REGION 1..1350: note = Cas Enzyme sequence
MNNKYVLGLDIGITSIGWSIIDEVKGKLLDMGVHMFEQATPAQEARLNRSARRTLRRRNWRKKQLKNAFIEFGLISKEEMNQRDYLSYTANSDTFTRPEEDTVYHLRLKALNDKVSLRELLLCLYNICGTRGHFLMENINFASSEPITFEFFVEQFYEFTHAYVNFEEDTKEFEQTILKPIFEKGKVKSNELKSLLKDEYTVEAEDNDALLEILKLICGFKCDLKKISESVVLVQEDKTKESVKLDELLQLDNLNEFLNNAVELHDVIAVSQILKDHNYICEVAVEKLNEVLKIQKLEHSDPDKYKEEKNNIQKKMSKAIGDRLRVVKNMENKYPNGLYVKEASDILHKQQEFYPNLITDNFIEACISTIKARIPYYIGPLSSQAKNSWIDRKDGTFKYGYDYCKDALVNEEESIQNWKLNMISHCTYLPEEYALPKGSFIAETFSLLNELNILTAIDKDENRYYLTREDKLKVFDELFLKRTDYVSHKEVAELLDLKSFGPKDSHKAGKFKNRYTLYQNIISVFPQFELHSIIDLFNENEKEKVNKIEDIILNLNLFDEEQSKVNYFTKKLNLDNDDAKKLARCKSNGFYAFSKQFIMETKMNVDGETLLEEMLRDNSENQKNEQMTLITEATDLDGNRINFDSNKYMTLLKDTKKLSIDLLIQDGKPFIPIARPVIRALNECFKLYEEVVNTYGVPDRVVIETARDLKDSAHDGDEPAKHFDQMKNLYDYLTKQIKERKDNAKISKQYLEDWDVIQPYLEKNKRKVELYIRQNGRDMVTGDEIDIQKLEDYEMDHILPRGFGDNSMDNLMLIKKEINGKKADRLPLEYIEAETVTNKAGKRIISSDFKRRCYELNEMKLISDKKLKRLLLASTDEAMGFINRNLVDTRYIIRELMAILRAYNTVNNYDTHIVSLRSSFTTVYRNAFNMKKNRDIGDQHHAHDASIVAIADMVLSTYYPNYDERGNNKYYQEFLKRMMESQGPDSDKSENQKLYGFIKYAYFKRFGNYPNDNDSLVSQVRAMVPLYSVKAEKNYKGAFFDATIYPQMDKKKNIPREKGVLGLLGVNNDKRIYSSINCVAVDFYKYTDKKGKKVHVGIHIPKVIVNNNGEINKEQYVKLIRDYYKVPELLDENGNVKECYFRMRVFKNDLIYDTNNYTIQKFNIGSIVNKKLEMKHLYVFSYDEIYKQVYFYKKELAGQFDFKLPKINPDGKKKFSDYKISEIISYCVDNLMDIRDLNRYKGTIEKILKEKTNYQEFLETMAYLDLIVNRNCTPPTIVGQYLPVAGSIDDKTDKENKAQYIKIKSSILGIRYTYNENGKLLISGPRKAPGKYSKIKKEKFSWKICSDVLQ

SEQ ID NO: 18239 - protein, 1354 aa, unidentified
  REGION 1..1354: note = Cas Enzyme sequence
MNNKYVLGLDIGITSIGWSIIDEVKGKLLDMGVHMFEQATPAQEARLNRSARRTLRRRNWRKKQLKNAFIEFGLISKEEMNQRDYLSYTANSDTFTRPEEDTVYHLRLKALNDKVSLRELLLCLYNICGTRGHFLMENINFASSEPITFEFFVEQFYEFTHAYVNFEEDTKEFEQTILKPIFEKGKVKSNELKSLLKDEYTVEAEDNDALLEILKLICGFKCDLKKISESVVLVQEDKTKDSVKLDELLKMDNLNEFLNNAVELYDVIVVSQILKDHNYICEVAVEKLNEVLKVQKLEHSDPDKYKEEKKIIQSKMSKAIGERLRVVKNMENKYPNGLYVKEASDILHKQQKFYPNLITDNFIEACISTIKARIPYYIGPLSSQAKNSWIDRKDGTFKYGYDYCKDALVNEEESIQNWKLNMISHCTYLPEEYALPKGSFIAETFSLLNELNILTAIDKDENRYYLTREDKLKVFDELFLKRTDYVSHKEVAELLNLKSFGPKDSRKEGKFKNRYTLYQNIISVFPQFELHSILDLFDENEKEKVNKIEDIILNLNLFDEEQSKINYFTKKLNLDEKDAKKLARCKSNGFYAFSKQFIMETKMNVDGETLLEEMLRDNSENQKNEQMTLITEATDLDGNRINFDSNKYMTLLKDTKKLSIDLLMQDGKPFIPIARPVIRALNECFKLYEEVVNTYGVPDRVVIETARDLKDSAHDGDEPAKHFDQMKNLYDYLTKQMKEQKDNAKISKQYLEDWDVIQPYLEKNKRKVELYIRQNGRDMVTGDEIDIQKLEDYEMDHILPRGFGDNSMDNLMLIKKEINGKKADRLPLEYIEAETVTNQAGKRIISSDFKRRCYELNGMKLISDKKLKRLLLASTDEAMGFINRNLVDTRYIIRELMAILRAYNTVNNYDTHIVSLRSSFTTVYRNAFNMKKNRDIGDQHHAHDASIVAIADMVLSTYYPNYDERGNNKYYQEFLKRMMESQGPDSDKSENQKLYNFIRYAYNKRFGNFPNDNDSLVSQARATVPLYSVKAEKNYKGAFFDANELPRYDTKGNEKKLGVLGILGVNKDGRIYNKIKCVAVDFYKYTDKKGKKAYVGIQIPKVIVNENGEIDKEQYIKLIKNYYKVPELLDENGNVKEYYFRLRIFKNDLFYETETNTILKFGVGSITKKLLEPSHIYCLSYNDIYKEVYSLRKEMAVRFDFKENIVNPSGHHKFGDYAVNELFDFCLDNYMNLENPKNQRKLVSNTFNDMMKKQMNTVGKINYQWFLETIVYLNLIVNRKCSPLDRYRPGTDIVKKKNNEDAEYIKIKSSILGIRYTYNENGKLLISGPRKAPGKYSKIKKEKFSWKICSDVLQ

SEQ ID NO: 18240 - protein, 1020 aa, unidentified
  REGION 1..1020: note = Cas Enzyme sequence
MENKYPNGLYVKEASDILHKQQEFYPDLITDNFIEACISTIKARIPYYIGPLSSQAKNSWINRKDGTFKYGYEYCKDALVNEEESIQNWKLNMISHCTYLPEEYALPKGSFIAETFSLLNELNILTAIDKDENRYYLTREDKLKVFDELFLKRTDYVSHKEVAELLNLKSFGPKDSRKEGKFKNRYTLYQNIISVFPQFELHSILDLFNENEKEKVDKIEDIILNLNLFDEEQSKINYFTKKLNLDEKDAKKLARCKSNGFYAFSKQFIMETKMNVDGETLLEEMLRDNSENQKNEQMTLITEATDLDGNRINFESNKYMTLLKNTKKLSIDLLIQDGKPFIPIARPVIRALNECFKLYEEVVNTYGVPDRVVIETARDLKDSAHDGDEPAKHFDQMKNLYDYLTKQMKEQKDNAKISKQYLEDWDVIEPYLEKNKRKVELYIRQNGRDMVTGDEIDIQKLEDYEMDHILPRGFGDNSMDNLMLIKKEINGKKADRLPLEYIEAETVTNKVGKRIISSDFKRRCYELNGMKLISDKKLKRLLLASTDEAMGFINRNLVDTRYIIRELMAILRAYNTVNNYDTHIVSLRSSFTTVYRNAFNMKKNRDIGDQHHAHDASIVAIADMVLSTYYPNYDERGNNKYYQDFLKKMKETQEPNSDKSENQKLYGFIKYAYFKRFGNYPNDNDSLVSQVRATVPLYSVKAEKNYKGAFFDATIYPQMDKKKNIPREKGVLGLLGVNNDKRIYSSINCVAVDFYKYTDKKGKKVHVGIHIPKVIVNNNGEINKEQYVKLIRDYYKVPELLDENGKVKECYFRMRVFKNDLIYDTNNYTIQKFNIGSIVNKKLEMKHLYVFSYDEIYKQVIFYKKELATQFNFKMAKINPDGKKKFSDYKITEIISYCVDNLMDIRDMNRYKGTVEKILKDKTNYQEFLETMAYLDLIVNRNCTPPTIVDRYIPVAGSIDDKTDKENKAQYIKIKSSILGIRYIYNENGKLLISGPRKAPGKYSKIKKEKFSWKICSDVL

SEQ ID NO: 18241 - protein, 1350 aa, unidentified
  REGION 1..1350: note = Cas Enzyme sequence
MDNKYVLGLDVGITSIGWSIIDEVKGKLLDMGVHMFEQATPAQEVRLNRSARRTLRRRNWRKKQLKNAFVEFGLISKEEMNQRDYLSYTAHSDTYTRPEEDTVYHLRLKALKEQVSLRELLLCLYNICGTRGHFLMENIDFASSEPITFEFFVEQFYEFTHAYVNFTEDTKEFEQTILKPIFEKGKVKSNELKSLLKDEYTVEAEDNDALLEILKLICGFKCDLKKISESVVLVQEDKTKDSVKLDELLKLDNLNEFLNDAVELHDVIAVSQILKDHNYICEVAVEKLNEVLKVQKLEHSDPDKYKEEKNNIQKKMSKAIGERLRVVKNMENKYPNGLYVKEASDILHKQQEFYPNLITDDFIEACISTIKARIPYYIGPLSSQAKNSWINRKDGTFKYGYEYCKDALVNEEESIQNWKLNMISHCTYLPEEYALPKGSFIAETFSLLNELNILTAVDKDENVYYLTREDKIKVFDELFLKRSDYVSHKEVTELLGLKSFGPKDSHKTGKFKNRYTLYQNIVSVFPQFKLHSIIDLFNDNEKDKVNKIEDIILNLNLFDEEQSKINYFTKKLNLDENDAKKLARCKSNGFYAFSKKFLTDTVMNVNRESLLEEMFRDNSENQKNEQMTLITEATDLDGNRINFESNKYITLLKDTKKLSIDLLIQDGKPFIPIARPVIRALNECFKLYEEVVNTYGVPDRVVIETARDLKDSAHDGEEPAKHFDQMKNLYDYLTKQIKEQKDNAKISKQYLEDWDVIQPYLEKNKRKVELYIRQNGRDMVTGDEIDIQKLEDYEMDHILPRGFGDNSMDNLMLIKKEINGKKADRLPLEYIEAESVTNKTGKRIISSDFKRRCYELNDMKLISDKKLKRLLLTSTDEAMGFINRNLVDTRYIIRELMAILRAYNAVNNYDTHIVSLRSSFTTVYRNAFNMKKNRDIGDQHHAHDASIVAITDMVLSTYYPNYDERGNNKYYQEFLKRMKETQDPDSDKSENQKLYNFIRYAYNKRFGNFPNDNDSLVSQVRATVPLYSVKAEKNYKGAFFDATIYPQKDKKKNVAREKGVLGLLGVNNDKRIYSSINCVAVDFYKYTDKKGKRVHVGIHIPKVIVNNNGEINKEQYIKLIRDYYKAPELLDENGNLKECYFRMRVFKNDLIYDTNNYTIQKFNIGSVVNKKLEMKHLYVFSYDEIYKQVYFYKKELAGQFDFKMPKINSDGKKKFSDYKITEIISYCVDNLMDIRDMNRYKGTVEKILKDKTNYQEFLETMAYLDLIVNRNCTPPTIVDRYIPVAGSIDDKTDAENKAQYIKIKSSILGIRYTYNENGKLLISGPRKAPGKYSKIKKEKFSWKICSDVLQ

SEQ ID NO: 18242 - protein, 1340 aa, unidentified
  REGION 1..1340: note = Cas Enzyme sequence
MNNNLTVSFDIGIGSVGWAVVDPDHAKLIEFGSHVFNEATSAQQARGFRSARRTQRRRKWREKQLLMAFVDFGLVTEDELKQEGYLSYTTNNDLIKRPKEETVYHLRNKALDNPVSTRELILCLYNICKTRGHFLLENVNFERDTVTFDLFKEKFYALTNDYFTFSSIEGKEEFEKEVLKEIYNKKLKSNEIKSKLKKMDCVETEEMDAALLEICKLIAGYKGELTKISESVVLPESATNVKVQELLKKDSLNDFLEGIIELYDLINIAAILKKYNYICQLNVAELDNVKEVYKLENTDNEEYDKKKKEIQAKMKSTGVNGNRLHVVKNMENKFPNGLYLKEAKRILETQHRYNSKITNAFIEVCLGIIKTRIPYYIGPLDESAKNAWLTKNHAFKYSYDYSTKELHAVDEEASIKKWKYQMISRCTYLPDEFSLPKGSLLAEVFSIVNEMNILTAKDTDGNTYYLTMKDKIHIFDELFLKKKEIIKYDEVKDLLNLQSFGPKNGGFGKNFKNSLTLYHPIVSLLPELRLKSILDVFAEENKIKQLEDIILSINLFDEESSKKQYFIKQGYQEDVSSKLSKLSSKKFYAFSKAFICDTPMDQENHSLLECLFEDNTAEFVNEQMTRIHSATDVYGNKIDFDANKYKAKLKENKELSIDLLMDDGKPFMPISRPVIRSLNECMKVYKEIISIYGVPKRVVIETARDLKDSSRKGEVPAKHFDQMKSAYDYLKKQIKEQKSNHLFKGNEMVDWEEIETYLSRNKRKIELYIRQNGLDMISGERIDINRLDNYEMDHILPRGFGDNSMDNMMLISKSLNAAKSNRVPLEFIESGEALNSDEQFITSSSFVRRVNSLFELKMISEKKKDRLLLKSSKDVEGFINRNLVDTRYIIKEFMAILNAYHDVNHYDTHVVALKSAFTDTYRKNGFHMQKNRDVGVQHHAHDAAILAIVDKMLLTYYPNYDSRGNMKAYHNFLLNLNKNEKNQAEKDFGGFTWIMYQKAFHERLNDQDSLLSQVKSRVPLFSVKAEKNYKGQFFDATIYPQKDKKTKKETKKGILGEFGINNDKHIFSAINCVDVDFYKYTNKRGKKKHLGVHIPKVIIDDQGRIDQDKYKFLVKEYYKVPELFDENGNIIQGYFRFRAFKNDLIYDSVNNELQMFNIGSIANKKLEMKHINIFSYDDISAQVRESFYPIVDEFNIRIGRNKSSNAIPFSEVNKDELITYCMDNLMAINDVDRYGKAIRDNLKKCLSFNNFLETMAFFNLIINRECTPPTIVGQFMPVADRFKSDEDGQYFKVKASILGVRFHKNEDGKLVISGPNRAANKFSKIRKEDFSWRICRDMIE

SEQ ID NO: 18243 - protein, 971 aa, unidentified
  REGION 1..971: note = Cas Enzyme sequence
EFIEVCSTIISARIPYYIGPLSPDAKNAWLTKTGKFKYSYEYSKKNSVDEYESIQKWKKAMISHCTYLPDEYALPKGSFIGETCNILNELNILTAKTQAKDIYNLKTTDKVKIFDELFLKGNKVTYKDIADLLDLYSFGTKSGETKKKFNNQYSLYLAITNVLPELKLDTIEELFTNPDKINKLEDIILNINLFDEEVSKKEYFMTREGFDEKTASKLAKLKSKNFYSFSKKFIMNTGMNEQQDSLLTMLFSDNTDSYTNEQMTLIQNAVDKDGEPLNFESNKYLKKLNKDSKLSVDLLIENGKPLIPISRPVIRALNECFKLYEEVIKLYGVPKRVVVETARELKDTSQKKEAPAKHFAKMDACYKDIQKQVTEQKNKNILLKESLAEWEEVEVHLAKNKRKIELYIRQNGQDMISGDPIDINHLENYEMDHILPRGFGDDSMDNLMLIHKDYNAKKKDRIPLEYIESEAVLSKSGNQVTTKQFKARVHALFDIKAISEKKQNQLLLASTEEAMGFINRNLVDTRYIIREFMSVLRAYNQVKDYDTHIVALQAAFTSVYRNAFNIKKNRDIGDQHHALDAATVAVTDKVLNAYYPNYDRHGNMKQYQAFLKQLKESNVMEGNEKQKLNTFIRQAYHKAYGNYPNDNDSLIAEIKNTRPLYSVKVEKNYKGKFFDETLYSPKKGKKTGPLDVLLVNNDKRVFDTVYCCAVDFYKYTDKKGRRKHAAIHIPKVIVDNNGNINEKQYIKLIKDYYKIPELLDENGGIKAYYYRFRAFKNDLIYDTENNTIQKFNIGSIAVPRLEMKHLYIFSYNEIHKLVHFYHKALAVHFDFKLGKINPNGQKKFSDYNIEDIINFCIDNLMEINNHYYDKSIKDILKKENMLQKFLQKVAYLNLIVNRNCTPRSIIGQYVPSVNKVDNQAEYIKLKYSPLGIRYQYNDQGKLMISGPKKKPGMYSKIKKEPFSWKMSKEVL

SEQ ID NO: 18244 - protein, 1143 aa, unidentified
  REGION 1..1143: note = Cas Enzyme sequence
AGLDLSGSASSFLSGFLKDDDAVPDLADSLVRILTRQGTSSYDKEKEISNVFYAVFPDKDDKKFCLELSKAIVGRKSDFSVLFGPQGSFSLDDESTAEQYAASLDDDALNSFQTLQKFYSETLLSKMLSGHVTTISDIYIHRYDEHRKDLLALKKVLRTCCTQEIYKNVFVGKNSLYQQYREHNSKDSSHDKFLGELRKILKDACDPAVEQERTYCLVRIEEGSFLKKPKSTDNGVIPNQLHCEELKAIIDHQKQYYPILAQEEGNILKIASFRIPYYVGPLSPRATEFGWAVRKEKGAVTPWNFEDKIDVMASAEKFITNRTDTCQYMYGEAVLPKNSLLYSNYCVLNELNGIRLDGKRLGCDVKRRLLAEVFSKQKMVSKGTVSKWLFKEGYADRDKGLDITGFQKEDGFASSLSSLIDFTKIFGHVDEKNEAMIENLILWNTLFSDKKILAKKIHKEYPDLGQDIVTAVVRLDYQGWGRLSRKLLTEVTTVNGEGRLMSIMDLLRETQKTFMEILFDDAYGFQDAIEKENRKKQPIVSLDDYESVFPDVPISPSVKKASWQGLRVIREIVQVMGREPSHIYIEFTRDDAEKKRTVSRYYALEKLYKRLINDDAFSAVYQELISQKEAYTKKGGPLSDMRLFLYFCQNGKCLYSGTSLDINRLGDYQIDHILPQSYIKDNSIDNLALVLSGENQRKRDSLLLDDTIIKKQKPFWQVLRKNGLISSKKYRALTREAVSEEDFNTFINRQIVETSQAVKILSDVLQAVFPETTRVVGVKAGLSHGFRVQNGITKVREVNDYHHAHDAYLACQVGRFLTGQFGQAVRRKELYEEFQNTTTNARNQKNGFVVYCMSTEYGNWHGTEVVGKIRNAFGFHHYFLSRKTEELTGAFYNQTLLPKGENGGATVPSKEDRDPIIYGGYSGETLAYYDIIEFSKGKKRMMKLVGIPVRIVALGKTRPGAIDQYLASLYSQPIVRKKGICKYQYIRYCEKDGTYNEYYLVSDSEVINARELMLPLDTMKNLAGFNHLDDIGKQQVYLTLCEKMEKYPCYKSIADCLKRHIGDFVDLPSEKQQSCIQGMLTYMQANASRFDFAKQIGGDWKDIRSNRFSKKGLIPERIEFIDRSVTGMFERSYRIGIPDGRDH

SEQ ID NO: 18245 - protein, 910 aa, unidentified
  REGION 1..910: note = Cas Enzyme sequence
YLPFLTEKDESGLTVSERILKLFSFQIPYYVGPVTTKSSRDGGNGWVVRKESGQVLPWNIEDKIDMDATSKKFIENLIRECTYIAGEKVLPKGSLLYERYCVLNEINNIKIDGRPIDVELKQKIFEDKFMSGKKVTRKQLVTYLHGKGVLEDDAQLTGIDKTINNSLSSYGKFLGVFGDELKKDSCQIMVEDIIRDCTIYGDSKKRLRETLQKKYVDNNNLSESQLKRILGFKFKDWGRMSKEFLEMQGINRETGEVMSLVQAMWETNLNLMELIYSEDFTFAEALQEKQAKDYLTLSEFKFEDLDEYYFSAPVKRMVWQTLLIIKELEKVLGAPPKKVFIEMTRSDGVKGDRGRTISRKKQFEDLYKKIKDESQDWASIIDNADASGKLRSKKMYLYLTQMGKCMYTGKPIDLDDLFDDNKYDIDHIYPRHYVKDDNLGNNLVLVEKKANASKGDRYPLDTDIRGKMHGTWKFLKEKGLITEEKYRRLTGSNPFSEEQQADFIARQLVQTSQGTKGVADLLKQLLPDAKIAYSKASNVSDFRRDYDLPKSRLINDFHHANDAYLNIVVGNAYLVKFTQNPLNYIRSGDVQYNLGRMFEKDIVRNGEVAWLADDGKGNHGTIVTVKKVMARNTPMMTRMVLNGHGAIANATLYPASKASADNYIPLKGSDSKIADVTKYGGFTSVSTSRFVLVEHLVKKERIRTLEALPILVANSCKTMEDIENYCEEELGLIAPKVKLDGIKIQSLLKINGFYVHLSGKTNKQLALRNAVNLCLDAKWKEYIHYLEKASNNGNYGNPICSDMNIELYSILAEKHSSSIFAKRPNPVGTKLVKEKETFSKLELVDQVSVLLQILQLSAIGITQADLRAIGGAGIAGKMLISKDISKQEEALLIMQSPTGLYESTIDLKTI

SEQ ID NO: 18246 - protein, 1132 aa, unidentified
  REGION 1..1132: note = Cas Enzyme sequence
  SITE 725: note = misc_feature - Xaa can be any naturally occurring amino acid
MAQYVFGLDIGIASVGWAVLDAQRIVDLGVRCFDKAETAKEGDPLNLTRRQARLLRRRLYRRAWRLTQLARLFKREGLIDDAKLFAKAPSWTENAWELRLRGLDHLLTPLEWARVIYHLCKHRGFHWTSKAEEAKAESDAEGGRVKQGLAHTKALMQVKNYRSTAEMVLAEFPGAQRNKRGQYDKALSRVLLGEELALLFATQRRLGNPHASEHFEQLILGHGDRKSGLFWQQKPALSGADLLKMLGKCTFEKTEYRAPKASFSAERHVWLTRLNNLRIVVDGRARPLNDAERQAALLLPYQTETFKYKTLKAAFVKVGLWGDGVRFGGLAYPSQAQAEAEKAKDPEDQFLVKLPAWHELRKAFKAAGHEALWQQISMPALEEDPTLLDQIATVLSVYKDGTEVVQQLRQLALPEPDASIAVLEKIRFDKFSSLSLKALRRIVPLMQGGLRYDEAVAQIPEYGHHSQRIDPGATRHLYLPPFYEAQRKYAGKGDRIGSMQFREDADVPRNPVVLRALNQARKVVNALIREYGSPVAVNIEMARDLSRPLDERNKVKRAQEEFRDRNDKARSEFERDFGYKPKGAVFEKWMLYREQLGQCAYSQQPLDIQRVLDDPNYAQVDHALPYSRSYDDSKNNKVLVLTRENQNKGNRTPFEYLTSFPGGEDGERWRAFVAWVQGNKAYRMAKRNRLLRKNYGTDESRGFIDRNLNDTRYICKFFKNYVEEXLQLAARTDGDTARRCVVVNGQLTAFLRARWGLAKVRGDSDRHHALDAAVVAACTHGMVKALADYSRRKEIAFLQEGFPDPETGEILNLAAFDRAREHFPEPWPHFAHELKARLFIDDLVALREDMQHLGSYAQDDLDRLRTLFVSRAPQRRNGGAVHKGTIYAQPENLKQQGSTIEKILLTGLKLQDFDKLLNPESSDHFVEPHRNERLYAAIRRRLEEFGGKADKAFGPDKPFYKPDKNGQPTGPIVRSIKLVRGKQTGIPIRGGLAKNDSMLRVDVFTKAGKFHLVPVYVHHRVTGLPDRAIVAFKDEEEWTLIDESYAFLFSVYPNDFVCVQQRGKPLIEGYYAGLDRANGNINVWAHDRAASVGKDGLIRGIGVKTALSLEKLNVDVLGRIYPAPPETRRGLA

SEQ ID NO: 18247 - protein, 1132 aa, unidentified
  REGION 1..1132: note = Cas Enzyme sequence
  SITE 676: note = misc_feature - Xaa can be any naturally occurring amino acid
MAQYVFGLDIGIASVGWAVLDAQRIVDLGVRCFDKAETAKEGDPLNLTRRQARLLRRRLYRRAWRLTQLARLFKREGLIDDAKLFAKAPSWTENAWELRLRGLDHLLTPLEWARVIYHLCKHRGFHWTSKAEEAKAESDAEGGRVKQGLAHTKALMQVKNYRSTAEMVLAEFPGAQRNKRGQYDKALSRVLLGEELALLFATQRRLGNPHASEHFEQLILGHGDRKSGLFWQQKPALSGADLLKMLGKCTFEKTEYRAPKASFSAERHVWLTRLNNLRIVVDGRARPLNDAERQAALLLPYQTETFKYKTLKAAFVKVGLWGDGVRFGGLAYPSQAQAEAEKAKDPEDQFLVKLPAWHELRKAFKAAGHEALWQQISMPALEEDPTLLDQIATVLSVYKDGTEVVQQLRQLALPEPDASIAVLEKIRFDKFSSLSLKALRRIVPLMQGGLRYDEAVAQIPEYGHHSQRIDPGATRHLYLPPFYEAQRKYAGKGDRIGSMQFREDADVPRNPVVLRALNQARKVVNALIREYGSPVAVNIEMARDLSRPLDERNKVKRAQEEFRDRNDKARSEFERDFGYKPKGAVFEKWMLYREQLGQCAYSQQPLDIQRVLDDPNYAQVDHALPYSRSYDDSKNNKVLVLTRENQNKGNRTPFEYLTSFPGGEDGERWRAFVAWXQGNKAYRMAKRNRLLRKNYGTDESRGFIDRNLNDTRYICKFFKNYVEEHLQLAARTDGDTARRCVVVNGQLTAFLRARWGLAKVRGDSDRHHALDAAVVAACTHGMVKALADYSRRKEIAFLQEGFPDPETGEILNLAAFDRAREHFPEPWPHFAHELKARLFIDDLVALREDMQHLGSYAQDDLDRLRTLFVSRAPQRRNGGAVHKGTIYAQPENLKQQGSTIEKILLTGLKLQDFDKLLNPESSDHFVEPHRNERLYAAIRRRLEEFGGKADKAFGPDKPFYKPDKNGQPTGPIVRSIKLVRGKQTGIPIRGGLAKNDSMLRVDVFTKAGKFHLVPVYVHHRVTGLPDRAIVAFKDEEEWTLIDESYAFLFSVYPNDFVCVQQRGKPLIEGYYAGLDRANGNINVWAHDRAASVGKDGLIRGIGVKTALSLEKLNVDVLGRIYPAPPETRRGLA

SEQ ID NO: 18248 - protein, 1416 aa, unidentified
  REGION 1..1416: note = Cas Enzyme sequence
MEHKMKQRQEYYIGLDCGTSSVGWAVTDEKYDLLKTKRKVKKNDKTKSKQCTLWGVRLFDEAETAATRRIARSTRRRNARAKERLKLLRLLFRDEIAKVDPEFYNRLRESFYYEEDKNLVSKSKNTLFNDPDFTDKDYYNLYPTIWHLRQAIIKADDNVHFDIRLYFLAIQHILAHRGHFLLEGDIGKGQASFQPIFDVFYDACEDYYRLNNSAASSVERIIEDKSKSKIDKKKELKEILFIEDDGDEEALKGQTELAGLLIGSKVSLTKIFGIESDEDFKYSFAEGVFEDKIPDIEMAIGAENMDLIRAAKQVYDYAILHNLLNGREYISDAMVANYDQHKKDLSALKLAFKPLPESYNKLFKEKIYDASKTPNKDFPIYQAYIGKARSAKGKPALVGQDIFNAQLVNLMESRGITGELLDRAQKGELLPKQRGQAKGTIPQQLHHNELKIILNKLTQDYPSFGVENQSESEKYNTLAKKIASIHSFCIPYYCGPIVKQKYDEQGKLIPGGKSQFSWADEEITELVRPWNFDRLVNKDQRATNFIRRMTNECTYLLGENVLPKSSLLYQEYMLLNELNNLRINGQRIDNELKKTIFEQGYLAGELNGNITIHSLERWLKNGFIRPDDELSGASETKYLPKLQTYQDFRKILGEDFEKKYSNKQLERVIEAITILGDEKQMLTRRIRSELNCSEEVAKKLAKRSYKDWGKFSAKFLNGITVNNQTILDWLWDDNKNLMELLGQEVGFGKVVEEYNNLSGKKPEAGAKIHYSNIQDLYCSPAVKRSVWQTVKIVDELAKSQKHAPTKIFIEVTRDEDMKAKGKYTLARKKDLEAKLKSIKSEEAQEILNELSTKEDRKLQSKKLFLYFSQMGKCAYSGEPINLDEINNSSLYDIDHIYPRSKTKDDSITRNLVLVKAELDREKTNIYPISGEIRGKMSRTWQLWYRFGLITKEKYERLTRATELTTDELGGFIARQIIETSQTVKAIRNLLQSAYPDTKVISVKAGQVSDFRHLFANGIKFRNSDQYKVQPRPEFIKVRELNDFHHAKDAYLNIVVGNVMSSTFTDDPYSWIKKREGKEYSVRPELLFRASEEYQKSDGRITHYPEVQNWDFANSINLVSSTMARNDILWTRMNYVESSEISDLQIVPHSDKTDGILPIKRDSRLAQINKYGGYNSIKGAFFALIECNNKKGELERRIVSIPQIYKDKVDQFVKNKYQGGKVILSPIKYKSKLKINGFPVHLAGKSSSGLVLYNGLQLLLEPDEQRYLKRVLKAISKRQQIRGGRQKDQSKDGISRENNSMIMEAICRKLALFNAMPGFGEKANTIRACAGDFSKLALDQQTDAICNMVKILRCNAETGNISSFVPKASFLGKGTMPEDITQRYENIFLISQSPAGLYEEQIDLKTIHPQNLKKKAD

SEQ ID NO: 18249 - protein, 1353 aa, unidentified
  REGION 1..1353: note = Cas Enzyme sequence
MRKNQEPYNIGLDIGTSSIGWSIMNDNFDLMRVKGKKGIGVRLYNEGQSAAERRMHRTARRRYGRRKWRLRLLEDFFDEHMAEVDDTFFARLKNSNISPKDDKKYRKSLLFPKSKGVTYQDDGEFYKKYPTMYHLRYALMTEHRKFDLREIYLAFHHMVKYRGNFLYDTSVDSFEAKNLDIKGKFDEINDLLSSYTDFYVDNSNAALVESILLERNTTRKDKSKKIAKLLHVEDKEKVKNKKAKDLATQISNAVLGLKCNFHLIFELQQKYSFDLCSEKTEENIANLSEVLDENQKMLLMILKEIQDQVMLNAFVPSGMSLSEAMMQKYDDYGEQLKIYHGLEHSVSGDSAAELRGAYRDYNDNIAKRDEFYNKLKKILSDMDKENVNQDVLESCGKLKKLIDENKLFIRQRTAANGVLPHQLHQIEMRKIIDNQKEYYPWLAEPNPNEKRRVYSKYKIEELIAFRIPYYVGPLVDPNNADKNKEARFSWMVRKKDGEITPWNFDDKVDRAESANNFIERMKSKDTYLLGEDVVPKESMLYQEYEVLNELNNVRINDNGLSDSFEDVKLKQAIYNDLFKKQKIVKITDLQNYLVQNHKYLVKPKISGLADENRFLSSLSTYSDLKIIFGDKVDDRTYFNDFEKMVEYSTVFEDGHVYNQKLDEFTWLTKEEKQKIGKKRYRGWGKLSKKLLTGLRDKNNHTIMDNLWETNRNFMQIQTADEFPKQIAEENERHLKGSVSDAINDMYTSPANKKAIRQVLKVVDDIQKAMGYAPSSISLEFAREDGPSVRTVSRANRMKSIYEKYASEVSEEVMKDLDGVIKDKKGLNDRLYLYFEQQGKDMYSGHPLDFDKVISGQEYDIDHILPQAVIKDDSLDNRVLTTKALNNDVKSKGVPCKMFNGMHSFWKNLYDKGFISRRKFNNLTTNPENIDKYKMKGFVNRQLVETRQIIKLVANVLNDKYQNDDVDIIEVRAELTHDIRKHFKFYKNRNVNDYHHAFDAYLTSFVGQYLFKKYPNLRPLFDYNDFMKVSDNVFKQLHGNNFLGEFLNKSGDIISTDGNFVLNKEEMINKLNKAYAFKKMLVTKEVGQRTGAMFDETIYSAKSGKTLIKLKKDRDTSIYGGHSGNKDAYMVIVYTGKGYKVIGIPVRYAERLDSLRKNDVDVFNDMLNRLIESKFGKKSKNKQFRIVIDKVLYNQLIQDGNLLFTLGSAAYQHNFRQLFLDKRALEILDKVATPKPTDDDLIMVYDQILERVDKYFELYDNGGCREALHKGRELFCKLPVSKRNEKDVTKRDMIYTILDGLHANGKIVSCLEIGKKGPFGQMQKKTGINLSENAKLIYQSPTGLFERVVCLKDL

SEQ ID NO: 18250 - protein, 973 aa, unidentified
  REGION 1..973: note = Cas Enzyme sequence
DMDKENVNQDVLESCGKLKKLIDENKLFIRQRTAANGVLPHQLHQIEMRKIIDNQKEYYPWLAEPNPNEKRRVYSKYKIEELIAFRIPYYVGPLVDPNNADKNKEARFSWMVRKKDGEITPWNFDDKVDRAESANNFIERMKSKDTYLLGEDVVPKESMLYQEYEVLNELNNVRINDNGLSDSFEDVKLKQAIYNDLFKKQKIVKITDLQNYLVQNHKYLVKPKISGLADENRFLSSLSTYSDLKIIFGDKVDDRTYFNDFEKMVEYSTVFEDGHVYNQKLDEFTWLTKEEKQKIGKKRYRGWGKLSKKLLTGLRDKNNHTIMDNLWETNRNFMQIQTADEFPKQIAEENERHLKGSVSDAINDMYTSPANKKAIRQVLRVVDDIQKAMGYAPSSISLEFAREDGPSVRTVSRANRMKSIYEKYASEVSEEVMKDLDGVIKDKKGLNDRLYLYFEQQGKDMYSGHPLDFDKVISGQEYDIDHILPQAVIKDDSLDNRVLTTKALNNDVKSKGVPCKMFNGMHSFWKNLYDKGFISRRKFNNLTTNPENIDKYKMKGFVNRQLVETRQIIKLVANVLNDKYQNDDVDIIEVRAELTHDIRKHFKFYKNRNVNDYHHAFDAYLTSFVGQYLFKKYPNLRPLFDYNDFMKVSDNVFKQLHGNNFLGEFLNKSGDIISTDGNFVLNKEEMINKLNKAYAFKKMLVTKEVGQRTGAMFDETIYSAKSGKTLIKLKKDRDTSIYGGHSGNKDAYMVIVYTGKGYKVIGIPVRYAERLDSLRKNDVDVFNDMLNRLIESKFGKKSKNKQFRIVIDKVLYNQLIQDGNLLFTLGSAAYQHNFRQLFLDKRALEILDKVATPKPTDDDLIMVYDQILERVDKYFELYDNGGCREALHKGRELFCKLPVSKRNEKDVTKRDMIYTILDGLHANGKIVSCLEIGKKGPFGQMQKKTGINLSENAKLIYQSPTGLFERVVCLKDL

SEQ ID NO: 18251 - protein, 1070 aa, unidentified
  REGION 1..1070: note = Cas Enzyme sequence
MKQNDYVLGLDIGITSVGWGIVSPDGDKIAYGVRLFDEGDSDNNLKRRTKRSGRRIKRRRTQRIVEMERLLLREGLIQPEFHPLPHPYHIRVKGLTDKLTNDELATALLHIAKRRGSSLEVAVEEGGSAEDDMKAKENLGRNARILQENGWFVCQLQLSRLQERGFVRGTDNIFQTEDYVKEAQKILSNQRLSEDFVTKAIEILSRRRHFSEGPGSYTSPTPYGRFRRDEKGNVNEEPLNLIELMRGRCSIYPEELRAPKESFSAELHNFLNDLNNLRLPGEPERLTTEQKDAIVAEIVAKGYLKPKSNQPKGLADLLDIELDQIRGFRIDNKDHPILTEFKGYQKLLKVLGKNSKVLHDVEKLDRIAEILTSTKVLDERKRDLMKLDLPVKVVEALAALGGFTQYHSLSLKALRLLNKEMRLTNRNQMQIIHEENLIAKKTVPKLVIDDEAILSPVVKRAQRETLKVIEELMAEFGTFRKIVIETTRAKNSKDERQQIRKRQKLNEERNQEVDKLAEAAAGHDVELSGKQRLKLKLYKEQDGKCAYTYNPLNIQAILGNTDDYEIDHIIPYSISLDNSYHNKVLVEKQANQRKGNRSPFAYFQSGQAYGMVSDYHQFKQLVLANKKYSRNKKLHLTNEEDIYKYDMQKGFIARNLVDTSYAVRTLMNTLQTYFKANDIPTIVFTMKGKNTSLYRGLGAYEFDKRNPQETENALAKDRDHYKHHAIDALICAALAEQESLKRMYAVYRSESCDDETGEILYDFTPFDDSMLLEFLVSLGHIKDEDVRFSWKIDTKPNRSFSDETIYSTRSIDNVPHVVKKHKNIYDMDQSKLKSWFEGKDKEKLLVYQNDPDTFAILEGIYHQYKHEKKPFGAYLQEHGEKIRKYSKKNNGPFITNLKYIDKKLGSHLDISHNYNVKDKQVVLLQISPYRTDFYQRPDGSIGFVTIRRADLHPQGDSYNRYYTIDEGQYQEKLKEKNLEDAVFLHSFNRNEVIEIVSDNGDGTENVQRYRYVATNNDIKNVIEVKSIESKDSKPQVMLTIGRKTRDIRKYAVSPAGKMKKVEREQLKLRV

SEQ ID NO: 18252 - protein, 1271 aa, unidentified
  REGION 1..1271: note = Cas Enzyme sequence
MNPITSIGQVSPKVQDNKSKFLQACRLGIDFGDKAHGVAVVKGSQVILAVTLIDESASDLKKRRELRRGRRTRSSRRQRLMRFRQWCLRSHLPDPDPYRNPGLSSILWPWSKNAQEKPKSPLDQLSGGQKKICHEALASDASWTKFLAFPQGAIEYCAIINPFIARRLAREGKASPLIFVRALWHLFEHRGFDWHRRTRGAEDDDFLDSKSALLQHLKSLAITSDEILNKFKERIKARDKEAAPESARAKNWSDDPKVTGALSQARERGNNYPIMRRVNLPRDYVEKELKECLKSLPLNAFPENYGKKKDSKTQDNERIQNASFEGLKKLLNWNRREPRFDNRQLRGCTWCAHKGIHRNTPRKINVIEDQIRAAIKDIKVSQKIPAMTANAAAGKKKAPKIEWGAQPGALSAEEERNLNNIFKIATKRENLKEKLTEFFSGYAKIPKQVFTNDGGKIRKQNKPKDPYQYHREELLNLWEGQKYKETKDSQYRKPAGRSRLCKQCLKFKAENPPEASTMHAGEAPVILSQRALRARCERLISWIKRNVRQEFPVEYIRIEAVLPRPEEKQRLKASAAEQEADQSPKEKRKRRFMEETGALCSSCEKSFQERERKGPTSSRDKKFCQCATSRLRAKCAYCLQLFDENALEIEHIYPKNPVNAAGGIGPNISVNLTISCRECNSDATGKGNRLPFDYFRSKGDGHWNNWKRDAQKFKWPKAKLKIALLEEYRLPPDLADRSSLARTSLVHRYLRQRLAEVFFSGNARNSESLNHKFSFPAGWMTSRCRLDWEHETNNRGHVIPLVPRKSSLRSEQKWKEDLTKRLANASDEKKKQKITMDFNARKTIEDALRNDPAAACDRTNLSHHWIDAAVLASLPPQANQPISMGGVWEISGKDVIASQDFAPKAAEFLKDHNDGSIIADLRDRRTRFTARQQETTLYGQERCAAYFLSKQEIAEAKKLPCDIFKIKNNVLEMLRIPSKNEGEKILEIISNAQLRDRVERLFKYAGYMTIREPVNKIKIKDAEDIVSHYWRGIFKKLRKQKYDFPKKKKTGNDESEAETDTKTEKRLPKDDEPLPAQAWEQWENECAQERRNKEPIPRPRHLQMYRSLGQTEKLEIKNVVSKRGIRTPPRTVRLTVKGDHAEFNPTSGALNVIINPWKSHVEKQNLNSSNGDPAALPVIRIFKGDRIWLPAKDKKKPDVFGNTKYLAGWHRITEMSPQKQKIDGIEPAKIKTEPAWLDLNQCVKIRQDQENDSAKRKKIKQDPFESPRSTG

SEQ ID NO: 18253 - protein, 1022 aa, unidentified
  REGION 1..1022: note = Cas Enzyme sequence
MLMSLRYRLALDLGPSSLGWAVLTLDEKNQPKAIAAAGSRIFSDGRNPKDGSSLAVTRRLARALRRRRDRLLRRKSRLLDALVRFGFFPKDIQERKALEVLDPYELRAKGLDQALTPYEFGRALFHLNQRRGFKSNRKTDSRENDSSVMKGAIRKVREVLAEGNFRTVGEWLNHRKKNGETVRARFRQERVASDTAKVKIEKWYDLYIDRAMVEEEFDTLWRKQAQLNPDLFREGVGAQLKDILLYQRKLKPVDPGRCTFLPDEKRAPRALSSVQRFRIYQEVNHLRWLDDQLCEQTLSVEQRDLVIQALDRNAKRSFQQIRSLLGLGSGAIFNIEDARRQELKGNATNVTLARKQHFGPDWYAFSPQRQDDIVNRLLTEEDESTLISWLQKETGIDEARAEAIANVGLVDGYASLSSKAIDLILPQLQGEVCTYDAAVQAAGFEHHSHMGARATGEILPELPYYGKALQRYVGFGTGVITDTEEKRYGRIANPSVHIGLNQVRVVVNELIRRYGLPNQIVVELARELKLNQEQKRETERQQAANQKRNDRCRQEIAKVLGIDENQVKRDLVQKMILWEELSFDPTERRCPYTGVQISLGMLLGDEVEIEHILPFSRTLDDSLNNKTVSLRKANRVKSNLTPWEAFGKNATVGFDYEAILARAQHMPLHKRYRFAPDGYERWLKDEKNFLARALNDTSYLSRVAKEYLTLICPQGTWAVPGRLTGLLRGHFGLTNADILGWRGKKNREDHRHHAVDACVIGVTDRSTLQKLSTANASARERLLGKLVDTMPLPWPTYREQVKRAVNNIWVSHKPDHGYEKSMHNDTAYGLLDDGKVRVRKDVDGVRTRVIENLDVIPFASVKAGGRHGYLPDGSPKPYKGYKGNSNYCIEIVKTESRRWVGEVVSTFQAYQTVRQYGAVEGWRQLRNKRQGLSGKPLMMRLMINDVVRLEEDGRARTMRVATISANGQIFLADIHEANVDARNRSKSDPFVYISKTAGSLQKAKGRCVTISPAGRLRDPGVL

SEQ ID NO: 18254 - protein, 1070 aa, unidentified
  REGION 1..1070: note = Cas Enzyme sequence
MRYRLALDLGSTSLGWAMIRLNANNKPCAVIKAGVRIFSNGRNPKDDSSLAVTRRKARAMRRRRDRLLKRKARMMRTLIEYGFFSDEAVERKALEALNPFRLRAKGLDEALTPEEFGRALFHINQRRGFKSNRKTDKKDNDSGALKTAISKVRVTIAAEGCRTVGEWLNKRDVAGQTVRARYRQNKIIKDDGKTKIDKSYDLYIDRAMIEYEFDEIWKKQSELNPTLFSEAARAELKDVLLHQRPLKPVKPGRCTFMPDEERAPLALPSTQRFRMYQEVNNLRILSDGLKEKSLTLKQRDELIAALEENNKRSFTQIKKLLGVGGAAQFNFEDPKRQELKGNTTSTILSKVDHFGDAWFAFDEAKQDAIVLQLVKEENEAKLVRWLQNETGIDEKRAEAIANVGLPEGYGSLCAKALARILPELRRDVVTYDKAVQAAGFDHHSRLWNFDEVLGCTFDSGKEFTDKQTGEIKKIHLFHNLPYYGEFLQRHVGFEKDNPRNDEERYGKIANPTVHIGLNQVRLVVNALIKRYGHPSEVIVELARDLKQSKDHSLKDKEPYKLKQGCSCQRCVTGHQAENQKRNKRLRAEISRVLIISEERVKRADIEKMILWEELSFDPVDRHCPYSGVQISVTMLLSDEVEIEHILPFSQTLDDSLNNKTVALRQANRVKGNRTPWDAFGAQNTAGFDYAGILARAEQMPKAKRYRFAEDGYKRWLKDDAGFLPRALNDTRHLSKVAFEYLKLICPNTRVIPGRMTAMLRAKFGLNDVLGLNGEKNRNDHRHHAVDACVIAVTDQGLLQRFAKASASAREQQLNRLVEKMPLPWDSYREHVQRAIDNIWISHRPDHAYQGGIFDATIYGLRGKGKATYRQEIDGQRQRPILNREVVGLTDHKAMSQNGYRHGLLEDGSPKPYMGLWSRSNYCIEIIKTEMVWTAEVIERYRAYQMVAEFGEARLRHPMLSISGQPLVMRLLIGDYVHAEIDGKTQLLCVLKINSTGAITFVLHNESNISARYTAKLAAQKAQKEGKPFDASALDDNFFQKSISPDSLRIFKARRVSISPIGELRDLGFMG

SEQ ID NO: 18255 - protein, 1151 aa, unidentified
  REGION 1..1151: note = Cas Enzyme sequence
MPEPWILGLDIGTDSIGWAAFAWPDDENAYRLLGGGVRLFDSGRDPKEHTSNQRDRGMFRRARRQPRAWRWRKEQLAKTLVAGGLNHPTEAELQTALPLRAQALDRALTGGELWAVLFHMAKHRGFRSNRIERKAAEAAKGKPKADDEAGFWLNAEKQLRARMAEENAPTVGALLAGDMAAGRPTRMRYNLDDGVFAPTRALVAEEFDTIRAAQAPHFPELDWPRVAALVLDQRPLRTKEEGPCEFLEGERRAPRALPSIQAFIVRQTLANLRVKRPYPDEPRPLTEDEFAAGLEALTEVRVLDWPKLRKAMDLKRGAKFTIEEKQGGKSASRKAEGNHTNALLSPIPGWEDWTTEERDAAFTTLWEARRDRPELMASIAALGVTDREEAETLADAIQFELPTGRANLSAKAARLITAELVAGVRTDEAILKALGVHHSHRPRAERLDRLPYYAEALPDVGLGGSHDKADLLPPDHKEVQAGLERFYGRVMNISVHIALNEVRKVVNALLHRHGPNLIRVTLETTRELKAGAEERKKLVYEQADRERENAAIDTELRKQGQWAANARERRTRYRLAKRQRFQCPYTFHRIEMSALLTETYDIDHVIPLSRGGRDSLSNKVLCEAGANKGKGKRTPWEAFHDQGTWEQEKDRWLADLDRDVRIDLDWRFSEQAGEKATRMAAGQDDSEEGFLNRQLTDTGYIARVAKRYLELVTVEPSGVVCTPGRLTGLLRKHWDLFPGPAPRDLLPAPREALEDPEAAKRFLDGLEPAHVQKAVKGLVNDTLTALGRTEVKDAELHDALRVALYGLPGGGKNRADHRHHYIDAAVIAMTTRSVVQRVNTANAQRRISEDDDRTNVPEPYPGFRAQVIRQWEHVWPSIRPAHREGGALHAATVFGVRRRPEGTTLVQRKSVRALFLDPNGKPLPAEKVEKVLASFASDRMRERFQALLDQRRATHPEEKLAESCMAVARHTSFGPRGMTGNTVLAGSVAEEGDSGLITPFRGNAKAAVRTQGNAVYEVWEVPGKSSGTVKWEARVRTRFDMISTEAASANPAKEKNGGRLVMCLRRGDLVLLPEAQDDKLFIVKKMVVDGRLYLWPARIGTGRANAIFAQLSHPTVNLTGDQGYCLNSGEILRKLNVTRFSISVLGRLRRD

SEQ ID NO: 18256 - protein, 1182 aa, unidentified
  REGION 1..1182: note = Cas Enzyme sequence
MVVKYRLGLDVGTASVGAAAVSLDKDGQPDTLIWHHVRIFNEPNEPGQGGLVSKKAGRRKARMQRRQIDRRASRLRRIAHLASLLGLKREEIAPDDGSTLPYLRAQAATERVELDDLFRIFLRISKRRGYKGEFKAKKKGEVAEGSSELSRDMRELATKRGIALKDENDTGITLGQYLLHRMESGLPTKLKVKEVSDEPKSKKGEDANTPKNLYALRKIHVEYEFNIIWDTQAKHHDILNGTHDGKSIREHFYEALFYQRPLKSAADLVAQCGLEPTLPRAPRAQMAFQRFRIEKTLADLRWGTGKRAEPITPDQKRVIRNLLDHNDKVKFEDIYEALKNAGCSKPETKGLNLDRASREELLGNSTLAALRKLDRYSSKKHPERATNLEQAFRALDEKTQIATINFLAEIGSPEQLDDSEWHACFVKSVKDIKIKDSKGNEQWRYKNIPRAFSPELIAFINQIKEHDNFDRLSKMDFDGGRASYSIKALNNLADWLEEPNWPGDWQADMKRMDGEAAIRVCYPKSLNREIKRMEKLPAPESTGNAVVDGSLRQIRWTVNKMIAELGAPPDEIVVEMAREMSLGISRRNEREKENTNNQKARREAEKEIREHGKTPNPPRVLRYLLWAEQDKSFCPYCNKNISLDEALSGGATNNEHIIPKKLTQVGKKRSEIVLAHSTCNDEKGDRTPFEAWGEGRNELRWQSVEAAANRFLSKALSLKKKIDDARRNDRPAPYRGEMNGLFRKAALLRIQNAGDDETVDGFADRQFHQTSWIAKEATQWLECLCPNRVSVSRGELTAMQRRSWKLGTVIPDVRIESGLPVLDDDGKLIEPEAFSKIKKYLERNISKDERTADQKANPDLDFNRRPDKRLDHRHHLIDAITLALTSRSLFQKMATAYKKAAESETQPRLKVPEPPLRDVRKAALDAVRECRISIKPDHYPDGALFKGTAYGVRQREDEDTLRLTLRQPVESLGKVQGKTKLEAARKAIASIISDDVRRIVGDTFEDRIANGMEAGAALALPIRHPLYKNPIRKVRCFEGSAEDTFLVVHHGRAKGHNAKGEKRSWATREHKKLLINEEYAYLDIFTDESQEPRLVKIRDAMREKGKPAPQNAMRIYKGDVVMDSKDGLLYIICSFKATGKILRLPIWEPRSFKQANEKAEKGTKVGGTISFAPAAKRLKLVG

SEQ ID NO: 18257 - protein, 1169 aa, unidentified
  REGION 1..1169: note = Cas Enzyme sequence
MEVKYRLGLDVGTASVGAAAVSLDKDGQPEALIWHHVRIFNEPNVPGQGGLVSKKAGRRKARMQRRQIDRRASRLRHIAHLSGLLGLKREEITPDDGSTLPDLRAQAATKCVELDDLLRIFLRLSKRRGYKGEFKAKKKGPVAEGSSELSLAMRALATERGIALKDENDTGITLGQYLLHRMECGLPTRLKIKEDSDEPKNKKGEDTNAPKNLYALRKMVEHEFNTIWDTQSKHHDILNSTHEGKPIRELFYDALFHQRPLKSAADLAAQCGLEPTLPRAPRAQMAFQRFRIEKTLADLRWGAGKRAEQPSPQQKQVIRELLNNPRALDEGKNKKDQNGAITFEAIYEKLTEAGCPRPQGKGLNLDRASREELQGNKTLYALYKLDEYNEKKHPDFSAKIKHEFINLEEKTQIAAINFLADLGSPEQLDDPMWHTSFVKRDGTPRQFSEALIGFINLIKEHDNFDRLSKMDFDGGRASYSVKALNTLAEWLEEPNWPGDWQDSMKRMDEEASIRVCYPKSLNREIKRREKLPAPESTGNAVVDGSLRQIRWTLNKMIAKLGAPPEEIVVEMAREMSLGISRRNERESENTKLQKMRKNAEKAIRDRNAVPTPSRIRRYLLWEEQATHCPYCNLTIELGDALDGGATEYEHIIPKSLTQVGMKRSEIVIAHHSCNQAKGDRTPWEAWGEGRNDARWQSVEAAAARFDAKKNFRKAKLLRLKDFERKVLTDESVDGFADSQFHHTSWIAKEATQWLECLCPNKVSVSRGELTSMLRRSWKLETVIPEVRYENNLPVLDTGGKLDDKGKVLPAQPIAQDEFVTLKKYLEGHSVRSEDRKANPNFDFNRRPDKRLDHRHHLIDAITLALTSLRLFQQMAKNYKAAAEEMLPRNGESAEDRERRIKTHTRLRLEVPEPPLRNVRAAALEAVRECRISIKTDHYQAGRLFQDFAYRVIFPDGDTPARLARKKSVSDLAGDTAEQTRKNINDIVSSSVRKIILEEFDKRKDTGKSIKEIFAAPFFNREYRTEIKKVFCLQKIGRGYMSTDGTFIVQHPLPTPKYEKRLLHDGYAYLEMVLENGKFKSAHPATQLEGQQKTTTSSTVETVRFFRSDTVMDSKNGKIYLVRQIKAQSGGMLIMAPITETLGVADLSSEYGLLTASGSALARFRIINDV

SEQ ID NO: 18258 - protein, 1172 aa, unidentified
  REGION 1..1172: note = Cas Enzyme sequence
LHRIEQSKKEQAAMAMKYRLGLDVGTASVGVAAVSLDKGGQPDALIWHHVRIFNEPLENGQAGLVSKKAGRRKARMQRRQIDRRASRLRHIAHLASLLSLNRTEILPDDGSSLPYLRAQAAIERVELDDLLRIFLRLSKRRGYKGEFKAKKKGEVAEGSNDLKQAMKALAIERGVELKDENDTGITLGQYLLYRMEQGLPTKLKVKEIGDETKAKKTEDADAPKNLYALRSMVEHEFNTIWATQARHHAILNGTHEGKPIRDHFYEALFYQRPLKSAAELVAQCSLEPTLPRAPRAQMAFQRFRIEKTLADLRWGAGKRAEPLKPAQKKTIRELLDHNDKVKFEDIYEALEEAGCEKPQGKGLNLDRASREELPGNGTLAAFRKLDKHSKKHHPERAANLEAAFRALEEKTQIAAINFLAELGSPEQLDDPVWHTSFVKRDGKPRQFSEALVSFINLIKEHDNFDRLSKMDFDGGRASYSVKALNTLADWLEEPNWPGDWQDNMKRMDEEAAIRVCYPKSLDREVKRLDKLPAPASTGNAVVDGSLRQIRWTINKMIDDLAKSERKHELSEIVVELAREMSLGISRRNERESDNTKQQKARREAEKEIRAHGKAPTPSNIRRYLLWVEQDKSFCPYCNKTISLAEALSADTEFEHVLPKKLTQVGFKRSEIVLAHYNCNQEKGDRTPWQAWGEGRNDMRWQSVTAAAARFDAKKNFRKAKLLRLEDFEREVLTDESIDGFADNQFHHTSWIAKEATQWLECLCPNKVSVSRGELTSMLRRGWKLETAIPEVRYESNLPVLDTGGKIDDKGKASPAQPITPDEFAILKKYLEGHPVRSEDRKANPGFDFNRRPDKRLDHRHHLIDAITLALTSRGLFQQMAKNYKAAAEQMLPRDGESAEDREHRIKTHSRLRLEVPEPPLRNVRAATLDAVRECNITIKPDRHPDGALFKDTAYGVAQRDGEDRLRLALRQAVANLGKTQGKTSTEAARKAIANIISDDVRRIVSEEFETRLAQGMDANTALAKPISHLLYGTPIRKVRCFETYAEDAQPIGFASRQGEHRKYLVNEGYAYLELFTGSSREPQLVKIRDAIREKGKPVPKNVMRIYKGDVVKDSKDGLLYRVCLFKAAGTIALLPIWEPRSFKTANEKAEREAKVGGTISFTPATKRLKLAD

SEQ ID NO: 18259 - protein, 1172 aa, unidentified
  REGION 1..1172: note = Cas Enzyme sequence
LHRIEQSKKEQAAMAMKYRLGLDVGTASVGVAAVSLDKGGQPDALIWHHVRIFNEPLENGQAGLVSKKAGRRKARMQRRQIDRRASRLRHIAHLASLLSLNRTEILPDDGSSLPYLRAQAAIERVELDDLLRIFLRLSKRRGYKGEFKAKKKGEVAEGSNDLKQAMKALAIERGVELKDENDTGITLGQYLLYRMEQGLPTKLKVKEIGDETKAKKTEDADAPKNLYALRSMVEHEFNTIWATQARHHAILNGTHEGKPIRDHFYEALFYQRPLKSAAELVAQCSLEPTLPRAPRAQMAFQRFRIEKTLADLRWGAGKRAEPLKPAQKKTIRELLDHNDKVKFEDIYEALEEAGCEKPQGKGLNLDRASREELPGNGTLAAFRKLDKHSKKHHPERAANLEAAFRALEEKTQIAAINFLAELGSPEQLDDPVWHTSFVKRDGKPRQFSEALVSFINLIKEHDNFDRLSKMDFDGGRASYSVKALNTLADWLEEPNWPGDWQDNMKRMDEEAAIRVCYPKSLDREVKRLDKLPAPASTGNAVVDGSLRQIRWTINKMIDDLAKSERKHELSEIVVELAREMSLGISRRNERESDNTKQQKARREAEKEIRAHGKAPTPSNIRRYLLWVEQDKSFCPYCNKTISLAEALSADTEFEHVLPKKLTQVGFKRSEIVLAHYNCNQEKGDRTPWQAWGEGRNDMRWQSVTAAAARFDAKKNFRKAKLLRLEDFEREVLTDESIDGFADNQFHHTSWIAKEATQWLECLCPNKVSVSRGELTSMLRRGWKLETAIPEVRYESNLPVLDTGGKIDDKGKASPAQPITPDEFAILKKYLEGHPVRSEDRKANPGFDFNRRPDKRLDHRHHLIDAITLALTSRGLFQQMAKNYKAAAEQMLPRDGESAEDREHRIKTHSRLRLEVPEPPLRNVRAATLDAVRECNITIKPDRHPDGALFKDTAYGVAQRDGEDRLRLALRQAVANLGKTQGKTSTEAARKAIANIISDDVRRIVSEEFETRLAQGMDANTALAKPISHPLYGTPIRKVRCFETYAEDAQPIGFASRQGEHRKYLVNEGYAYLELFTGSSREPQLVKIRDAIREKGKPVPKNVMRIYKGDVVKDSKDGLLYRVCLFKAAGTIALLPIWEPRSFKTANEKAEREAKVGGTISFTPATKRLKLAD

SEQ ID NO: 18260 - protein, 1083 aa, unidentified
  REGION 1..1083: note = Cas Enzyme sequence
VGTASVGLVAYELDDSGRPVSVPYHSVRIFDEPLLPAKQGGVGELKRAARRETRQQMRLHQRRARRLRKLAHLAHLLGIDSEAVARRRKPHILEVRAQAATQKVALEDLLRIFLHLSKRRGYAGTFRARKGGKMGEVQTGINDLRKAMDEAGCETLGEYLLHRHRQGQRLRLKADDKKLYANREMIRNEFNCIWTTQEREHEQLCGGREGRPLREIFEEAIFYQRPIRILSAGNCSLETSLPRSPMVQPAFQEFRIEKQIADLRWAKKGRRHPKPLEEPAKQVIRRLLADRERVKFEQIYKALEKAGIPPAPGEYLNLSNGDREDLRGNGTNVCMKKLGLEQEWRNLTDGHRITALNLLADVGAPDVFSTQDWHKRIARGRKRADGKPEYRRIPREVANFINGMAEMEKFDWLSKMGFEAGRSSYSIKALRRLTDAMREKNLDETDAIGLLYPQATARREELLGELPPHEQTGNIVVDVSLRQVRREVNAAIRQLGGPPESVVVELSRDMPLGVKRRGEIVGKIKKNRVSRNKAKEDIEAHTKRAASESDIGRYLLWSEQDKRWCPYCTEPINISAALDGSKTNCEHILPRSLTWIGKRRDFLVLAHRSCNFEKGARTPREKWGDDPERWKVIEERAKQFGKKKMLGKMRQLLSKESGESVLDDEELGDFSDRQFHETSWISKSCAQWMKAICSDVAVSRGFLTGVLRRKWGLDTVIPEVRIEEKLPIFDRDKQLITREDFERHRAFWEERGGTEDSGKTSRKIEKRIDHRHHLIDALVIGLTSRSLYQKMARAYKMDAEKADFSTKRRSIPLRAEPPIRNIRKLALGLVRNCNLTHKCDRWLGGPFFTKLPLAVVEIDGQDWFVQKKTLTEIATGKVETVRNRINRIVSQSTREAVLKAFDERIELGKNPKEALSEPILDPHFSKPIRRVKMRVWERADGAISVKHMGKIQNKIFAKYLKTDGYAYLELDKRQGNASLVTLYELIKSGERKLSQDFCRFFKGDTVLDKSDNKLYIVRQIRANDKGTLAMTLITESQIFAEIQKMDMSINKKGDYVGRSRIVSGEELLKLQPIPDGWPPHSSD

SEQ ID NO: 18261 - protein, 1091 aa, unidentified
  REGION 1..1091: note = Cas Enzyme sequence
VKYRLGLDVGTASVGLVAYELDDSGRPVSVPYHSVRIFDEPLLPAKQGGVGELKRAARRETRQQMRLHQRRARRLRKLAHLAHLLGIDSEAVARRRKPHILEVRAQAATQKVALEDLLRIFLHLSKRRGYAGTFRARKGGKMGEVQTGINDLRKAMDEAGCETLGEYLLHRHRQGQRLRLKADDKKLYANREMIRNEFNCIWTTQEREHEQLCGGREGRPLREIFEEAIFYQRPIRILSAGNCSLETSLPRSPMVQPAFQEFRIEKQIADLRWAKKGRRHPKPLEEPAKQVIRRLLADRERVKFEQIYKALEKAGIPPAPGEYLNLSNGDREDLRGNGTNVCMKKLGLEQEWRNLTDGHRITALNLLADVGAPDVFSTQDWHKRIARGRKRADGKPEYRRIPREVANFINGMAEMEKFDWLSKMGFEAGRSSYSIKALRRLTDAMREKNLDETDAIGLLYPQATARREELLGELPPHEQTGNIVVDVSLRQVRREVNAAIRQLGGPPESVVVELSRDMPLGVKRRGEIVGKIKKNRVSRNKAKEDIEAHTKRAASESDIGRYLLWSEQDKRWCPYCTEPINISAALDGSKTNCEHILPRSLTWIGKRRDFLVLAHRSCNFEKGARTPREKWGDDPERWKVIEERAKQFGKKKMLGKMRQLLSKESGESVLDDEELGDFSDRQFHETSWISKSCAQWMKAICSDVAVSRGFLTGVLRRKWGLDTVIPEVRIEEKLPIFDRDKQLITREDFERHRAFWEERGGTEDSGKTSRKIEKRIDHRHHLIDALVIGLTSRSLYQKMARAYKMDAEKADFSTKRRSIPLRAEPPIRNIRKLALGLVRNCNLTHKCDRWLGGPFFTKLPLAVVEIDGQDWFVQKKTLTEIATGKVETVRNRINRIVSQSTREAVLKAFDERIELGKNPKEALSEPILDPHFSKPIRRVKMRVWERADGAISVKHMGKIQNKIFAKYLKTDGYAYLELDKRQGNASLVTLYELIKSGERKLSQDFCRFFKGDTVLDKSDNKLYIVRQIRANDKGTLAMTLITESQIFAEIQKMDMSINKKGDYVGRSRIVSGEELLKLQPIPDGWPPHSSD

SEQ ID NO: 18262 - protein, 1083 aa, unidentified
  REGION 1..1083: note = Cas Enzyme sequence
VGTASVGLVAYELDDSGRPVSVPYHSVRIFDEPLLPAKQGGVGELKRAARRETRQQMRLHQRRARRLRKLAHLAHLLGIDSEAVAHRRKPHILEVRAQAATQKVALEDLLRIFLHLSKRRGYAGTFRARKGGKMGEVQTGINDLRKAMDEAGCETLGEYLLHRHRQGQRLRLKADDKKLYANREMIRNEFNCIWTTQEREHEQLCGGREGRPLREIFEEAIFYQRPIRILSAGNCSLETSLPRSPMVQPAFQEFRIEKQIADLRWAKKGRRHPKPLEEPAKQVIRRLLADRERVKFEQIYKALEKAGIPPAPGEYLNLSNGDREDLRGNGTNVCMKKLGLEQEWRNLTDGHRITALNLLADVGAPDVFSTQDWHKRIARGRKRADGKPEYRRIPREVANFINGMAEMEKFDWLSKMGFEAGRSSYSIKALRRLTDAMREKNLDETDAIGLLYPQATARREELLGELPPHEQTGNIVVDVSLRQVRREVNAAIRQLGGPPESVVVELSRDMPLGVKRRGEIVGKIKKNRVSRNKAKEDIEAHTKRAASESDIRRYLLWSEQDKRWCPYCTEPINISAALDGLKTNDDHIFPRSLTRIGKRRDFLVLAHRSCNFEKGARTPREKWGDDPERWKVIEERAKQFGKKKMLGKMRQLLSKESGESVLDDEELGDFSDRQFHETSWISKSCAQWMKAICPKVSVSRGFLTSILRRKWGLDTVIPEVRIEEKLPIFDRDKQLITREDFERHRAYWEERGGTEDSGKTSRKIEKRIDHRHHLIDALVIGLTSRSLYQKMARAYKMDAERAASSTKRRNIPLRAKPPIPHIRNLALELIRNCNLTHKRDRWPSGPFFTKQPLAIVEIDGQDWFAQRKTLTEIATGKVETVRNRINRIVSQSTREAVLEAFDERIELGKNPKEALSEPILDPHFSKPIRRVKMRVWERADGAISVKHMGKIQNKIFAKYLKTDGYAYLELDKRQGNASLVTLYELIKSGERKLSQDSCRFFKGDTVLDKSDNKLYIVRQIRANDKGTLAMTLITESQIFVEIQKMDMSINKKGGYVGRSRMVSGEELLKLQPIPDGWPPHSSD

SEQ ID NO: 18263 - protein, 1083 aa, unidentified; identical to SEQ ID NO: 18260
  REGION 1..1083: note = Cas Enzyme sequence

SEQ ID NO: 18264 - protein, 1110 aa, unidentified
  REGION 1..1110: note = Cas Enzyme sequence
MKRWRLGLDVGTASVGAVAIELDANGRPAGVPWHHVRIFAEPNEKSQTGLTPKKAGRRQARQQRRQLERRARRVRKVAHLAPLIGLDQRAIPSDGRKGQHLPGLRAQAARERIELDDLLRVLLRMAKRRGYAGGFRGASDDKELGVVQSGSSGLQREMLDLAQRRGLSCITLGEFLAERVVRGLPTRLKVDRQDIPNLYALREMLQAEFEQIWSTQAQFHPALQAINNDRPVKEIFWEAIFHQRPLKSPATTVGLCPLERFLPRAPRAQMAAQDFRIEKTLADLRWGAGRLAQALTADQRAVIRTALNTPARLTKDGKLSFKKIYKLLDDSGVAAPVGRSLNIDRASRDELVGNTTLKAFEKLGLAEAWAALDSGHQTSIINLLADLGSPQQLDPDDWHQRFLKAGARPGDRNRYRVFHPEVIRFVDQLRNAEGFDRLTKMGFDGGRMAYSVKALNRLIEWLLHPHWRASPGVDSRVDEEAAIRECYPDAGQPGGIPGTLSAPARTGNDTVDVALAQVRWVIADALLNLGSAPSEIIVEFGREVGLGPARRNEWEKFSAKNQRLRNSAKAEITANGGAGTNTQIRRYLLWQEQGTHCPYCGSPLGLAEVLDGSQSHIEHIIPRSLTQVGRKRSEIVIAHASCNNQKGDRTPWQAFGHDEQRWTIIEERASALKKNNKFRKAKLLLLKDFEREVLNDQSIADFADRQLHQTSWIARAACQWLTQLCSNVFAARGEFTALLRRSWHLDTVIPEIRLEHGLSVLDIDGKSVTAEEFANYRRAWEGHGRAPGRILDKRLDHRHHAIDALVIGLADRSIYQKLARNYKQSLAEGPTAGHRHEWQAEPPLANVREQAKEMIDTCRLTHKPDRFPAGALFQETAYSLKVNREDNSASLASREVLSGLLDEKSPEKTRKNLASIASVEVREFVLAEFERRIASGETPKQALSRPVQYPRYRTQIWRVRRMRSDVSAAKARPVIFSSRAGEHSKLLLPDGNAYLEVKGAGRGATVRVVSLAEAATAADVEPSMEVRRFFKGDTVIDGDDGSTLIVKQVVAPTDGQPMLRLVPIFETREWAALRARDGRRQIAGAQLIRLIHADVCTSSVAAGRLSPPRN

SEQ ID NO: 18265 - protein, 1091 aa, unidentified
  REGION 1..1091: note = Cas Enzyme sequence
VKYRLGLDVGTASVGLVAYELDDSGRPVSVPYHSVRIFDEPLLPAKQGGVGELKRAARRETRQQMRLHQRRARRLRKLAHLAHLLGIDSEAVAHRRKPHILEVRAQAATQKVAMEDLLRIFLHISKRRGYAGTFRDRKGGKMGEVQTGINDLRKAMDGAGCETLGEYLLHRHRQGQRLRLKADDKKLYANREMIRNEFDCIWTTQEREHEQLCGGHEGRPLREIFEEAIFYQRPIRILSAGNCSLETSLPRSPMVQPAFQEFRIEKQIADLRWAKKGRRHPKPLEEPAKQVIRRLLADRERVKFEQIYKALEKEGIPPAPGEYLNLSNGDREDLRGNGTNVCMKKLGLEQKWRNLTDGHRITALNLLADVGAPDVFSTQDWHKRIARGRKRADGKPEYRCIPREVANFINGMAEMEKLDWLSKMGFEAGRSSYSIKALRRLTDAMREKNLDETDAIGLLYPQSTARREELLGELPPHEQTGNIVVDMSLRQVRREVNAAIRQLGGPPESVVVELSRDMPLGVKRRGEIVDKINKNRKARKKAALEIKEHTGNAASKSAITRYLLWTEQDQRWCPYCTEPINISAALDGSKTNYEHILPRSLTRIGKRRDYLVLAHRSCNDSKGAQTPREKWGSDPERWKVIEARAKQFGKKKKLGKMRQLLSKGSGESLLDDEEIGDFSDRQFHETSWISKACAQWMKAVCSDVAVSRGFLTASLRRKWGLDTVIPEVRIEEKLPIFDRENELITREDFERHRAYWEERGGTEDSSKTSRKIEKRIDHRHHLIDALVIGLTSRSLYQKMARAHKMDAEKADFSTKRRSIPLRAEPPIRNIRKLALGLVRNCNLTHKCDRWLGGPFFTKLPLAVVEIDGQDWFVQKKTLTEIATGKVETVRNRINRIVSQSTREAVLKAFDERIELGKNPKEALSEPILDPHFSKPIRRVKMRVWERADGAISVKHMGKIQNKIFAKYLKTDGYAYLELDKRQGNASLVTLYELIKSGERKLSQDFCRFFKGDTVLDKSDNKLYIVRQIRANDKGTLAMTLITESQIFAEIQKMDMSINKKGDYVGRSRIVSGEELLKLQPIPDGWPPHSSD

SEQ ID NO: 18266 - protein, 1014 aa, unidentified
  REGION 1..1014: note = Cas Enzyme sequence
LGEYLWHRHRQGQDLRLKGHGLYADREMIFNEFDRIWARQEGEHKQLCGEHEGRSLRKTFEEAIFYQRPIRILSAGNCSLETSLPRSPLVQPAFQEFRIEKQIADLRWAKKGRRHPKPLEEPAKQVIRKLLSEREKVKFEQIYKALEKQGIPVASGEYLNLSSGDREDLRGNGTNACMKKLGLEQEWQNLSGGHQITALNLLADLGSPDVFHAQDWHKRIARGKKRADGKPEYRRIPCKVVNFINSMVKMEKLDWLSKMGFQAGRSPYSIKALRRLTAAMREQNLDEADAKALLYPRATKAVSRGEMQGELPPHQHTGNVVVDVSLRQVRREVNAAIRKLGGPPDSVIIELSRDMPLGVERRGEIVGRIKKNRIDRNKAKEEIEAYTKRAASQSAITRYLLWSEQDQQWCPYCTETINISDALDGSKTNYEHIFPRSLTRIGRRRDYLVLAHRSCNDEKGAQTPREKWGDNPERWKVIEARAKQFGKKKKLGKMRQLLSKESGESLLDDEEIGDFSDRQFHETSWISKICAQWMKAICSDVAVSRGFLTASLRRKWGLDTVIPEVRLEEKLPIFDGENQLITREDFELHRAHWEERGGVEDSGKTSRRIEKRIDHRHHLIDALVIGLTSRGLYQKMANVYKKETEKAGASASKRNIPLNAEPPIRHIRKLALALVRNCNLTHRRDRWLGGPLFAEQPLAIVEIDRKDWFVQRKTLVEIARKSRKSKDEGWEKTVRDRIDKIHPSSIRKIIKDEFDRRIGLGMNPKEALSEPVFDRQFGNAIRRVKVRSKDWFAQKETLIEIAKNPKKLNDEGWEIMVRSRIDRIHPSSIRDIIKEEFDRRIGLGMNPDEALSEPIFDRKSGNPIQEVKVLAKGRAEGSFLVKHKGIIQNKQFEKYITADGYAYLEVDARQENARLVTLREATSNRFSKSGDIRRFFKNDTIYDPEDGAYYVIRQIISGAGGKLAMTRITESKTFDQIQAADAKIRKMGDYDYHKRAKKISDKKRLSSLRIMPDG

SEQ ID NO: 18267 - protein, 1090 aa, unidentified
  REGION 1..1090: note = Cas Enzyme sequence
VKYRLGLDVGTASLGLVAYELDDQGRPVSIPYHSVRIFSEPLLPPAKGAGIGELKQAARRKTRQQMRLHQRRARRLRKLAHLAPLLGIDPEAVARRRKPHILEVRARAATEKVDLEDLLRIFLHLSKRRGYAGTFRVKKSGDMGAVQTGIGDIRKKMDEAGCETLGEYLWHRHRQGQDLRLKGHGLYADREMIFNEFDRIWARQEREHKQLCGEHKGRPLRKTFEEAIFYQRPIRILSAGNCELETSLPRSPLVQPAYQEFRIEKQIADLRWAKKGRRHPKPLEEPAKQVIRKLLSERERVKFEEIYEALEKTGIPPAPDEYLNLSEGGREDLHGNVTNACMKKLGLESEWQSLTDGHQIAALNLLANTGSPDIFYARNWHENIPKGKKRADGTPEYRCIPGKVVNFINSLAQMEKLDWLSNMGFDSGRSAYSIKALRRLATAMREKGLDETDAISLLYPQVANAAMREELLGELPPHQHTGNVVVDVSLRQVRREVNATIRKLGGPPDSVIIELAREMPLGVKRRREIVDGINKNQRARKKAAREIEKETGKAASNVAIMNYLLWREQDEQCPYCGKDIGLPDALDELKTNRDHIIPRSITRIGKSRNYLVLVCHSCNDEKGARTPREKWGDDPERWKVIEKQAKRLGKKKLLGKMRQILSKESGESLLDSEEIGDFSARQLQDTSWIAKNCAQWMGMICSNVAVSRGILTESLRRKWGLDTVIPEVRLEKKLPVFDREDQLITQKDFERHRAYWEEGGEEGDSSKTHRKIEKRTDHRHHLIDAMVIGLTSRGLYQKMAQAYKRETEKMASPSDRRSIPLRAKPPIVDIRNLALDIVRNCNLTHKRDRWPAGPLFDLKPVSIYEGKFSQRWELTKLAEKLSDKVSDNPEKRAKDLAAGLKQINKIANPSTREIVERAYEERIATGKSPKQALSMPILDMRFNKRFGTQIRRVLVRYDEKAKGQITVKHGRNGELKKYLKTEGYAWLEWDAQKGEARLVTLYEAMKSGRSEAPKGVRFFKGDTVLNASDEKRYVVRHIKAENGGGLVLTLHTETREVRHMGSDSGKIRVSGKNLSKLSLISDDWPPHSSE

SEQ ID NO: 18268 - protein, 1091 aa, unidentified; identical to SEQ ID NO: 18265
  REGION 1..1091: note = Cas Enzyme sequence

SEQ ID NO: 18269 - protein, 1090 aa, unidentified; identical to SEQ ID NO: 18267
  REGION 1..1090: note = Cas Enzyme sequence

SEQ ID NO: 18270 - protein, 1014 aa, unidentified; identical to SEQ ID NO: 18266
  REGION 1..1014: note = Cas Enzyme sequence

SEQ ID NO: 18271 - protein, 1136 aa, unidentified
  REGION 1..1136: note = Cas Enzyme sequence
MLILLAKILQSGLGGKMRWRLGLDVGTASVGAVAIELDANGNELGVPWHLVRIFQEPNEKGQTGLTPKKAARRLARQQRRQLERRARRIRKIAHLAPLIGLDPAGVPPDGEAGRNLPALRARAARERIELPDLLRVLLRLVKRRGYAGGFRAVKADKELGIVQQGSSELRQQMEELAQKRGMASVTLGEYLLDRIERGLPARLKIGRADEGIRDVFALRDMVRSEFDQIWAEQEKHHPILKGIYLDRPVKSWFDEAIFFQRPLKSAAPSVGLCPLERNLPRAPRAQMAVQAFRIEKTLGDLRWGTGARATPLESGQLTMLRDILNTPGLLTKDGTITFKKIYKILEERGCAAPANRSLNLERASRDELKGNVTLKAFDLMGLLEPWQALASGHQISVINLLADLGSPEQLDTDDWHERFVKSGADKKKKAAARSGDLGARRRFKPEVIAFINTLRNNDGYGRLAAMKLETGRAAYSVKALQRLTEWLQSPSWRDEPGPVARVDEDAAVRECYPERFKPVNVSGELAPPPKTGNDTVDVALAQVYWVIKDALQTLGNPPTEIVIEFGREVGLGAARRNEWEQESKKNQVQRKRARDEIEKHGHEPRKVAIRRYLHWQEQDTHCPYCTRQISLNDALDGQETHIEHIIPRSLTQVGRKRSEVVLAHANCNTQKGDRTPYQAFGETDRWVVIEERAEALVKHKQYRKAKLLLLKDFEQEVLTDESIAEFADRQLHQTSWIARDAAQWLRGLCPDVFAARGEFTAILRRSWRLDTVIPEVRLECGRAVLDTEGNEISREQFDELRHRWEGHGRAPDRVIEKRLDHRHHVVDALVIAQCTRKTYVKLAANYKASLEANAGRASAPPKWQIEPPLADIRGTALWIVRECRVSQKPDRYVSGKLFQDTAYSEVKGVTSKSGKGAIASRTQLIDLVDNKSLEKTRAKIRLIASDEVRDVVLKEFEARISQGQTPRQALSRPVLYPRYGTQIRAVRVIRDDTSLENAVPIRFRGRRGQGEHVKLLLPDGNAYLEMSGEGKEVKGEPVPLYKAVKAKGTETDVGQRFFKVDTVIDSKDQAVLVVKWIKAEAGGSLILAPVFESRPIEDLTARDGRRKISGKGLKRVTRADVGPPNTTAGGSTPPGD

SEQ ID NO: 18272 - protein, 1064 aa, unidentified
  REGION 1..1064: note = Cas Enzyme sequence
MLYLLALDVGTASAGYTIYLLDENMQPFRLLYGDSRIFSEPTIAQTGELKKAKKRLTKSARKQLVRKGRRYRHMSYLFPLLGLSSSEVSTVSKMKENREKSVLALRAKAVEQEITLPELMRVFMHMQKRRGYAGSFRVKTKDSDKGKAEAGVEQTHAALSTEETVGQYLYERYQKGESTKNVYALRDDYQKEFDRIWNTQMEYHDVLKRCDSDGVSIKERFKEAIFKQLPIQGFSNKVGKCPLIEGEIRAPKAHPIFQEFRIQETLNNLSWGRKGKGLALEQRSVIEQMLTRKTEVSFDTIYKQLKKNGDMPETGVCLNMDTPNRDVIHGNSTLAGFKTLKLEDVWLDLDDETQDAVIRFLADMTTPELPDIPGWREQTTPEAADFIDKMVDTGKFNRLSKMRNFESGRASYSVEAMQQMLPLIRKGERTEEVVARLFPDDDFVPLGYLPMLEDTGNALVDVAMKQVKVVVDEIYTCLGNPAQVIVEMGREMGVGAEQKKNRERQQAKNRTANRSLNEELIEGDHKPARENRLRLQLWKEQGGDPNLSEAKIAHCIYSGKPITLSDALDGHSTQIDHIRPRKRFFDTRRPQYLTLCVAKANKFKGDRTPWEAFHDSPEANGIHYDWDDLQARVKQLPRDARFKKKLLLSKVTEAQEENEFVDRQMHATRWVARLTGQWMKHICPDVWTSKGWLTAQLRRQWGLETVIDEVRRAEGLPLCKNKFGEWSKRMDHRHHFIDACVIGLTSRSLFQKAAKAFRDQAGHADNWNDIEFKADPPIEVQVLRRQVLDVCRKMVVSHKPDRFLSAKLFGDNPFGLQSTIEGDEERKWLTHRVPVIDLVSKTTKNGREALPETTARKNLEHVAGKELQTLLLDKLDECLLEDIPFQQGFANLRRYTSEKSPPIKLVKIRVTKFDSESHQIIEHRQAQLPGKRYKVLQSVENAYVEVKEEDDGVDVKVVPMFKALAAGKPGKRICRFFKGDMVKTSADTQVYVIQKIARPSDSKPVRIWLIPHTESRTVGGNADYAGMKSSDGLVVVRGDDAQYLRIFHTTPAGLKPVIGKLLRE

SEQ ID NO: 18273 - protein, 1024 aa, unidentified
  REGION 1..1024: note = Cas Enzyme sequence
RKSRINVEKRSIKGRIKAWQSFFSLFEEGKLSYNSKSDRLLGQYLAYRYDNNLSLKLAPKYSAVKLYAHRDLLEAEFERLWTMQAQFHPILNGNQTTGGKEESIKGIFHQALFFQRPLKSPAAMVGRCPLEKDLPRAPMAQPAAQAFRIEKQLADLRWGMGQRAKALSSEQKTVIRELLHNQATVTFKNIYIALEQADCPGELGRRLNMDRSSREELTGEKTRAALRSAKINLLEPWDALDRNTQVQVINFLADLGSPEQLYDQHWPAQFSAGFIGFINKIKESAGYGRLTPMGFDSGRSAYSVKALEKLTQPMREYNVDEHNAIDKAYPDYYAKKPPLTKLPPPPLTGNTVVDVALHQVELEIRKAIKQLGGLPSEIIVELARDMALGVKRRNAIEDENTKNKNLRKKAADELQKEGLPDSKTNVFRYQLWEEQDKRCPYCDGGQFSLNEVVDGNATHIDHILPRSLTQIGRKRDQSVLAHIACNHAKGDNTPREAWGGDPPKNRERWDAVQDQARRFRDKKHHRKLEGKARLLELEDFDDETVKGFSDRQFQETAWIAKLTAQWLRNICPPGEVHVSRGQMTAHFRRIWHLETVIPQVRFEDKLPVLDTDKEPISQEDFDRHRSFWEGRDHQEEVERTDRRMDKRLDHRHHLIDALVIGLCTPPLYRLMASEYKQKAEQKKQGKLRLSVEPPFHDLRNKALDLVRHCNLTHKHDRFPDGPLFKETAYGMAEVLPDGKIRLGLKPPSLTGGGEPPGNAVELSSKAPSPNGGGLGWGRVKSMVSFPFDRPPPSLPPLGGCVNSTALEPPGGERRLTLRMKLADFVDVKKDTPDKVREKLQDIISAEVRELVLEAYDQRIASGQKPLQALSEPVYYPHYQTPIRAVKVFVANKPGAYLDADDMRPVIHHSRQGWHYKLLPHEGNACLDVWAVEKGVETRLLRPVEALMEKRKGIKPPKGVMRFYKNDTVQHFKGGKLYLVRQIWSNNGGILVLTLATEAREVRDMNAAEGLKKVSGKSLLQWRRV

SEQ ID NO: 18274 - protein, 1084 aa, unidentified
  REGION 1..1084: note = Cas Enzyme sequence
VKYRLGLDIGTASVGLVALELDGEGRPVKPVHHSVRIFDEPLLPPKSGGVGKTKKSGRRVHRQQRKLHMRRARRLQRIAQLAPLMGLDPKTIPADKGQRVHKLRAQAATVEIPLEDLLLVFLKMVKRRGYYGGFKVKKSGDTGMVEIGIGKLKAEMKKAGCGTLGEYLLHRIQNGQHLRLKEEGLFAHRDMVEEEFNRIWDVQEGRHEKLRDEDLRKDFHKVIVLQRPLKSPAHMVGNCSLEPMLPRAPMAQPIMQAFRIEKQLADLRWGASSRAEPLTAEQRNVIREQLQAKPEVELPALYKVLEKSGCPGPQGRELNYERGDRQVMTGDRTAAAMKWLGLLQDWNALDAGHQISVINLLADMGSPDAFDNPQWAENLVGAKVGANKTQRNIKPEVKHFIDQMVTTGKFGRLSEMKFDGGRASYSIKALSKLVPIMREKGLDEHDAIAAAYPDNEPGTKLEKEKELPPHPSTGNTVIDVALGQVRREVNAAIKKLGTPPSQIIVELSRDMKVGLTKRGKINDKMRANEKRRREAAGTIEEHTRKAATESQIRRYLLWQEQGEKYCPYCERHINKLSDALNGNETEYEHILPRSLTRIGKKRDFLVLAHKSCNQEKGKRTPRQAWGHDEERWNIIERRAEQFEKGRKITIAGKERTLFKRPGKARQLLMQDFENEALSDKIIDNFTDRQFQETAWIAKACGKWLRSVCADVSFSRGLLTAHLRRNWKLDTVIPEVRFEEDLPVFDEDYRSNTKESSQQGCAVSKDDFKKYRSYWEGHHGDGIPRTHRRLNKRVDHRHHLVDALVIALTTRRMYQRMAKHYKQVTDSGKNSLRLYAEPGIKGICALALDMVRECQPSHRPDRWPGGGFFKDNPGAIVEENGERFYARRKKLTDLGKTDMDKILPESVREIVGNAYKSRIQKGADHESALKEPIFHPHWKTPIRRVLVRRNKAEDDVLIEHGDSQRIQGKAADSKSSLHKYLEPDGYAYLEYIPGDLTTEPRLVRLHEAKSTSSQTVRLYKKDTVRDSQDERRYVIHQIMAEGPALFLSPVTESIADIGKVRGNRKRKIFGKQIAKRLTLVKDERP

SEQ ID NO: 18275 - protein, 1007 aa, unidentified
  REGION 1..1007: note = Cas Enzyme sequence
LNEAVHPHEIGRAIFHMAVRRGFKSNRKSDKSNTDTGNLKQAIFKTRQAIADLGMRTLGEWLAAKYELHAKGEFLRNRDIKADNAKPNAKKEYRLYIDRQMIEDEFDLIWATQAGFAPAVYTAELGHKLKDVLLFQRPLKSKKGEVGRCTLEPEEPRAALALPSVQQFRIYQELNHLRIKGSARINEADRALTLAERDALAAMLEKTDKLSLTALKKALGLSSAAELSIESSRKELRGNATSIKLASPACFGAAWHGLDLAVQDALVNAMIEAQDDAALLAELREGWPQLMQGLSAEQEQAVVDAVLPDGYGKLSSKALATVLPALKSDVMTYDKAVLAGGYDHHSQVGGVYETGEVNMPELPYYGQPLRRHVSFGTGKVGDADEIRYGKIGNPTVHIGLNQLRKVVNAIIKKYGNPTEIVVEVARDLKLSQKKIDELNKENRENEKKNEAYRQEIVGAGLTPSSHYLQKVRLWHALSATPANRKCVFTGRAMALHDVLSNATEIEHLLPYSRTLDDTRANKTICFVEANRIKGDRSPWEAFGERKVAGYDWADILARAANFANKRTRDRFAEDAMAKFNDENEFLARALNDTAYLSKMAKEYLMCVVPKPENVRVIPGQMTEKIRRALGLNQVLVDLGDEARKLAAAQGATLEEGEDGEGANLAANLESDTNAEPADDKAEVAPETEAEKARKGEVAAEKNRNDHRHHAIDALVVALTDQGLLASFQRESKYQQHYAQKSVVARKMRPPFPEVDKHGVMLNDAECRQAFRARVKEKVAQITVSHKRDHGYQGQMMEETSWSPKDKRGNVAIAFSAKKGNRFKTHDRQPLDESGQPLPFKKYVGGSNYAIEITATLDKKGQPKWEGTVLSTYDAYKIVQKGRAAGLSLAEAEKGLRHPTLAQNGQPLVMRLMINDVVAMNTANGRCLYRVVKMKLDGQITFAPLHEANVNIRNEARKNYDKDKASGKAVIDPSLHFAYVTKTAGSLQKSGGRLVSVSPIGDVQYLKG

SEQ ID NO: 18276 - protein, 1140 aa, unidentified
  REGION 1..1140: note = Cas Enzyme sequence
MKKLKKPMIYRLGLDLGATSIGWAIVRLNQPKVAETAQAHEAVAQGKLKPSSIVTMGVRLFPDGRTDKDKTSLAVARRLARGARRRRDRVIARKNRLLDALMVAGFMPSIAETEARRELVDMNPYEIRARALNEAVHPHEIGRAIFHMAVRRGFKSNRKSDKSNTDTGNLKQAIFKTRQAIADLGMRTLGEWLAAKYELHAKGEFLRNRDIKADNAKPNAKKEYRLYIDRQMIEDEFDLIWATQAGFAPAVYTAELGHKLKDVLLFQRPLKSKKGEVGRCTLEPEEPRAALALPSVQQFRIYQELNHLRIKGSARINEADRALTLAERDALAAMLEKTDKLSLTALKKALGLSSAAELSIESSRKELRGNATSIKLASPACFGAAWHGLDLAVQDALVNAMIEAQDDAALLAELREGWPQLMQGLSAEQEQAVVDAVLPDGYGKLSSKALATVLPALKSDVMTYDKAVLAGGYDHHSQVGGVYETGEVNMPELPYYGQPLRRHVSFGTGKVGDADEIRYGKIGNPTVHIGLNQLRKVVNAIIKKYGNPTEIVVEVARDLKLSQKKIDELNKENRENEKKNEAYRQEIVGAGLTPSSHYLQKVRLWHALSATPANRKCVFTGRAMALHDVLSNATEIEHLLPYSRTLDDTRANKTICFVEANRIKGDRSPWEAFGERKVAGYDWADILARAANFANKRTRDRFAEDAMAKFNDENEFLARALNDTAYLSKMAKEYLMCVVPKPENVRVIPGQMTEKIRRALGLNQVLVDLGDEARKLAAAQGATLEEGEDGEGANLAANLESDTNAEPADDKAEAAPETEAEKARKGEVAAEKNRNDHRHHAIDALVVALTDQGLLASFQRESKYQQHYAQKSVVARKMRPPFPEVDKHGVMLNDAECRQAFRARVKEKVAQITVSHKRDHGYQGQMMEETSWSPKDKRGNVAIAFSPKKGNRFKTHDRQRLDESGQPLAFKKYVGGSNYAIEITATLDKKGQPKWEGTVLSTYDAYKIVQKGRAAGLSLAEAEKGLRHPTLAQNGQPLVMRLMINDVVAMNTASGRCLYRVVKMASTGTISFTPLHEANVNARDIARNNYNKDLKAGKDVSGLDPSLHIAYVFKTASSLQKAGARVVSVSPIGDVQYLKG

SEQ ID NO: 18277 - protein, 968 aa, unidentified
  REGION 1..968: note = Cas Enzyme sequence
MMQKLIEHGFFPASKMERKALERRYPDPYVLRVRGLDEALPPEAFARLLFHLNQRRGFKSNRRTDKADAEGSVLKNAIGSVHRELDERGMRTVGELLYYRLAEQRRSTPGHEKGIRARYRETKIVDSDGKKRINKSYDIYIDRQMVADEFDRIWEVQASFDPDLFNERARQDLRGTLLYQRDLRPVVPGRCVLLPSESRAPLALPICQRFRIYQEVNNLRVQDEFLRDVPLTLEQRNMVVEALEKYSKRSFDQLRTLLQLSGNSQFNLEDVKRRELKGNATTAILSGKKYFGKDWHEFSHEMQDEIVEKLCTEESETHLVKWLVERAHIDESRAREVANVTLPDGYGSLSHAALKRLVPVLKASVCSYSDAVREAGLGHHSQFEFSYEADEVEDWVNPETGEVSVAFKRLPYYAKALRRHVAFGTGEPGDPDEKRYGKIANPTVHIGLNQLRVVVNALMDRYGRPSEVVVELARDLKESKKRRAEIINQQADRQKKNEEIRKKIADARGCREDEIKRWEIEKWILWEELSRNPATRCCPYSGEQIGVEMLLSNEVEIEHILPFSRTLDDSLNNKTVCTVAANRVKGNRTPWEARDDFALRGWDYSGILARARQMPSKSKISRFAEDGYEKWKGEGEGFLARALNDTRYLSRVAKAYMQLVCPGSGVRVIPGRMTAILRRHLGLDELLSDSGVKNRFDHRHHAVDACVIGVTDQGLLQRFANASAQAREEGLRKLVKDFSPPWPTYREHVKRAIDSLWVSHRPDHGYQGAFMQEEAYGFSQDGKVKQKAKGEDSREVKNLIKISDSKQSERHGVNPDGSPRPYKGYIGGSNYCIEIFRNDEEGWGGDVISRFEAYQIIRNAGGEKEGVEKLRNPSRAQNGKPLVMRLMIDDSLRLELSGGVVTMRVVRISQNGQVFMAPLNEANVDARDRDKGDPFKLVSRKPGTLWALKARQVTVSPIGELRDPGFSG

SEQ ID NO: 18278 - protein, 1056 aa, unidentified
  REGION 1..1056: note = Cas Enzyme sequence
MPKQKSTRYRLALDLGSTSLGWAVLRLNEQHEPNAIIRAGVRIFSDGRNPKDGSSLAVTRRAARAMRRRRDRLLKRKARMMNKLVEYGFFPADVAERKKLERINPYELRAKGLDAPLTPGEFARALFHINQRRGFKSNRKTDKKENDSGALKAAISHLRQQLHERKARTVGEWLWQRLQAGLGTRARYRESRVAQANGKTRIEKSYDLYVDRQMIAEEFDALWAAQAAFNPQQFSEQARGELRDVLLFQRDLRPVRPGRCTLLPDEERAPLALPSVQRFRILQEANHLRLLHPDLREEPLSLAQRDAVVDALEHNSKRTFEQLRKLLKLNGTVKFNLEDEKRKELKGNATNAALSKDGLFGENWWKFDEALQNEIVWQLVSEQSEEKLQNWLQANTGVNATQAEAIANAGLPDGYGSLSRKALARIVPALREAEVVNGIDVPRTYDQAVQAAGFAHHSDLDSGFGFEHSHDEVERIGERVIASTGEVKPVSAFKQLPYYGKALQRHVAFAKEHPRNEEERYGKIANPTVHIGLNQLRVVVNALIRRYGRPTEVVVELARDLKQSREQKQEEQKRQADYQKRNERIRREIASMRGCAEERVSHADVQKWILWEELSFDVADRRCPYSGVQISAQMLLSNQVEIEHILPFSQTLDNSLNNRTVAMRQANRIKGNRTPWQAREDFERQGWSYDSILQRAERMPKAKRYRFSRDGYERWLKEDKDFLARALNDTRYLSRVAKTYMELVCPLGTRVIPGQMTALLRAKFGLNDVLGLNGEKNRDDHRHHAVDACVIGVTDQGLLQRFAQASADVRGNGLEKLVENMPVPWATYRDHVKRAIQCIWVSHKPDHGYEGPMMEETVYGIRKDGSIRQKTKADGSTGREITHLIRITEPTQNLRHGVDAQGQPLAYKGYVGGSNDCIEITQNEQGKWEGNVITTFQAYDIVRRLGSKQGPRRLRHPTLAQTLDVYGKPKKLVMRLMIDDCVRLELDGNKKTLRVVKITGNGQVFMAPVHEANVDKRNSDKTDPFAYVSKYAGSFQKAKARRITISPIGELHDPGF

SEQ ID NO: 18279 - protein, 1056 aa, unidentified
  REGION 1..1056: note = Cas Enzyme sequence
MPKQKSTRYRLALDLGSTSLGWAVLRLNEQHEPNAIIRAGVRIFSDGRNPKDGSSLAVTRRAARAMRRRRDRLLKRKARMMNKLVEYGFFPADVAERKKLERINPYELRAKGLDAPLTPGEFARALFHINQRRGFKSNRKTDKKENDSGALKAAISHLRQQLHERKARTVGEWLWLRLQAGLGTRARYRESRVAQANGKTRIEKSYDLYVDRQMIAEEFDALWAAQAAFNPQQFSEQARGELRDVLLFQRDLRPVRPGRCTLLPDEERAPLALPSVQRFRILQEANHLRLLHPDLREEPLSLAQRDAVVDALEHNSKRTFEQLRKLLKLNGTVKFNLEDEKRKELKGNATNAALSKDGLFGENWWKFDEALQNEIVWQLVSEQSEEKLQNWLQANTGVNATQAEAIANAGLPDGYGSLSRKALARIVPALREAEVVNGIDVPRTYDQAVQAAGFAHHSDLDSGFGFEHSHDEVERIGERVIASTGEVKPVSAFKQLPYYGKALQRHVAFAKEHPRNEEERYGKIANPTVHIGLNQLRVVVNALIRRYGRPTEVVVELARDLKQSREQKQEEQKRQADYQKRNERIRREIASMRGCAEERVSHADVQKWILWEELSFDVADRRCPYSGVQISAQMLLSNQVEIEHILPFSQTLDNSLNNRTVAMRQANRIKGNRTPWQAREDFERQGWSYDSILQRAERMPKAKRYRFSRDGYERWLKEDKDFLARALNDTRYLSRVAKTYMELVCPLGTRVIPGQMTALLRAKFGLNDVLGLNGEKNRDDHRHHAVDACVIGVTDQGLLQRFAQASADVRGNGLEKLVENMPVPWATYRDHVKRAIQCIWVSHKPDHGYEGPMMEETAYGIRKDGSIRQKTKADGSTGREITHLIRITEPTQNLRHGVDAQGQPLAYKGYVGGSNDCIEITQNEQGKWEGNVITTFQAYDIVRRLGSKQGPRRLRHPTLAQALDAYGKPKKLVMRLMIDDCVRLELDGNEKTLRVVKITGNGQVFMAPVHEANVDKRNSDKTDPFAYVSKYAGSFQKAKARRITISPIGELHDPGF

SEQ ID NO: 18280 - protein, 1074 aa, unidentified
  REGION 1..1074: note = Cas Enzyme sequence
MWMGARTDARKRQDVSGIMKYRLGIDLGSTSLGWAVFRLNDEGLPVALIKAGVRIFHDGREAAKSGGVGAPLAVKRRIARGLRRRRDRMLKRKKRLMNQLIAFGFFPEDKEARKRLETLYPNPYALRAAGVERALKPEEFARALFHLNQRRGFKSNRKLDKEPDAGAGADVVKKSSEESAMKAGISDLRKTLKERHYTAGQLFNERLGQGEQVRNRSVLVTKGGKEQLESTYEMSIDRQMVADEFDAIWKTQAGFNPTLFNDKARDALRDTLLFQRPLKPIRPGRCTLMPEEERAPLALPSSQRFRIYQEVNNLRISDDQMNERALTLEERDKVVALLEGQGESKFTNLRKLLKLSGTTHFNLEDGKRDRLKGNAVSIALSKPNAFGDAWASFDEHLQDEIVWKLVDEDSEKVLVDWLVATTKVDAERARAIARVRLPEGYGNLSRKALERVVPELRKGVVTYSDAVQAAGFEHHSKLGFDYAESDVEAYIDPLTGEQLVDPETGEIKVVFKSLPYYGKPLRRHVAFGTDNPKDPEEVRYGKIANPTVHIGLNQVRQVVNGLIRFYGRPAEVVVELARDLKQSKKEREEEQREQKRNQDRNERIAKDIAAILKIDPSEVKKRDIVKWKLWEELGTDAADRCCPYSGQQISASMLLSDQVEIEHILPFSRTLDDSMHNKTVALTKVNRVKANRTPYEAREDFERQGWKYDDILMRVNGFPRHLQRKAKRFAPDGYEQWKGKEQDFIARALNDTRYMSRIAKQYLELVCPRGVRVIPGGVTAKIRHHLGLNDILGEDGLKNRNDHRHHAVDACVIGVVDYSFMQRLATASARAHEQGMDRLISGFEPPWPTYRDHVVRAIDNILVSHKPDHGYQKAMLEDTAHGIRKDGTINPSRSSNKANISFLNPISEPGQERRHGVDADGKSLPYKGYVGGSNYCIEIFKDEKGRWAGEVISTFDAYQIVRKGGGLKQGVSLLRNKACAQNGRPLVMRLMIDDTVKMDVNEFEPRTVFRVVTIFSNGQVFMAPINEANVDARNRDKTDPFKYISKMAGSFKKSKARQVTISPIGRLSDPGFKE

SEQ ID NO: 18281 - protein, 966 aa, unidentified
  REGION 1..966: note = Cas Enzyme sequence
VFMHLAKKRGYNGKVSLAQREKIRKEQEKRHSKGNHSKEPGTQEGIINLEHALKQAECATIGQYLYHLQKKGGTTKLKELGLHCTREQVHAEFNAIWQEQSKHHKELTKAGYEQLTQAIFFQRPLKSVAGMTGGCQLEPNLPRAPRAHPLAQEFILRKQLVDLRIYTLGNRKHARSLDQAQVQFLLTLLQQQQSISFEKIVKTLSSHGLVKADSKLNHTSLSKPELKGDTTRATMRKLGMLEQWQALEPGNQTTIINLLADMDSSLFKQPDWHMSIANAKTSECRQFKQPVIDFINQLAQHPKYGTLSAMGFASGRLAYSLKALRNLNQYMADNPKSDEYEATQAYYGDRLQEREQITRTNQLLPPPNTHNVVVDRALRQLYYSINHVIEKLSEKPQEIVIEYMRDLPKSPTRRHEEQKAMRANEKINKQAKEELKKHGSPQTNNNIFRFKLFKQQKHYCPYCNAQINLSQAVDGNATNHEHIYPKAITNVGRQSKHLVLAHIACNNKKGKRTPYLAFHNDPSRWQAVERMAKIFTDSKLDFKAKALLDDTETIEDVTEKQISDFTERQMHETRWIAKECGKWLRQLCSVESSRGKLTDLVRRRAGLHMLIPRLRWEAGLPVFERGQATTKIKERALIIKEHESEVQKGKISIDKRTDHRHHLVDAAVIGLLTRSLYQRMANEEKAKGHLKDLSIGKLTSSGLNIYAEVEEKVRSTYIHFKPDYHPSGAFFQDTAYRVEHFEEGDRNSRLSHRIDLREQLVGLKKYEKAEKYLQSLVSRNTAMAVAQALNERRQKGKSYKEAITEPFYQHCYGKHTPIIRVRAYAKIGKGHINGEKALPIVKQSKGGKIHKASFLSSGYAYVRVIFDEAGKFIASQSVNLLEHKQREQLPLELGQMETRYYLNEVVMHNNAHWRVAQFKEGGTLCLQQSTEAIPYADARALSKGRVSLVTEIKGKNVAKLVKANGC

SEQ ID NO: 18282 - protein, 1027 aa, unidentified
  REGION 1..1027: note = Cas Enzyme sequence
MMQQEVGHVQPVSQIRKMRYRLGLDLGTTSIGWAMLRLDEENKPCAIIKAGVRIFSDGRNPKDGASLAVARREARAMRRRRDRLLRRKARMMRLLITFGFFPSDIDARKTLERLDPYLLRAKGLDEPLRPEEFARALFHINQRRGFKSNRKTDKAESDGSALKGAIKRLHDVIHPDGLDGRARTVGEWLHRRELVGQTVRARYREQRVQREDGKSRIEKSYDLYVDRAMVEAEFDQLWNRQNSFNPSLFNAEARDALKDCLLYQRKLRPVKPGRCTLMPHLTRAPLALPSQQRFRLYQEVNNLRIVGANGSETTLSLASRDAIIAEMEGSSRKTFASLRKLIGASSGSQFNLEDLKRTELKGNQTSSVLRKADHFGPDWDGFPHAKQDEIVERLITEESEAELVAWLVAETGITESVAERIANVSLPEGYGSLSAAALAKILPELQKDVVTYDKAVLAAGFDHHSNISHASTGEVLPLLPYYGEYLTRHVGFGTGDPADSPEKRFGKIANPTVHIGLNQIRKVVNELIGRYGHPSEVIVEVARDLKQNREQKADQQRQQAENQKRNERIRAELSGLLHVAEYAVKTADIQKFILWEELAADPLERRCPYSGVQISKAMLMSDEVEIEHILPFSKTLDDSLNNKTVAARRANRIKGNRTPAEAATDFAREGWQMEDMLARAALMPKNKRYRFATDGYERWSKDQGFLARALNDTRYLSRIAKEYLNLVCPNTRVIPGQMTALLRGKFGLNDILGRSGEKNRDDHRHHAVDACVIAVTDQGLLQRFAQASASTREQQLSRLVERMPEPWPGYRDHVERAVKAIYVSFKPDHSHEGAMHNATAYGLLGEGQVVTTKVVDGIRRRDPESLRVIEIAAPEQAGRHGTHADGSPRPYKGYKGDSNYCIEIVLNEKGKWIGEVISTFDAYQIVRHGGVDRLRGPVSVSGKPLVMRLMVHDCLRLSVDGKATVVRIAKIKGSGEIFMAEHFEANVDKRDRDPGSGWKYLNKSAGALQKSAARLLTTTPAGQLSRA

SEQ ID NO: 18283 - protein, 1018 aa, unidentified
  REGION 1..1018: note = Cas Enzyme sequence
METRKLRYRLALDLGTTSIGWAMLRLNADDDPIAVIRAGVRIFGDGRNPQDGSSLAVTRREARAMRRNRDRKLKRRAKLMSALIELRFFPQDEEARKALDSRDPYELRARGLDHRLDPEEFARAVFHLNQRRGFKSNRKTDKADNESSALKFAIKRMREGLAEEGLRTVGEWLFKRHSRREPVRARYRETRVAREDGKSRILKSYDLYIDRAMVEHEFDLLWAKQSGFDQSRYSEAALILLKGILFHQRPLKPVKPGRCTLLPEEERAPLALPSVQQFRIYQELNHLAILTDDAREQFVTLDQRNAVARVLNEHSKSTFTKIATLLKLGGSVRFNLEDIKRDSLKGNLTAAKLSDDEMFGASWHGFPLERQDEIVWALLKEEDESALIGWLTKEFDLDEARAERIADARLPDGYGNLSRKALARILPELKAGVVTYDKAVVAAGFASHSALSHGEQTGEILLTELPYYGEPLQRHVGFGTGDPNDPPERRFGRIANPTVHIGLNQLRKVVNALIKRYGNPSEVIVEVTRELKQSRERKIEIQREQAARQTQNEQWRTDIQAVTGHDATAIDLQKMKLWVELNIKDAADRRCPYTGEQISVTRLFSDDVEIEHILPFSKTLDDSLNNKTVSLRRANRDKGNRTPFEAFGESQSGYEYATILQRANAMPKEKAKRFAVDGYERWLREDRDFLARALTDTAYLSRIAREYLSLVSAPNKVRVIPGRLTALLRGKFGLNAVLGLKGEKNRNDHRHHAVDACVIGVTDQGLLQRFANASASARDQQLSRLVESMPEPFPNYREHVARAVGSVIVSHRPDHNYEGQMHKDTAYGLVGAGVVRHTKVVDGKRVRESERLSVIEFSEPKAAHRHGLLPDGSARPYKGYKGDSNYCIEIIRTDAGRWAGEVVSTFAAYQIVRRSGVAGLRNPGTGIGGRSLVMRISKGDVLKVQIDGELAVFVVAWIRTDGRIALYKCHEANADARDRDKKDEFSYLVKSPGPLQKIAARRVTVSPIGDVRDPGFHE

SEQ ID NO: 18284 - protein, 1018 aa, unidentified; identical to SEQ ID NO: 18283
  REGION 1..1018: note = Cas Enzyme sequence

SEQ ID NO: 18285 - protein, 1026 aa, unidentified
  REGION 1..1026: note = Cas Enzyme sequence
MRYRLALDLGSTSLGWAMVRLDAASNPCAVIKAGVRIFSDGRNPKDGTSLAVTRREARAMRRRRDRLLKRKARMSALLVQYGFFPTDEKLRKELVTLNPYLLRAKGLDAALTPAEFARALFHINQRRGFKSNRKTDKKENDAGALKTAISKLRQDMAATGCRTVGEWLHKRDHHGETVRARYRETKVTKDNGKVGVHKSYDLYIDRAMIEAEFDALWSKQSELNPQMFTSKAREDLRYCLLFQRKLKPVVPGRCTLMPEEVRAPLALPSVQRFRMYQEVNNLRILSDGMREEPLSIAQRDQVIALLEKSRKVTFTKIKKTLGIGSVSFNLEDAKRTDLNGNATSAELARDGYFGNAWFDFENTKQDAVVAQLVSEENEAALVRWLCAETGVSAERAEAIAEAGLPEGYGSLSAKALERILPALRAEVITYDKAVIAAGFDHHSNISAASTGEILPELPYYGIPLQRHVAFGSGKPEDTDEKRYGKIANPTVHIGLNQVRVVVNALIKRYGHPSEVIVELARDLKQSKDQREEENKRQAENQKRNARMRTNIAEVLGITQERVRVADLQKMILWEELSFDVAERRCPYSGVQISVNMLLSEQVEIEHILPFSETLDDSLNNKTVAMRQANRIKRNRSPWQARSDFAAQGWTHDDILARAEKMPKAKRYRFAEDGLQRWLKDDAGFLARALNDTRYLSKISKEYLSLICPQNTRAIPGRMTAMLRGKFGLNEVLGLDGEKNRNDHRHHAVDACVIAVTDQGLLQRFARASAQAREHHINRLVENMPLPWDSYRAHVERAISRIWVSHKPDHGYEGAMFDATIYSAEGDSKVAAKRRAVIPFSAPPDRPTVVARHSTKRNPGGPYKGLLSNSNYCVEICRNEDGNWDSTVLRTFDAYQTIRQASNHAEGLKRLRHRLIGNNGRPLVMRLMIGDAVKLTVNGSPTVLQVLKINGSGSITFVKPNESNISARYAAKLKAQSASKEGLPYDAVALADDFFQQAFSAGSLRAGQVRQVTISPIGELQDPGFRD

SEQ ID NO: 18286 - protein, 1039 aa, unidentified
  REGION 1..1039: note = Cas Enzyme sequence
MAYQTPYRLALDLGSTSLGWAVLRLNSQQEPSAIMKAGVRIFSDGRNPKDGSSLAVTRREARAMRRRRDRLLKRKARMMHTLIRYGFFPADEAARKELQDLNPFELRARGLSEALAPEEFARALFHINQRRGFKSNRKTDKKDNDSGALKTAISKLKQTLQDEECATVGEWLFKRQQAGQTVRARYRQTRMMREDGKSRIDKSYDLYIDRSMVEAEFDALWAKQSALNPALFTEPARQDLKDCLLHQRPLKPVSPGRCSLLPDEPRAPLALPSVQRARVYQEVNHLRILRPGLQDTPLTLAQRDQLVSALEQSHKRTFHQIKKLLDLGDAVQFNFEDPKRQELKGNATSATLARKELFGAAWFNFTAEEQDELVMALLTEENESKLIRWLQERTGVDEARAETIAAATLPEGYGSLSRKALNLILPELQRDVVTYAQAAKEAGFHHSHLSANDEIPGRTFAIEKVIGETGEIKALHVFKELPYYGEYLQRHVGFASPDAKPDDLPEKRFGRIANPTVHIGLNQVRVVVNALIRKYGHPSEVIVEVARDLKQSREQRKEEQDRQTRNQQRNQQLRQDIACVLSIAPERVKPADIQKMILWCELSNNVAERRCPYSGVQISVQMLLSDEVEIEHILPFSQTLDDSLNNKTVAMRQANRVKGNRTPWEARHDFAAQGWDYEGVLYRAAVMPRNKRYRFAEDGYAQWLRDDKGFLARALNDTRYLSRVAREYLSLICPQNTRVIPGQMTAMLRAKFGLNNILGLDGEKNRNDHRHHAVDACVVAVTDQGMLQRFAQASASARARQLDRLVDNMPLPWPTYREHVQRAVQHIWVSHKPDHGHEGGMHNDTAYGLLGNGPVRHHKMVDGVRQLQVENREVIEMFSANAADRHGTLPNGQPRPYKGYDGNSNYCLEIVRDEKGKWCGEVISTFEAYQYAREHGPTSLRNPDTSISGKPLVMRLTANDIVRLKVDGIAQTMRVASIRRSDGQLSLAPHCEANVDARNRDKGDPFSYTTKVPGSLMKAEGRHVTISPIGDVRDPGFKG

SEQ ID NO: 18287 - protein, 1018 aa, unidentified
  REGION 1..1018: note = Cas Enzyme sequence
MASMRYRLALDLGSTSLGWAMVRLNAEHNPCAVIKAGVRIFSDGRNPKDGSSLAVTRREARAMRRRRDRLLKRKARMMTLLVKHGFFPGDESTRKALQTLNPYALRAKGLDHALLPGEFARALFHINQRRGFKSNRRTDKKENDAGALKAAISKLRQDMAATGCRTVGEWLHKRDQVGLGVRARYRQTKVTRDNGKTGIDKSYDLYIDRAMIEVEFDALWSKQAALNPQLFTEAARQDLRYCLLFQRNLKPVMPGRCTLLPEEVRAPLALPSVQRFRIYQEVNNLRVVRQGLREEALTLHQRDQVIALLERSRKVTFAKIKKALGLGSITFNLEDAKRTELNGNSTNAELSKDAYFGDNWLAFDDAKQDAIVMQLVSEENLAALVRWICSETGVDADRAEAIANAGLPEGYGSLSAAALARILPALRADVVTYDKAVIAAGFDHHSNISAAATGEILPELPYYGIPLQRHVAFGSGKPEDTEEKRFGKIANPTVHIGLNQVRRVVNALIKRYGHPSEVIIELARDLKQSREQREQDNKQQADNQRRNKQLRSDIAGVLGISEERVRTADIQKMILWQELSFDAADRRCPYSGVPISVNMLLSDQVEIEHILPFSETLDDSLNNKTVATRQANRIKGNRTPSAARGDFEAQGWAYADMLARAELMPKAKRARFAEDAIARWLKDDAGFLARALNDTRYLSRVAKEYLSLICPQNTRAIPGRMTAMLRAKFGLNDVLGLNGEKNRDDHRHHAVDACVIAVTDQGLLQRFARASASARERQLNRLVDDMPLPWGTDQDKKYYLSVKRAIDNIWVSHKPDHGHEGAMHNDTAYGLLGNGRVSVHKVVEGKRERIEDNLKVIEFTNAKAHDRHGVLPNGDPRPYKGYKGDSNYCIEIVRNENGRWEGEVISTFEAYQLVREHGLARLRHPTMSVSGKALVMRLMIDDVVKLDHAEAIRVLRVAYASSAGTIAFADHHEANVDKRTRGKDLAYVFKTAGSLQKSKARRVTISPIGELHDPGFKE

SEQ ID NO: 18288 - protein, 1048 aa, unidentified
  REGION 1..1048: note = Cas Enzyme sequence
MHHPMRYRLALDLGSTSLGWAMIRLAVGDAPCAVIKTGVRIFSDGRNPKDGASLAVTRREARAMRRRRDRLLKRKNRMTRTLVAHGFFPQNLSECKAMETVNPYALRANGLEQALTPMEFGRALFHINQRRGFKSNRKTDKKDSDSGALKTAINRLREALKADNCATVGQWLHLRHTAGQTVRARYRQTKILKDDGKARIDKSYDLYIDRAMIEDEFNALWARQASLNPALFNETARADLKDCLLHQRALKPVEPGRCTFLPDEKRAPLALPSTQRFRMYQEVNHLRILREGLQEEPLTLAQRDLLVDALETNTRRTFTQIKTLLGLGGAVQFNFEDPKRQELKGNATSALLGHKKHFGPVWFTWSERQQDAIVKQLVHQQNLTRLIQRLKKYCGVDEQCAEAIANAADAGLPEGYGSLSVAALARILPELRRDVVSFAEAAKAAGFHHSRLTDNVEISGKTHPVEVTDSTTGEIKTFHIFSELPYYGEALQRHVGFGSGKLEDTPEKRFGKIANPTVHIGLNQVRRVVNALIKRYGHPSEVIVELARDLKQSQEQRKEEHERQAKNQQRNKDLRADIAKVLRISPERVRTADIQKVILWEELNQKNAADRPCPYSGVPISVEMLLSDEVEIEHILPFSQTLDDSLNNKTVALRAANRVKGNRTPWQAFGAQGMAGFDYAGILQRAGQMPQQKRYRFAQDGYERWLKDDKGFLARALNDTRHLSRVAREYVSLICPQNTRVIPGRMTAMLRAKFGLNDVLGLNGEKNRDDHRHHAVDACVIGVTDQGLLQRFSEASASTRERQLDRLVESMPLPWPTYREHVRLAVSRIWVSHKPDHSHEGAMMEATAYGIAKDGSIKQKKNADGSEKAREIKNVIRISEPRQPLRHGVDKDGKPLPYIGYKGGNNHCIEIVRNEKGKWEGEVISTFEAYQVVRQHGAQRLRHPTESQSGKPLVMRLIRGDFVRLMDDAGQRRTLRLCTLNAAGVMAFIDTHEANVADRAVDKKLPDGTIRKKELAYIFKNAGPLREMKARRVTVSPIGELHDSGFRA

SEQ ID NO: 18289 - protein, 1017 aa, unidentified
  REGION 1..1017: note = Cas Enzyme sequence
MPQKMSYRLALDLGSTSLGWSMIRLNANQEPCAVIRAGVRIFSDGRNPKDGTSLAVTRRNARAMRRRRDRLLKRKERMIRTLIQHGFFPAAPNERKALETLNPYELRAKGLDEALAPSEFGRAIFHINQRRGFKSNRKTDKKENDSGTLKAAIRKLKEILEHTNSRTVGEWLYKRMLGGETVRARYREVKVAREDGKTRIDKSYDLYIDRAMVEAEFDALWQKQALFNPDLFNDIARARLKDVLLFQRPLKPVKPGRCTFLPDEERAPLALPSTQRFRMYQEVNNLRILREGLTEEPLTLQQRDNLIDALEHNGKRSFVQIKKLLGVGGTVQFNFEDPKRQELKGNVTAAILSRDERFGKDWFAFDETTQDEIVLQLIKEENESALIDWLQEKTGIDETRATNIANIGLPEGYGALSIKALSRILPELQRGVITYDKAVLAAGFDHHSNIGPAATGEIFPELPYYGKALQRHVGFGSNAPDDPDEKRYGKIANPTVHIGLNQVRTVVNALVKRYGHPHEVIIELARDLKQNKEQRDEENKRQAENQKRNARLRIDIANALQIGEERVKAANLQKMILWEELSNNVADRRCPYSGVQISVQMLLSDEVEIEHILPFSQTLDDSLNNKTVALRQANRVKGNRTPWEAFGKQVVGGFDYEAMLNRAEQMPKAKRYRFGAEGYERWLKEEKNFLARALNDTRYLSKVAREYVSLICPSNTRVIPGQMTAMLRRKFGLNEVLSENGEKNRHDHRHHAVDACVVGVTDQNLLQRFAEASASAREQHLNKLVESMPLPWPNYRDHVQRAVSHIRVSHKPDHSHEGAMHNDTAYGLRGMGKVGFHKMVDGKRQYIEDNLKVIEFSSAKATSRHGVLGDNQPKPYKGYKGDSNYCIEIVRGEKGKWEGEVISTFDAYQLVRQYGANRLRHPTLSVSGKPLVMRLMIDDFVRLELESGTQTMRVARMSGNGQVFMAPHHEANVDARNRDKDDTFKYISKMAGSFFAAKARQITISPIGEINDPGFKG

SEQ ID NO: 18290 - protein, 1030 aa, unidentified
  REGION 1..1030: note = Cas Enzyme sequence
MQKMRFRLALDLGSTSLGWAMVRLDASNIPCAVIKAGVRIFSDGRNPKDGSSLAVGRREARAMRRRRDRLLKRKSRMTATLIEHGFFPKDEAQRKALADLNPYALRAKGLDHALTPGEFARALFHINQRRGFKSNRKTDKKDNDSGALKTAISKLRASMAQDNCRSVGEWLYRRDATGQTVRARYRQTRILKDNGKNAIDKSYDLYIDRAMIEAEFDILWAKQASFNPNLFHDIARDELRFCLLFQRPLKPVKPGRCTLMPDEERAPLALPSTQRFRMYQEVNNLRILRDDLREDSLTLAQRNTLIDALERNNRRTFTQIKRLLNLPGGVKFNFEDPKRQEFKGNSTSASLARPEHFGEDWFGFDEVKQDAIVWQLVKQENEATLIRWLQAETGVDEARAEVIAQTALPEGYGSLCVQALLRLLPALRQSMVTYDKAVVLAGFAHHSNISSAASGEILPELPYYGLAMQRHVGFGTGKLEDSDEKRYGKIANPTVHIALNQVRILVNALIKKYGHPSEVIVELARDLKQSKDQRDEDSRRQGENQQRNRRYRQDIAGILGISEERVRTADIQKMILWQELSHEPADRRCPYSGEQISATMLMSAEVEIEHILPFSETLDDSLNNKTVALRRANRIKGNRTPWQAKADFEQQGWQFENILARAENMALAKRYRFAEDGLARWLKDDAGFLARALNDTRHMSRVAKEYLSLICPQNTRAIPGRMTAMLRAKFGLNDVLGHHGEKNRNDHRHHAVDACVIAVTDQGLLQRFAAASASARDRQLNRLVDDMPLPWPSYYNHVKRAIECIWVSHKPDHGYEGEMFDATIYSADGYSKIAAKRRTVIPFSAPQDRPATVTRHHTERNPGGPYKGLLSNSNYCVEVVRTDNAGWESTVLRTFDAYQIVRAATNPLEGVKRLRSRFFGSGGKPLVLRLMIGDTVKLAVNGELTVLQVLKINTSGSITFVKPNEANISARYTNKLKAQLAKQAGQDYDQTAISDQFFRQAFSTGSLKTSLVRQVTISPIGELHDPGFRE

SEQ ID NO: 18291 - protein, 1033 aa, unidentified
  REGION 1..1033: note = Cas Enzyme sequence
MLQTQATRHYMEGAMSKMRYRLALDLGSTSLGWAMIRLKDDQPFAVIKAGVRIFSDGRNPKDGSSLAVTRRMARGMRRRRDRLLKRKARMMRLLIEHGFFPDDTAIRQALTNINPYELRAKGLDTALSPAEFARALFHINQRRGFKSNRKTDKKDNDSGALKTAISALRQQLDPEGSEGKARTVGELLWRRMQSGTGVRARYRETRVTKDDGKARIDKSYDLYIDRAMVEAEFDALWAKQASLNPQQFHEAARLALKDCLLHQRRLRPVVPGRCTLMPDFERAPLALPSQQRFRIYQEVNHLRVLGPHLQDTALNLAQRNAVVDALEHHGKRSFTQIKALLKLPGSAKFNLEDEKRLELKGNATSALLSKKDFFGPTWFDFSHQQQDAIVMRLLTEESEAALIAWLQTDFELDEPRANAIANASLAEGYGNLCAEALARILPCMQGDVMTYDKAVQAAGFDHHSQISHAAVSGEILPSLPYYGEYLQRHVGFGTGNPEDPPEKRFGKIANPTVHIGLNQVRTVVNALIRRYGHPREVIVEVARELKQNQEQRKEQQQQQAQNQMRNERLRADAAGILGIAFERVRQADIQKLILWEELSRDPAERRCPYSGVQISAAMVLSDEVEIEHILPFSQTLDDSLNNKTVATRRANRVKGNRTPFDARADFEREGWTYSDILNRAELMPRNKRYRFGADGYQKWLRDDKDFLARALNDTRYLSRVAREYLSLICPQATRVIPGQMTAMLRRRFGLNDILGPDGEKNRNDHRHHAVDACVIAVTDQGLLQRFARASASARERQLDRLVDDMPLPWPTYREHVARAIDNIWVSHKPDHGHEGAMMEETSYGIRRDGSIKQKRKPDGSEGREVSKLVRIAEPSQALRHGTDAEGQPLPYKGYVGGSNYCIELVRNDKGRWTGEVVTRFDAYQIVRTRGSDRLRHPTLSMSSQPLVMRLMIGDTVRAELDGESKLMRVVKIDPSTNVVLADINESGELKKRHDDTSDPFRYTNLRGESFRRTKARRVTISPIGELRDPGFKE

SEQ ID NO: 18292 - protein, 1019 aa, unidentified
  REGION 1..1019: note = Cas Enzyme sequence
MSKMRYRLALDLGSTSLGWAMIRLKDDQPFAVIKAGVRIFSDGRNPKDGSSLAVTRRMARGMRRRRDRLLKRKARMMRLLIEHGFFPDDTAIRQALTNINPYELRAKGLDTALSPAEFARALFHINQRRGFKSNRKTDKKDNDSGALKTAISALRQQLDPEGSEGKARTVGELLWRRMQSGTGVRARYRETRVTKDDGKARIDKSYDLYIDRAMVEAEFDALWAKQASLNPQQFHEAARLALKDCLLHQRRLRPVVPGRCTLMPDFERAPLALPSQQRFRIYQEVNHLRVLGPHLQDTALNLAQRNSVVDALEHHGKRSFTQIKALLKLPGSAKFNLEDEKRLELKGNATSALLSKKDFFGPTWFDFSHQQQDAIVMRLLTEESEAALIAWLQTDFELDEPRANAIANASLAEGYGNLCAEALARILPCMQGDVMTYDKAVQAAGFDHHSQISHAAVSGEILPSLPYYGEYLQRHVGFGTGNPEDPPEKRFGKIANPTVHIGLNQVRTVVNALIRRYGHPREVIVEVARELKQNQEQRKEQQQQQAQNQMRNERLRADAAGILGIAFERVRQADIQKLILWEELSRDPAERRCPYSGVQISAAMVLSDEVEIEHILPFSQTLDDSLNNKTVATRRANRVKGNRTPFDARADFEREGWTYSDILNRAELMPRNKRYRFGADGYQKWLRDDKDFLARALNDTRYLSRVAREYLSLICPQATRVIPGQMTAMLRRRFGLNDILGPDGEKNRNDHRHHAVDACVIAVTDQGLLQRFARASASARERQLDRLVDDMPLPWPTYREHVARAIDNIWVSHKPDHGHEGAMMEETSYGIRRDGSIKQKRKPDGSEGREVSKLVRIAEPSQALRHGTDAEGQPLPYKGYVGGSNYCIELVRNDKGRWTGEVVTRFDAYQIVRTRGSDRLRHPTLSMSSQPLVMRLMIGDTVRAELDGESKLMRVVKIDPSTNVVLADINESGELKKRHDDTSDPFRYTNLRGESFRRTKARRVTISPIGELRDPGFKE

SEQ ID NO: 18293 - protein, 1025 aa, unidentified
  REGION 1..1025: note = Cas Enzyme sequence
MKYRLALDLGSTSLGWALVQLNGKTPAEPCAIIRAGVRIFPDGRNPKDGSSLAVTRRNARAMRRRRDRLLKRKARMQRLLIEHGFFPADEAARKALETLNPYELRAKGLDTALTPAEFARALFHINQRRGFKSNRKTDKKDNDSGALKAAIGSLRAQLDPAGSEGKARTVGELLWRRMSDDSKPPTQRTVRARYRETPFINDEGKRKLDKSYDLYVDRAMVEAEFDALWAKQSELNPAQFHEAARFALKDCLLHQRNLRPVKPGRCTLEPDQPRAPLALPSQQRFRILQEVNHLRLLGGRLLEEALSLEQRDKLVAVLEEGSKSFKTAIPKLLGLPGTVQFNLADAKRTELKGNSTSMELSKKHFFGAAWHSWSLRQQDAIVKQLIGQESLGKLVKRLQKYCGIDEARAEQIAEKAHLVPGYGSLSAKALTRILPAMRAEVVTYDKAVLAAGYDHHSQISHAATTGEILPALPYYGEYLQRHVGFGTGELNDPPEKRFGRIANPTVHIGLNQVRVVVNALIKRYGHPTEVIVEVARDLKQSQEQRKETQEQQARNQKRNERLRRMAAETLQIAEERVRHVDIQKLILWEELSFDVADRHCPYSGVQLSAAMVLSEQVEIEHILPFSQTLDDSLNNKTVAMRQANRIKGNRTPWDAREDFADQGWDYDGILLRAERMPRAKRQRFAPDGYEKWLKEDKDFLARALNDTRHLSRVAREYLSLICPGGTRVIPGQMTAMLRAKFGLNDILGLNGEKNRNDHRHHAVDACVIAVTDQGQLQRFAKASADARGKGLDRLVETMPDPWPTYREHVRRAVHAIWVSHKPDHGFEGSMFKATAFGIRRDGSVVQKVNADGETGRVNEYVVPIAEATQVARHGLNDKGQPRAYKGYVPDGNFCIDIISNEVGKWQGEVTATFEAYAIARRHGPEKLRNASTSLSGKPLLMRLMIDDFLRLDIDGHTRLMRIASINAAGRLSLADHNEANVDARNRDKDGAWRYTYKQAGSLKAAKGRRVSVSPIGELRDPGFKE

SEQ ID NO: 18294 - protein, 1022 aa, unidentified
  REGION 1..1022: note = Cas Enzyme sequence
MGSRIFSDRRDPKTLASRAADRRLARQARRRRDRVLKRRHKLMLALAQFGLMPADAASCKQLQELDPYILRARGLDHPLTPHELGRALYHLARKRGFRSSRKDARDEESVKESVKVHAAIAALHQRVNAAGCRTVGEYLARQHAERAPVRARRSNDGQYVLYLQRTMVEEEFEALWAAQQPLHPQLLIDNAHDTLRDIMLYQRRLRPVEPGRCQFEPDEYRARQCAPLQQRFRLLQELNHLRVRDGIGDRALSLDERNRMLQLLQGEAGLVTFSRLARAAGLRNASEFNYGRDEKRKGFKGDAVAARFAAPEALGESWHQLTAEQQNALSVLIEQADQMEPQIDALKALPTDVTGAADIMKKQHDELLVIDALRSLPIIIDEKQARALAAFNLPDDYGSLSLKALARIVPELEREVVNYDEAVRRAGYQHHSQFYTGEVFPQLPYYGQLLAGYTSPMPTATDQDERRHGKIPNPTVHIGLNQVRQLVNALIKRYGYPHQIVVELTREFGASGERRKEIIKQQTEAQERNERYDVELKKLGARANRENRMKLQLWEELGKGGALDRYCIYSGKQLSKTVLFSDEIEIDHILPFSRSLHDGIGNKILCTRQSNREQGNRTPFEAWSHTDRWAGVVERAEKLPEHKRKLFREDALEAFLDGNDFLARHLTDTAYLGRAAKQYLTGICPPNFIWVSSGRLTGLIRGKFGLSKLLSDDGIKNREDHRHHALDAAVIGLCSRSLIKRMSDAARQAEENGEQRLLETLELPWPTFRHELGACLGGIVVSHKPDHGKQAALHNDTNYGWRGAPDKRGKLLVGRRKPLESVKNASEANSIASETLRAEITELLAPLTSASDIKSALLAYSQRTGIRRVICEERLSVITIRDKRNGQPYRYVKGDGNFCYEIFRKPDGRWDGEVISVFEANQKSFIASPHLAQNGMPLVMRIHKDDVLAIEIDGEPLRHMRIATLSEGKIAMVDLRESNVDARVRSKRLKYLQKSPSTLKPLKARLVGVNILGYVNDPGFHG

SEQ ID NO: 18295 - protein, 997 aa, unidentified
  REGION 1..997: note = Cas Enzyme sequence
VIKAGSRIFSDGRNPKDGSSLAVTRREARSMRRRRDRLLKRKARMMRTLIEHGFFPADDVARKALEALSPYSLRAKGLDEALKPEEFARALFHINQRRGFKSNRKTDKKDNDSSALKSAIRQLHAALDASGADGKPRTVGEFLYRREQAGQTVRARYRQKRVEKEDGKTRIDKSYDLYIDRAMIEAEFDALWAKQSTLNPQQFNETARAELKDCLLHQRPLKPVKPGRCTLMPEEERAPLALPSQQRFRIYQEVNHLYVLREGLKEDPLTLEQRDSLVDALERNGKRSFTQIKKLLDLGGVVQFNFEDPKRQELKGNITSAILSKKEHFGDAWFDLAPEQQDAIVAQLASEENETKLIRWLEAKTGVDEARAEAIATAALPEGYGSLSAKALARILPELRRNVVTYDKAVLAAGFEHHSHISHAATGEILPELPYYGEYLQRHVGFGSGNSTDTPEKRFGKIANPTVHIGLNQVRVVVNALIKRYGHPSEVIVEVARDLKQSQEQRKEDNERQAKNQRRNERLRGEVAAVLQISPERVRHADIQKLILWEELSFDPADRRCPYSGVQISAQMVLGDQVEIEHILPFSQTLDDSLNNKTVAMRQANRIKGNRTPWDARMDFEAQGWSCTAMLDRAEQMPKNKRYRFGEDGYQRWLREDKDFLARALNDTRYLSRVAREYLSLICPQATRVIPGQMTALLRAKFGLNDILGLNGEKNRNDHRHHAVDACVIAVTDQGMLQRFAKASASARERQLNRLVDDMPLPWPSYRDHVARAVNQIWVSHKPDHGHEGAMHEDTTYRPPHLDSKHMWRTRGIGGNNPNAKEFDSKAMVGFSGPKNLLRHGRDATGGVLPYKGYVASPKFCIDIVRNDKGRWEGEVVSTFEVYRLFSKLGKEAALARIQSKCISISGKPLVMRLQGGDTVRLEDDKGRLVVVRVVKMTGNGQVFFAPHNEANVDARNADKQDLFAYLSKYAGSLQKACGRRVTISPAGELRDPGFKE

SEQ ID NO: 18296 - protein, 1023 aa, unidentified
  REGION 1..1023: note = Cas Enzyme sequence
MPQKMRYRLALDLGSTSLGWAILRLSSESPTSPVAVIKAGVRIFSDGRNPKDGSSLAVTRREARAMRRRRDRLLKRKARMMRTLIEHGFFPKDEAARKALETISPYGLRAKGLNEALKPEEFARALFHINQRRGFKSNRKTDKKDNDSGALKSAIKQLQAALDPSGAEGKPRTVGEFLHQREQAGQTVRARYRQQRVEKEDGKTRIDKSYDLYIDRAMIEAEFDALWSQQAKLNPQLFTERARADLKGCLLFQRPLKPVRPGRCTLLPEEERAPLALPSQQRFRMYQEVNHLYVLRDGLKDQALTLEQRDSLVSMLERNSKRSFTQIKKLLGLGGGVQFNIEDAKRQDLKGNTTSAILSKKEHFGEAWFGFSPEQQDAIVMQLVTEENETLLVQWLGAETGVDEARAEAIASAALPEGYGSLSATALARILPALQREVITYDKAVKAAGFDHHSHISHAASGEILPNLPYYGEYLQRHVGFGSGNPSDSPEKRFGKIANPTVHIGLNQVRLVVNALIKRYGHPAEVIVEVARDLKQNQEQRKEDSERQAKNQRRNERLRAEAAAILQTDPERVRHADIQKLILWEELSFDPADRRCPYSGVQIAAHMVLRDEVEVEHILPFSMTLDDSLNNKTVAMRQANRIKGNRTPWEARADFEAQGWSTAGMLDRAEQMPKNKRYRFGEEGYQKWLREDKDFLARALNDTRYLSRVAREYLSLICPQATRVIPGQMTAMLRGKFGLNDILGLDGEKNRNDHRHHAVDACVVAVTDQGMLQRFAQASASARERQLNRLVDDMPLPWATYREHVSRAVNQIWVSHKPDHGHEGAMHNDTAYALLGNGLVSVRKTVDGLRQKETASLKVIEFSNANASTRHGVLPDGSPRPYKGYKGDSNYCIEIVRNEKGKWEGEVISTFEAYQLARRYGVQRLRHPTRSSRDKSLVMRLVLDDVVRLVVDDRTRTMRVATISGNGQVFMCDTHEANVDARNRSKTDSFTYISKMAGSFKTAKARQVTVSPDGELRDPGFKE

SEQ ID NO: 18297 - protein, 1067 aa, unidentified
  REGION 1..1067: note = Cas Enzyme sequence
MLPRMKYRLALDIGTNSIGWCLIRLDSQEPPRPVAIIRAGVRIFPDGREPARGKGEVGTSLAATRRQARAMRRRRDRLLKRKARLQAALVRLGFWPQDEAARKALVTLNPYQLRSEGLDKPLTPAQFGRALFHLNQRRGFQSNRKTDKKDNDSGLLKTAIRKLRETLAVEGARTVGEWLAKRHAKRESVRARLRGKTVKDKAYDLYIDRAMVAEEFDRLWSVQAALDPTAFSNAKRDELRDILLHQRPLRPVRPGRCTLIPTEERAALALPSTQRFRMFQELNNLRLMTPGLQEVPLSREQRDTLAGLLDQGDVTFTRMLKALKLPGTTKFNLQDIKRDRLKGNSTAKVLADEDLFGDRWREFDLATQDGIVDRLLNDASESALVAWLVEHTGVDEARAERIADTGLPEGFGNLSRAALARVLPELECDVVTYDVAVARAGFDSHSALSHAEQTGEVMRELPYYGEPLQRHVGFADPKAKDSDPPEKRFGRIANPTVHIGLNELRKVVNGLIARYGHPSEVVVEVARELKQGQQQRKDEHQRQADRQAQNDIWRQQIKELPGRDTRDVSVLDLQRMRLWHELNPDDIANRRCPYTGEQISMAMLFSAEVEIDHILPFSMTLDDSLNNKLVALRRANRDKGNRPPFEAFGHSPSGYDYDAILQRAALMPKDKAKRFAADGYQRWLREDKDFLARALTDTAYLSRVAKEYLSLICPANKVRVIPGRLTAMLRGKFGLNKVLSLSGDKNRDDHRHHAIDAAVIGVTDQGLLQRFSKASADARSASLDRLVEEMPLPWPTYREHVARAVAHLIVSHKPDHGHEGALHNDTAYGLRPDGEVAHRVMLDSFKSAAEVEKKTFAGDKLKQWVLERTAGLSGKEFAARVEQLQREHGIRRVRVVEKLAVIPMTHASAAERHGLDADGKPIAYKGYKGDSNYCIEIWRDEKGKWRSDVISTYDASRIVRSSGGNLARLRHPRLSQSGHPLVMRLMIGDMVKADFKGAVRVLQVCKIKTVGAVFVADHREANIRARDDANDDSLIYGSFSAGSLQKACGRAVFVSPIGDLRDPGFSG

SEQ ID NO: 18298 - protein, 1017 aa, unidentified
  REGION 1..1017: note = Cas Enzyme sequence
MRYRLGLDLGTNSIGWAMLRLDSQNEPCAVIKAGVRIFSDGRNPKDGSSLAVTRRLARSMRRRRDRLLKRKARLLKLLTDLGFFPQSVGERKALLNLDPLALRVAALDQQISPAEFARAIFHLNQRRGFKSNRKTDKAANDSGALKSAISETRKEMQEKHLRTVGEYLLHRRKTGLGVRARYRELRIEIDGRNRIQKSYDLYIDRQMIEEEFDAIWSSQARHNPTIYTDASRALIKDCLLFQRPLRPVKPGRCTFFPDEERAPLALPSLQQFRIYQELNNLRVINADLSETEIDLSQRDKAYNLLNGQRQATFGKLRTTMGISKASTFNLEDEKRTGLKGNLTAAILSSDECFGAAWHHLSLVDQDAVVTKLLEEENESLLIGWLTNRFGLSEAIAEKVANAGLPEGYGALSRKAIDLILPCLKQTITTYDKAVKAAGIEHHSDIAPHRTGEILDALPYYGEPLQRHVGFGTGNPADTPEKRFGRIANPTVHIGLNQTRLIVNQLIKRYGHPSEVIVEVARELKQNVEQRKEDVKKQAENQRRNDRIRDEVAKLTRVDPENITRTDIQKVILWEELSPDLMSRCCPYSGKQISFQMLMSPEVEIEHILPFSRTLDDSLNNKTVSLRSANRIKNNRTPAEAKTDFEKAGWKYEEILARAASYPRAKRYRFAQDGYEKWLKEDKDFLSRALNDTRYLSKVAFQYLALICPQATRVIPGQMTAMLRGKYGLNTILGPSGEKNREDHRHHAVDACVVAVTDQGLLQRFSKASASAREQQLNRLVSEMPLPWSSFRESVQRAIHSIKVSHRPDHNYQGAMHNDTAYGLLSDGKVSVTKLDENGRRVKEVSTLAVIPFTSTNDPKRHGLMPNGELRPYKGYKGDSNFCIEIFVSEIGRWESVVITTYEAYQIAKARGESSLYSPKQASNGRPLVMRLMRDDIVSLDSESGRSLYRVCKMRSNGTIYFAAPHESNVDARDRRGELSYLTKGASGLQKLGARQVFITPIGELCSSEGGRSYGSNR

SEQ ID NO: 18299 - protein, 1020 aa, unidentified
  REGION 1..1020: note = Cas Enzyme sequence
MRYRLGLDLGTNSIGWAMLRLNDANEPLAVIKAGVRIFSDGRNPKDGSSLAVTRRLARSMRRRRDRLLKRKARLLKLLTDLGFFPKTVDERKALLNLDPLELRVAALDRAITPPEFARALFHLNQRRGFKSNRKTDKSASDSGALKTAISETRREMSAQKHRTVGEHLLFRRKSGLGVRARYRETRIQIDGKNKVQKSYDLYIDRQMVEEEFEAIWAAQARIHPGLFTDTSRILLKDCLLFQRPLRPVIPGRCTFFPDEQRAPIALPSVQQFRILQELNNLRILGDYLTEEHLDLNQRDKAFDLLNTQRKATFGKIRSAVGAPKSSTFNLEDAKRKDLDGNRTSAILSADDCFGAKWNDLALEQQDEVVEKLLSEENEGLLMAWLTNRFGLDEATAERIANVGLPEGYGNLSRKAISMILPKLRDAVVTYDKAVQAAGIAHHSHIAPSRGGVILVEENPLPYYGEPLQRHVGFGTGNPRDLPEKRFGRIANPTVHIGLNQTRLIVNQLIKRYGHPSEVIVEVARDLKQSQDQRKEDTKRQADNQKRNDRIRDAVAQQTRIDPENVTRTDIQKVILWEELSPDLMSRCCPYSGKQISFQMLMSAEVEIEHILPFSRTLDDSLNNKTVSLRVANRVKGNRAPSEAAADFEKAGWKYEEILERAASYPKAKRYRFAQDGYEKWLKEDKDFLSRALNDTRYLSKVAYQYLALICPQGTRVIPGQMTAMLRGKFGLNTILGPNGEKNREDHRHHAVDACVVAVTDQGLLQRFSKASASAREQQLNRLVSDMPLPWPSYRESVQRAIQVIKVSHRPDHNYQGAMHNDTAYGLLSDGQVSVTKLDEEGRRVKEVSTLSVIPFAATNDPNRHGTMPNGEPRPYKGYKGDSNFCIEIFVNETGRWESVVLSTFEAYQIAKTKGESALYNPTLAINGRPLVMRLMRDDIVSLDSEQGRALYRVCKMGSNGIIFFAEPHESNVDARVRKKELSYLTKSALGLQKANARQVFITPTGEVSLSRGRKSDGSNR

SEQ ID NO: 18300 - protein, 1059 aa, unidentified
  REGION 1..1059: note = Cas Enzyme sequence
MKYRLALDLGTNSIGWALIRLVGNPAGQMEPSAIIRAGVRIFGDGKDPKSGASLAVDRRLARGARRNRDRKLKRKQRLLQSLIDSGFMPNDKTERSALVHLDPYILRSRGLSEELTPFEFGRAIFHLNQRRGFKSNRKTDSVDSDSSLMKNTINQVQQMLASEGYVTVGQWLAERHEKRESVRARLRGSGVKDKTYDLYFDRAMIETEFNVLWSAQAAFNPVFFTPAKREMLHETLFFQRNLLPVRPGRCTFEPNQERAAKALPSSQLFRIYQEVNNLGIEDGNFTYRPLTLSERDAIVEKLCSQKTVSFDAMRKLLKLAGAPRFNLESEKRKDLKGSSTAVSLSKPEMFGAAWSSLTLDEQDEVTSQILNVEDDDKIIAWLIESFGLTDEAANAVSQSRSEITKQATGYANLSSTAIHKVLPHLQSDVRKYSDAVVAAGYQSHSGLTHMEQTGEILDRLPYYGEYLQRHVGHGTGLVTDDPSTRFGRIANPTVHIALNELAKVINALIDCYGPPDQVIVEVTRDLKRTKEQKDEESKKQAENQKANERWSQEILEATGITATRKDLQKMKLWVELNPKDPTNRCCIYTGEVIGIARLFSPEVEIEHILPFSRTLDDSLNNKTVSMVKANRDKGNQTPFEAFGSSPKGYDYDEILVRARNSNRYRAARFGPEGFSNWLKNDADFLARALTDTAYLSRMAREYLQLVSPSPVVAVPGRMTASLRRHWGLNNLLSDDGVKNRSDHRHHAVDAITIGLMDRGSLQRYARESGRGTTVEEQLSKTSHESPLVHLREKAQGVIGAIKVSHRPNHSYQRQMNNDTNYGFRPDGFVATRKALDEFATLKSVMDTHFADAYLKEKILRFVGDCSDTDLKSRLAEFTAETGTRKITFWQKLDVIPIPPNPAVPERAPKGTKAREDNSPRGVKGDSNYCLEIFVNDKGKWVGEVVSSYEAYRIAITQSPARLRDPHLTQSGKPLVIRLMRDDVVQVDVDSPDDRQLMRVCKFGSSGQIQLAPISEANVDARVRLKEITYLSASAGTLQTRRAKKVTITPDGRVSYRNIS

SEQ ID NO: 18301 - protein, 1059 aa, unidentified
  REGION 1..1059: note = Cas Enzyme sequence
MKYRLALDLGTNSIGWALIRLAGNPAGEMEPSAIIRAGVRIFGDGKDPKSGASLAVDRRLARGARRNRDRKLKRKQRLLQALIDSGFMPSDKTERNALVHLDPYLLRSRGLSEELTPFEFGRAIFHLNQRRGFKSNRKTDSVDSDSSLMKNTINQVQQMLTSEGYVTVGQWLAERHEKRESVRARLRGSGVKDKTYDLYFDRAMIETEFNVLWSAQAAFNPALFTPAKREMLHETLFFQRHLLPVRPGRCTFEPNEERAAKALPSSQLFRIYQEVNNLGIEDGNFTYRPLTLSERDAIVEKLCSQKTVSFDAMRKLLKLAGVPRFNLESEKRKDLKGSSTAVSLSKPEMFGAAWSSLTLDEQDEVASQILNVEDDDKIIAWLIESFGLTDEAANAVSQSRSEITKQATGYANLSSTAIHKVLPHLQSDVRKYSDAVVAAGYQSHSGLTHMEQTGEILDRLPYYGEYLQRHVGHGTGLVTDDPSTRFGRIANPTVHIALNELAKVVNALIDCYGPPDQVIVEVTRDLKRTKEQKDEESKKQAENQKANERWSQEILEATGITATRKDLQKMKLWVELNPKDPTNRCCIYTGEVIGIARLFSPEVEIEHILPFSRTLDDSLNNKTVSMVKANRDKGNQTPFEAFGSSPKGYDYDEILVRARNSNRYRAARFGPEGFSNWLKNDADFLARALTDTAYLSRIAREYLQLVSPTPVVAVPGRMTASLRRHWGLNNLLSDDGVKNRSDHRHHAVDAITIGLMDRGSLQRYARESGRGTTVEEQLSKTSHESPLAHLREKSKGVIGAIKVSHRPNHSYERQMNNDTNYGFRPNGFVATRKVLDQFATLKSVMDTHFADAYLKEKILRFVGDCSDTDLKSRLADFTSETGTRKITFWQKLDVIPIPPNPAVPERAPKGMKARADNSPRGVKGDSNYCLEIFVDDRGKWVGEVVPSYEAYRIARTQSPARLRDPHLTQSGKPLVIRLMRDDVVQVDVDSPDDRQLMRVCKFDSSGRLNLAPISEANVDARVRLKEISYLSASAGTLHTRRAKKVTITPDGRVSYRNIS

SEQ ID NO: 18302 - protein, 1059 aa, unidentified
  REGION 1..1059: note = Cas Enzyme sequence
MKYRLALDLGTNSIGWALIRLAGNPAGQMEPSAIIRAGVRIFGDGKDPKSGASLAVDRRLARGARRNRDRKLKRKQRLLQALIDSGFMPNDKTERSALVHLDPYLLRSRGLSEELTPFEFGRAIFHLNQRRGFKSNRKTDSVDSDSSLMKNTINQVQQMLTSEGYVTVGQWLAERHEKRESVRARLRGSGVKDKSYDLYFDRAMIETEFNVLWSAQAAFNPAFFTPAKREMLRETLFFQRNLLPVRPGRCTFEPNQERAAKALPSSQLFRIYQEVNNLGIEDGNFTYRPLTLSERDAIVEKLCSQKTVSFDAMRKLLKLAGAPRFNLESEKRKDLKGSSTAVSLSKPEMFGAAWSSLTLDEQDEVTSQILNVEDDDKIIAWLIESFGLTDEAANAVSQSRSEITKQTTGYANLSSTAIHKVLPHLQSDVRKYSDAVVAAGYQSHSGLTHMEQTGEILDRLPYYGEYLQRHVGHGTGLVTDDPSTRFGRIANPTVHIALNELAKVVNALIDCYGPPDQVIVEVTRDLKRTKEQKDEESKKQAENQKANERWSQEILEATGITATRKDLQKMKLWVELNPKDPTNRCCIYTGEVIGIARLFSPEVEIEHILPFSRTLDDSLNNKTVSMVKANRDKGNQTPFEAFGSSPKGYDYDEILVRARNSNRYRAARFGPEGFSNWLKNDADFLARALTDTAYLSRIAREYLQLVSPTPVVAVPGRMTASLRRHWGLNNLLSDDGVKNRSDHRHHAVDAITIGLMDRGSLQRYARESGRGTTVEEQLSKTSHESPLAHLREKAQGVIGAIKVSHRPNHSYQRQMNNDTNYGFRPNGFVATRKALDEFATLKSVMDTHFADAYLKEKILRFVGDCSDTDLKSRLAEFTAETGTRKITFWQKLDVIPIPSNPAVPERAPKGMKARADNSPRGVKGDSNYCLEIFVNDKGKWVGEVVSSYEAYRIARTQSPARLLDPHLTQSGMPLVIRLMRDDVVQVDVESPDDRQLMRVCQFASSGRLNLAPISEANVDARVRTKEISYLSASAGTLHTRRAKKVTITPDGRVSYRNIS

SEQ ID NO: 18303 - protein, 1034 aa, unidentified
  REGION 1..1034: note = Cas Enzyme sequence
MFRIRQDPILGTVPTALIRSGVRIFSDGRNPKDGSSLAVTRRAARAMRRRRDRLLKRKSRMLGQLVRHGFFPADEAARKALERLNPYQLRAKGLRESLTPGEFARVLFHINQRRGFQSNRKTDRKDNDSGALKQAIHQLRERMTASGCQTVGEWFWQVRMQQRPEGVKGQGVRARYRETPYTTDEGKKRIDKSYDLYVDRAMIAQEFDALWVAQAALQPALFTEAARADLRDTLLHQRPLRPVRPGRCTLLPDEERAPLALPSTQRFRILQEVNHLRLLDSTLREVPLTLAQRDAVVAALEAKNKLSFDQIRKLLKLSGSVQFNLQDAKRTELKGNATSAALARKDLLGAAWAGFAPELQDEIVWQIVNEEGEGTLIAWLQQHTGVDEARAEAIANVALPEGYGSLSRKALARIVPQLQRDVITYDKAVQAAGFAHHSDLGFDFDHESDEVEQVGERTIASTGEIKPVYVFKELPYYGRALQRHVAFAKDNPRNDEERYGKIANPTVHIGLNQVRVVVNALIRRYGRPAEIVVELARDLKQSREQKLEAQKKQAENQKRNADARVQISDAYRAQGLLRSPEQIKRSEVEKWLLWKELNPSDSLDRRCPYSGVQISAAMLLSEQVEIEHILPFSQTLDDSLNNRTVAAWRANRIKRNRTPWAARADFEAQGWSYEGILQRAERMPLRKRYRFAPDGYERWLGEDKDFLARALNDTRYLSRVAAEYLRLVCPGSATRVIPGQMTAMLRAKFGLNDVLGLNGEKNRNDHRHHAVDACVVGVTDQGLLQRFAQANAQAREGGLTRLVESMPLPWDTYRDHVERAVRHIWVSHKPDHGFEGAMMEETSYGIRKDGTIKQRRKADGSAGREITNLIRIAEPAQPARHGVDGEGRPLPYKGYVGGSNYCIEITRNAQGKWEGEVISTFKAYGIVRAAGWAQLRNPTQGQNGQPLVMRLVIGDIVRLEVEWREQTMRVVNINGNNGQMFMAPVHEANVDARNRDKQDAFAYTSKVAGSMQKAKARQVTISAMGELRDPGFQG

SEQ ID NO: 18304 - protein, 962 aa, unidentified
  REGION 1..962: note = Cas Enzyme sequence
MMFNLVEYGFFPTNSVTRKEFELLDPYELRARGLNEALQPGGFARALFHINQRRGFKSNRKTDKKENDAGALKAALKNLRAAMAADGSRTVGEWLYRRHKNGQTVRARYRQTPIKQDNGKTKIDKSYDLYIDRAMIEAEFDALWISQTKFNPILFTENARIALKDCLLHQRPLKPLRPGRCALLTDEERAPLALPSTQKFRMYQEVNNLRILGEGLIEGPLTLDRRNLLIAALEQHSKRSFTQIKRLLGLSGTAQFNFEDPKRQELKGNTTSAILSKDGYFGATWFDLGLERQDEIVSKLVNDENETHLMTWLQNEFGFDENQAEKIANAPLPEGYGSLCTKALNRILPELKREVITYDKAVVAAGFEHHSRLNTFSEIPGKTFDTGFERTDPETGEVQRIHAFNVLPYYGEYLQRHVGFGTGIPEDHPEKRFGKIANPTVHIGLNQIRVVVNALIKRYGHPSEVIVELARDLKQSQEQRKEDNKRQADNQTRNTRLRQDIANILNISVERVRRDDIQKMLLWEELGHDAADRRCPYSGVQISVQMLLSEQVEIEHILPFSQTLDDGLNNKTVAMRQANRIKGNRTPWEARADFEAQGWAHEDMLARAEKMPKNKRYRFGDEGYQRWLREDKTFLARALNDTRHLSRVAREYVSLICPQNTRVIPGQMTAMLRSKFGLNDILSLHGEKNRNDHRHHAVDACVIAVTDQGMLQRFAKASASAREKNLTRLVGSMPLPWETYRTHVERAISAIYVSHKPDHGHEGAMHNDTAYGLLGGGIVRTHKIVDGVRKREDSTLKVIEMTSTKVPERHGMLPDGSPRPYKGYKGDSNYCMEIIKTDEGKWASEVISTFQAYQIVKNNGVQALRNPNFSVNGKPLVMRLMSGIMVRLKSNDSLLTLRVVTLSTTGTIALASHQEANVDARNRDSGDVFKYIYKSASSMRSAEARSITICPIGGVNDKGFVD

SEQ ID NO: 18305 - protein, 1067 aa, unidentified
  REGION 1..1067: note = Cas Enzyme sequence
MKNKMQYRLALDLGTTSLGWAMLRVKPNEDGQLQPCALIKAGVRIFSDGRNPKDGSSLAVTRREARAMRRRRDRLLKRKARMLQQLTHFGFFPTDLAERKALETLNPYELRARGLDEALSPYEFGRALFHINQRRGFKSNRKTDKKENDSGALKAAIKFVHSQIDGNTHRTVGEWLYKRMLNGDPVRARYRQTKQVKEDGKTKIDKSYDLYVDRAMVEAEFEAIWARQATLNPTTYSEQAKAALKDVLLFQRNLRPVKPGRCTLIPTEERAPLALPSTQRFRIYQEVNNLRLLRAGPKDEALTLTQRDQLVVALEQNNKRTFTQIKKLLGLDGQTQFNFEDPKREELKGNTTSAILSHTKHLGETWFEFDEATQDEIVWQLLNEENESRLIAWLMQKTGVDAEKAETIANVALPEGYGSLSRQALARILPELRKTVITYDKAVQAAGFEHHSRLNNYGEVSGRTFDTGIERIDQKTGEIQRLHAFHELPYYGEFLQRHVGFADPKATPETPEKYFGKIANPTVHIGLNQVRKVVNALIKRYGHPSEVIVEVARDLKQSKKQRDEENKRQAENQKRNDRIRKDIANTLGLSEERVRHADIQKWILWEELSFDPADRKCPYSGVQISAQMLLSEEIEIEHILPFSRTLDDSLNNITVSTRQANRIKENKTPWEAFGKENALGVIYADILLRAQKMPKAKRYRFAEDGLAQWDKEGKGFLPRALNDTRYLSRVAREYVSLVCPQATRVIPGQMTAQLRAKFGLNDVLGLNGEKNRNDHRHHAVDACVIGVTDQGMLQRFASANASTRQKGLTRLVETMPEPWPTYRQHVERAVQQIYVSHKPDHSHEGEIFDETIYSATGKSRSAAKDRTVIPFTAKTWSHPSALNKQRPFKGLITDASQRHQNKPYKGLLSNSNYCIEIYSHEASWGGHVLKTFDAYQIVSAHKNATEGIQALRNKHTSQNGQPLIMRLMIGDYIRAEIDGALLLLQVLKINSSGSITFIKPNETNISARYSAKLAAQKAQQEKKPFDEAVLNDSFFQKAMSAESLRLFKSRPVTLSPIGELHDPGFKC

SEQ ID NO: 18306 - protein, 986 aa, unidentified
  REGION 1..986: note = Cas Enzyme sequence
LRRKARIVDALVRLGFWPADEAQRKALATLDPYELRRKGLDQALTPAEFGRALFHLNQRRGFQSNRKTDRKDSESGLLKTAIKQLRERIAVDGARTVGEWLARRHDQRASVRARLRGRSVKDRAYDLYVDRAMVAEEFDRIWDKQSELAPALFTADNRNELRRELLHQRPLRPVKPGRCTLLPEHERAPLALPSVQRFRIYQELNNLRLQSRLDETPLSKAQRDTLAPLLDRDKLTFVRMRKLLALPVGTGFNLEDIKRSWLNGNATGRILGDDERFGSRWFGFDEALQDNIVEQLLNEADEARLVAWLIERTGIDEATAERIAAAQLPEGYGNLSRAAIERVLPQLRADVVTFDVAVERAGLGSHSALSHGEQTGEILEALPYYGEALPRHVGFADAQAKETDLPEKRFGRIANPTVHIGLNELRKVVNKLIQRYGHPTEIVVEVARELKQGELQRKAEHERQAQRQAENDDYREKIRSLPGMAERRVTAADIRRMRLWVELNPQDVANRRCPYTGEQIGITMLFSDEVEIEHILPFSMTLDDSLNNQTVALRRANRDKGNRTPFEAFGHSPPGYSYDAIIERAELMPREKRKRFAPDGYQRWLKEDKDFLARALTDTAYLSRVAKEYLSLVCPPNKVRVIPGRLTAMLRGKFGLNDILGLQGEKNRNDHRHHAVDAAVIGVTDQGLLQRFAQASASARTSQLDRLVEDMPLPWPTYREHVARAVQRIVVSHRPDHGHEGALHNDTAYGLRGDGMVSHRVMLDGFKSAAEIEGKTFAGSRLQQQVLERVAGLSGKEFAARIETFQHETGVRRVQLLEKLSVIEIADERAAARHGVDEIGHALPYKGYKGDSNYCLEIWRDENGKWNGDVVSTFQAHQVARRLGKQRLRDPYRALNDRPLVMRLMSNDSVRMKVDDGTKDYRVAKISANGQVFMAPLSEANVDARNRDANDSFKYVSKYAGSFKSAQARRVTVNEIGDLHDPGFAP

SEQ ID NO: 18307 - protein, 1062 aa, unidentified
  REGION 1..1062: note = Cas Enzyme sequence
MRYRLALDLGSTSLGWAMIRLNADNQPCAVIKAGVRIFSNGRNPKDGSSLAVTRREARAMRRRRDRLLKRKARMMRALIEYGFFPTEESERKALETMNPFVLRAKGLDAALTPAEFGRALFHINQRRGFKSNRKTDKKDNDSGALKTAIGTIRKTIAAYPLGLDGKPMKAEQFNLLAWVERGLEETKNDKPRTVGELLHKRNVAGQTVRAHYHQDKVIKDDGKSKIDKYYDLYIDRAMIEAEFDALWAKQTKLNPALFTEAARDDLKDVLLYQRKLKPVIPGRCTFMPDEERAPLALPSTQRYRIYQEVNNLRILREGLKEEPLTLEQRDNLVAKLERGNQSFKSAIPKTIGVSGVVGFNLADAKRTELKGNRTSEILSKKEHFGDAWFAFDEAKQDAIVMQLVKEENEAKLIRWLQDETGIDEKCAETIANAGLPEGYGSLCAQALARILPELRRDVVTYDKAVQAAGFDHHSRLNNNSEIPGITFKIESIDQDTGEIKEFHIHKELPYYGEYLQRHVGFGSGKPEDTVEKRYGKIANPTVHIGLNQVRLVVNALIKRYGHPSEVIVELARDLKQSKDQRDEESKRQTENQKRNKRLREDIARVLGISEERVKRADIEKMILWEELSFDPADRHCPYSGAQISATMLLSDEVEIEHILPFSQTLDDSLNNKTVALRQANRVKGNRTPWDAFGAQPTAGFDYTGILSRAEQMPKAKRYRFAEDGYQRWLKDDAGFLPRALNDTRHMSKVAFEYLKLVCPNTRVIPGRMTAMLRAKFGLNDVLGLNGEKNRNDHRHHAVDACVIAVTDQGLLQRFAKASASAREQQLNRLVENMPLPWENYREHVQRAIEAIWVSHKPDHSHEGAMHNDTAYGLRGDGKVSFHKMVDGVRTHIEDNLKVIEISDEKATDRHGVLPNGEPKPYKGYKGDSNYCIEIVRNEKGKWEGEVISTFDAYQLVREHGVARLRNPALSVSGKPLVMRLMIDDAVRLDVEGQTRTMRIATLSGNGQMFMADTSEANVDARNRNKEDTFAYVSKMAGSFQKSNARRVGISPIGELRDPGFKV

SEQ ID NO: 18308 - protein, 960 aa, unidentified
  REGION 1..960: note = Cas Enzyme sequence
LCQLGLLPQDAQTARNLSTLDPYELRAAAVSKPLHPFHLGRVLMHLAKRRGFQSNRRTPARAEEGNTKEAMKRLYAQLEGQTLGQFLHRQISEGRGARFRPSSESAGKPQKEFPLYPERAMYKAEFAAIRAAQHSHQKLTDADWNRLEGIIFFQRDLRVPERGRCRFIPGQSRASIALPSFQQFRLLSDANHLTYRASPITPPQNLTPEQRAVVIKLLRSQKTVGFDKLRGRLNLPDDATFNLESEKRDKLTGDVVGSLFSGKKLFGATWNSLSLQERDEIVSAVLDLEDRDGLRSIGSRHGLDGAALEEFTNLSPEDLPRGTARFCGEALRKLVPHLESGLRYNDAVSACGWSHTTTPEDGSASRLPYYGKAMPDSVVPCPKSKGKVEEEFLYGRFPNPTVHIALNQLRVVVNALIDRYGKPAEINLELARDLKMSSRQREELLKEQTRNTKKNVERDKRIDEINQDHGTNLAKNYDTRLRIRLWEELAEDVNSRCCPYTGQRITLAKLFTDEIEVDHILPFGATCDDSPANKILCLRSANREKRKRSPYDAFGQSPSGYDYSAILLRAALLPGNKSWRFQADAMERFRDENRFQARQLVDTQHMGRAAHRYLSCIAAPAQIRVSPGRITALLRHHWGLETILAPADAPDRGGKNRADHRHHAIDALVIALLDHRLLHFIRSANAAEELDGIEVPHPWRSFRAEAANQVDRIVVSHRPDHNPAGRLHKDTAYGEVLQDRSRRRQNQQWEIDKGYNLVVRKPVAGLRATEVERVRDLTLRQKLGTILHGVSESDKAAWAAALHAFSTETGTQKIRLVTKDKTARRVSHGGGRFSRNLIPGGIYSVSFWRLPNGDIEATHLSVWEANRRGASTPRPAHPAARMLFTVRKGDALRTAHKGVVKLVRVAQLKPSDSNRNLVCVDSSAAQDDEEFTIQFSRILATQTRLLHVSAIGDFRDPGPL

SEQ ID NO: 18309 - protein, 1053 aa, unidentified
  REGION 1..1053: note = Cas Enzyme sequence
MVDLNSEGKPAAIRRMGSRIFSDGRDPKSGQTLAADRTTVRGQRTRRDRAIRRRDQLLLTLCRLGLLPQDAETARKLATQDPYQLRAEAPQKALPPFHLGRALMHLAKRRGFQSNRRTPAKDAEGNTKEAMKRLHEQLAGQTLGQFLYKQITKGRGARFRPSSESTGKPKKDFPLYPERAMYKSEFAAIREGQQSHHKLAPSDWDHLEKLIFFQRELRVPERGKCRFISGESRASLALPSFQQFRLLSDANHLGYRLDPFGAVQLLDATQRATVLSLTRTQKTVGFDKLRTKLKLPDTARFNLQSDKREKLEGDPVAALFAGKKLFGPRWHELPLADRDEIVASVLDLEEHDALRRVGARHGLTDAALDEFSNLNPDDLPCGTARFSATALRRLVPELEKGLKYNEAVAACGWSHTTTPEDGSAPLLPYYGKAMPDSVVPSPNSKVGDEKIYGRFPNPTVHIALNQLRVVVNALITRYGKPAEINVELARDLKMSKRQRDELLKEQAQNTKKNAARDAFIDEINATHGTKFAKNYDNRLRIRLWQELSDDINSRCCPYTGQRITPAKLFTDEIEIDHILPFGATCDDSPANKILCLRNANRDKRKRSPYEAFGHSPHGYDYAEILTRAEHIPGNKRWRFQADAMEKFRDENRFQARQLVDTQHLGRAAHRYLTCIVPPTGIRVSPGRITALLRHHWGLETILAPSDAADRGGKNRADHRHHAIDALVIALLDHRLLNFIRAANAAEEDLNNGIEIPLPWKTFRADAAAEIEKIFVSHRPDHNPAGSLHESTFYGPVGQDRRRPEQQWEIDKGYDLVYRVGIETLGEENLDSKSTKSGCVRDRALRERLRTCILSIPSEIRDHGGDKKKRAAFDKAVSLAFAQFGAANKIRTVRIVKKKASVSLTHRGRDTGRYVLPSGIDHVAIWLTKRPSIAPVAIAADRLSVNRSDFKPKRPTYIDETGQLRADPTARKIFVVRNGDFLRTIHDGVLKTVLVTSLSPSNGYLRCKPIKNALPDSDKEAGSFTIQFSRILATQTRLIHVTPIGDVRDPGPLL

SEQ ID NO: 18310 - protein, 1080 aa, unidentified
  REGION 1..1080: note = Cas Enzyme sequence
MAKKVLGLDMGTNSIGWALIEIDNKGIPLGICDAGVRIFNSGRDPQRGTSLAVARRERRGQRRRRDRMLQRKHDIMSLLVRFGLMPEDKVQRKLLEAQDPYELRARAAVERVEPYALGRALFHLNQRRGFQSNRKIDKADSKKETEKAKEKLKLALEGQTLGQFLWAQHEKRETVRFRPIPLANNKNSYDLYPTRDMYADEFDKIQAVQGKHQKLSAAQWEKLKDKVIRQRPLKESKVGRCQLYFEKDCVDLKTGEVSAYLRCPVALPSAQLFRIVQEINNLKIRAGSFGAFAPLDQDKEKLQEKREMLLTLFCGKGEVSFEDIRKTLQLSEDVEFNLAAKRSKLKGDAVYATLKKYFGKEWLSFSIEEQDKIVLSLLDIEDERTLYKKAVHEWGMKEDKARALVDNISPLSFPDGYARFSQQALHDLLPLMRDGLRYDEACLKLGGSHSVRDFDGTADSLSYYGLAIPESVVEPHNPDTASEEERRGKIGNPTVHIGLRQLQKIVNEVIKTHGKPDIIRIEMARDLKMSKEDKDKFSKNQSQNERDNERIKKELTERGVWVGDKKGEKHLKYRLWEELNLSDVNDRKCPYTGKTISMDLLFSEEVEVEHILPFSRTLDDSRANKTVSFYVANREKGERSPYEAFSHKQPGRSVDGDYSYECILQRAENLPKNKRWRFSTDAMQKFSDENKFLDRQLNDTRYLSKVAKRYLSLVSKNVTVSPGRLTAMMRRAWGLNEVLGHNRKNRDDHRQHAIDAIVVALTDIGAVQKVMTLSGQGENLNKIKAEDLPVGFWEQIRDRIIGSEEKPGMVVSHRAEHGMGGALHEDSYYGVLYHPDFPPEMDRRTKWEKENGFNIVTRKELSGLSQNEVGQIRDPLIREKLEEILEGLPAIVKKKSGGKEKRIVDTDALKKALYQFGKNNQIRRVRILKKDASIKVIRHKQGEVEHIKGVSPGDIHHVSFWRMPDGKMESLGVSLFDANQKDHNAFRPHPAAKLLMKVHKGDLLRLEHKGEEKTARVMSLRPANGQMVLVEHFEGGDVVKRQKEEQIQIFLSFSKVIEAKARKIFVSPTGKTYDPKSLKV

SEQ ID NO: 18311 - protein, 1031 aa, unidentified; identical to SEQ ID NO: 15476
  REGION 1..1031: note = Cas Enzyme sequence

SEQ ID NO: 18312 - protein, 1094 aa, unidentified
  REGION 1..1094: note = Cas Enzyme sequence
MRTLRAVFRNVKGDAMKIPYRLGLDIGTNSIGWCVLRLNDQDEPIGIVRMGSRIFSDGRNPKNLASLAADRRLARQMRRRHDRVLKRQARFMAGLIRFGLVPADDALRLGLSSLDPYALRAKGLDAELALPEFGRALYHLAKRRGFKSSRKDQKTDEKEAGKINGAIARTRQQIVDAGCRTYGEYLAKRHEKGETTRARLDGKGEYVLYAQRALIEEEFDQLWASQRRFHSQALTEEACDYLRNTLLFQRPLLPVEPGRCIFEPDQYRIPMCSPLQQRFRILQELNNLRIQEGIEWRPLTRQERDLLRDELYQRDKLTFPQIRTMLGFDKKARLNLEGGRKANGKPREFLKGDGVSAQFSADEALSDEWRSLSLLQQEALAVLVEVAASTEDLIAALLNLPNDGEPLKKLLRDGDKSRRHYRDVLATLPMRITPEQAKKIAAFKGVPDDHGSLSHKALAKIVDALEADVVTYDQAVRQAGYKSHSDFYTGEIRMRLPYYGEVLSGYTSPMPKAGNDDERRWGKLPNPTVHIGLNQLRLIVNEIIRRWGLPREIIVELTREFGMSGTRRNELLSEQKENEDRNAKLNEELRRLGQRENRENRQRLQLYRELGKDDAMSHPCIYTGAQIGIEKLFSSEVEIDHILPYSRSLDDSLANKMLCLTRANREKRNRTPFEAFGHSPSGYAWEAIESRLEKLPPNKAKRFKTGAMQAFLERSKLTPEDLKAWGFDKADAFLARHLTDTAYLSRLARQYLVSVCPANKVWSNTGRLTGQLRSAWGLNELLHPGEASKNRDDHRHHALDAAVIAACDRSTIQQLAKAAERAEETGENRKLKDFPMPWPSFRDDLAATLGKIVVSHKADHGTQAALHNDTNYGKRGEPDKRGALPVSHRVPLATITSADKAQSIADPMRRAEVARTIDGLVGKGIKAALEAFAQRTGIRRVHVLEQLSVIPIHDRMTGNPYRYVKGDGNYCYEIWREDGRWNGEVITNFEANRKNQQLDPRKARNGKSLVMRIRKGDSLKLELDGGTRVMRVAKFSDGKINMTEHFEANVDARNRDPMISFGYLQKSPDALRKVATRAIGVDPLGYVNDPGFKE

SEQ ID NO: 18313 - protein, 1027 aa, unidentified
  REGION 1..1027: note = Cas Enzyme sequence
MMARIKYRLGLDLGATSLGWCVYRLNEEGDPCAIVRAGVRIFSDGRDPKSLASRAADRRAKRQARRRRDRLLKRRQRMLDGLVQFGLLPSGTGERKALQALDPFDLRARGLDEALSPHHFGRAIYHLCRKRGFRSSRKERAADEKETGKVKEAIRALTARISEASCRTVGEYLAREHAERRPVRGRRRADGSYVLYLQRAMVEAEFDALWASQRRFHPDLLTDEARLFLRDTLLFQRKLLPVTPGRCQFEYPEYRARLADPLQQKFRLLQELNNLRLVNGRESRQLTLDERNRLYDFLEQREGATFAKLREVLGLKRTDPWRFNLETENRKGLKGDLLTAQFGADDCLGDDWKRLSTSDQRELAKLVATEADEDALVAKLRSPPWNMTPAAASSVSAAKLPEDFGALSVKALERIVPELERDVVTYDIAVQRAGYQHHSQLHTGEIFDRLPYYGEILRGHTAPAERAKNDDEKRFGKISNPTVHIGLNQLRLLVNALIRRYGAPSEIIVELAREFGYGPDRRRELLRTQQDNAERNVRYDEQLRAQGLKISRENRQKLQLWEELGKDDALDRYCVYSGTRLSRAMLFSDEIEIDHVLPFSRTLHDGIGNKVLCTRAANRAKGNQTPFEAFGHSPAGFDWSQIEERAARLAGRKPLLFAENALDAFLDGRDFLDRHLTDTAYLSRMARIYLSYICHKDRVWVSNGRLTSLIRGKFGLNSLLSSDSSKNRNDHRHHALDAAVIGLCGRRLIQRVATAAARSETLGENRLLADLELPWSAFREDLRATLEKVIASHKPDHGREAALHNETNYGWRAPPDARGNPLVGYRVPIENIGVSDLDAIPDAALRARLAKALVGKTNTKDVKAALELFSRETGVRKVMVEERLSVIPIHDRRTGEPYRYVKGDGNYCYDLFADEKGRWSGNVVSYFEANQQENATPQATNPHRRHLMRLHKGDLVVLAVENEKRKLMRVHKFSEGMIALVCPNEANVDARTREKSLKFLFKAPGALGKANASVASVDILGYANIKR

SEQ ID NO: 18314 - protein, 1028 aa, unidentified
  REGION 1..1028: note = Cas Enzyme sequence
MAKIKYRLGLDLGATSLGWCVYRLNDEEDPCGIVRAGVRIFSDGRDPKSLASRAADRRAKRQARRRRDRLLKRRQRMLDGLVQFGLLPSEAGERKALQALDPFELRAQGLDNALPPHHLGRALYHLCRKRGFRSSRKERAADEKETGKVNEAIRALAARISDAGCRTVGEYLAREHAERRPVRGRRRADGSYVLYLQRAMVESEFDALWTSQQRFHPELLTEEARLFLRDTLLFQRKLLPVNPGRCQFEYPEYRARLADPLQQKFRLLQELNNLRLVRGRESRTLTLDERDHLYGFLKVREGATFAKLREALGLKRNDPCRFNLETENRKGLKGDLLTAQFGSDACLGEAWNRLSMTEQRELAKLVATEADEDALVAKLCAAPWNLTPETASSVSAAKLPEDFGALSVKALEKIVPELERDVVTYDIAVQRAGYQHHSQLHSGEIFKSLPYYGQILRGYTAPADGAKNDDERRFGKISNPTVHIGLNQLRLLINALVKRYGAPSEIIVELAREFGYGPDRRRELLRTQQDNTERNARYDEHLRLQGLKTSRENRQKLQLWEELGKDDALDRYCVYSGTRLSRAMLFSDEVEIDHILPFSRTLHDGIGNKVLCTRAANRAKGNRTPFEAFGHSPAGYEWSHIEERIARLSGRKPLLFAANALEDFLNGRDFLDRHLTDTAYLSRVARIYLSYICHKDRVWVSNGRLTSLIRGKFGLNSLLSTDGSKNRNDHRHHALDAAVVGLCGRRLIQRVATAAGAAEKQGENRLLADLELPWPTFRDDLRGTLERIVASHKPDHGREAALHNETNYGWRGPSDARGAALVGYRVPIENIGSRDLAAIPDTALRNRLARVLAGKSNAKDAKAALEAFSRESGIRKVMVEERLSVIPIHDRRTDTPYRYVKGDGNYCYDLYVDDKGRWSGRVVSYFEANQEPDSAWQGSTPDRRHAMRLHKGDYIVLDGDGGARALMRVHRFSEGMIALVRPNEANVDARTRDKSDDLKFVFKAPGALGKAKAVSASVDILGYVNVQR

SEQ ID NO: 18315 - protein, 1070 aa, unidentified; identical to SEQ ID NO: 17024
  REGION 1..1070: note = Cas Enzyme sequence

SEQ ID NO: 18316 - protein, 1022 aa, unidentified; identical to SEQ ID NO: 15559
  REGION 1..1022: note = Cas Enzyme sequence

SEQ ID NO: 18317 - protein, 984 aa, unidentified
  REGION 1..984: note = Cas Enzyme sequence
MRRRRDRFLKRRARLMRLMIEHGFMPTDKNERQALRSLDPYELRRRGLEAPLTPFEFGRALFHLNQRRGFKSNRKMDRAEDDERGKIATAIGKVREQMSADGARTIGEWLAKRHEIREPVRARLNGQGARSQYELYVQRSMIAEEFDALWAAQNRFNPTMFTPHRRDILRDALLFQRRLRPVIPGKCPFEPEERRAPLALPSVQRFRIFQEVNHLRILQTGQPERPLTQQERDRVAEALLRTAKRSFDQLRKLLDLPEDATFNLESVKRKDLRGDTVGAELARKTAFGPQWLALPLERQDEIVQLLLDTEEEETVTAALRERHGLSAEQAAQAARTRLVDGYGSVSRKAISKILPYLESGVVTYDTAARAAGYDHARHNVGGDLIRLPYYAEWLPQYVGTGSGERRDPPEKRFGRIANPTVHVALNQLRAVVNAIIDKFGPPHQLVIELAREMKLSRERKRQVEQEQRLRQDDNDRFYKLLEEHGLPINGGNILRVRLWEELAQSTTDRRCPYTGEVISFVRLFSEEVEIEHILPFSATLDDSVSNKTVAMRKANRDKGNRSPFDAFGHSPPGYDWEQILNRASLMPFPKKRRFAPDALEQYQTDGDFLARHLTDTAFVSRVAREYLTAVCPSNQVWSIPGRMTALLRKRWGLNTLLSETGDKNRSDQRHHVIDAAVVAVTDRSLLQRISTLSARGAEQEVHRFLDGLEEPWPGYRRGLEFGLSKVIVSYKPDHGTGARLHNDTAYGLVNRSQEFDGPVEVVHRVPLLSIKGEPDAERIRDPAMRLRVQEAIRGKVGKDVTAALEALSEQMGIRRVRVVEPLSVIPIRRADGTPYKAYKGDSNYCYQVFVSTKTGRWFERVVSSFEAAAAKVSAIEDPMVMQLCTNDTVRLNEVGSPPSIFRVVKFNSNGQIIFASHHEGGNLKNRDADHGDSFKYRYCSASSLQKLQAQQVVVDPLGQVWPVKDVHEGTHRRDRRERPVSVLP

SEQ ID NO: 18318 - protein, 1011 aa, unidentified
  REGION 1..1011: note = Cas Enzyme sequence
MGVRIFPDGRNPKDGSSLAAARRLARSMRRRRDRFLKRRARLMRLMVEHGFMPTDRNERQALRSLDPYELRRRGLDAPLTPFEFGRALFHLNQRRGFRSNRKVDRAEDDDRGKIATAIGKVREQMNADGARTVGEWLAKRHQIREPVRARLNGQGARSQYELYVQRSMIAEEFDALWAAQSRFNPAKFTPHARDILRDALLFQRRLRPVIPGKCPFEPEERRAPLALPSVQRFRIFQEVNHLKILQTGQPERPLTQQERDRVAEALLRSAKRSFDHLRKLLDLPEDATFNLESVKRKDLRGDTVGAELARKTAFGPQWLALPLERQDEIVQLLLDTEEEETVTAALRERYGLSGEQAAQAARARLVDGYGSVSRKAILKILPHLESEVVTYDTAARAAGYDHARHNVGGELIRLPYYAEWLPQYVGTGTGERRDPPEKRFGRIANPTVHVALNQLRAVVNAIIDKFGPPHQIVIELAREMKLSRERKRQIEQEQEKRQEENDENRKILEQHGLPINGGNLLRVRLWKELAKSATERRCPYTGEMISFARLFSEEVEIEHILPFSATLDDSASNKTVAMRKANRDKGNRSPFEAFGHSPPGYDWEQILNRASLMPFPKNRRFAPDALEQYQTDGDFLARHLTDTAFVSRVAREYLTAVCPSNQVWSIPGRMTALLRKRWGLNTLLSDTDGKNRSDQRHHVIDSAVVAVTDRALLQRISTLSARGAEQEIHRFLDGLEEPWLGYRRGLEFGLGKVIVSYKPDHGTGARLHNDTAYGLVGGPQDLEGPVEVVHRVPLLSLKGESDAERIRDPSIRQRVQEVIRGKIGKDAAAALETLSAQMGIRRVRVVEPLSVIPIRRTDGTPYKAYKGDSNYCYQVFASKDTGRWCDRVVSSFDAASDRVEPTEDGLVMQLCVNDTVRLNGDNDSEHLIFRVVKMRQGQVILAGHQEGGNLKERDANRTDGFKYLNCSASRLQKLQAQQVLVDPLGQVWPMKHVHAGAHRRDRRKRPVSILS

SEQ ID NO: 18319 - protein, 950 aa, unidentified
  REGION 1..950: note = Cas Enzyme sequence
MIERDLMPKDPEARRSLRDLDPYELRRRGLNERLTPFEFGRALFHLNQRRGFRSNRRVNKEVNDQGKIATAVSGVRAQMAESGARTVGEWLAERHSRRDPVRARLHGQGARSSYELYVQRSMIEDEFDLIWSKQAPYDPALFNESTRALLRDALLFQRALRPVAPGRCPFESKEFRAPLALPTVQRFRMLQELNHLRYRSVGATESSLTLAERNRALNYLADAKSRSFEQLRQLLELPEASEFNLETAKRKGLKGCTTSVALRKVLGAGWDNLSATERDEITNFVVDVEDEATLVHLLSGQYGFSEQSAKAAASVRLDDQFGSLSLKAINKILPHLESDVRTYDQAARLAGYDHARRDEGGALSKLPYYAEYLAHYVGTGTYDPKDRPDKRYGRISNPTVHVGLNQLRQVVNAIIGKFGRPSQIVIELARDLKLSRRRKEELEKEQAENQRKADERRERLKELALPPTPGNMLRLRLWEDLASSPSDRRCPYSGDMISISRLFSDEIEIDHILPFAATLDDSANNKTISTRKSNRDKSKRTPVDAFGHSPGEYAWQAILDRAALLPPAKRKRFAPDALVQFSESGDFLARHLNDTAFLSRAAREYLAAICPTNKVWVVPGRLTAMLRSRWGLNTLLSSRNMKNRTDHRHHAIDATVVAVTDRALLQRMSSLSAAGAEGATARFLEGFDSPWDQFRNQLSFGLGKLVVSFKADHGVNSKLHNDTAYGIAGQHDSFEKPIEVVHRRPLSALKNERDLLKIRDEALRARLMPIAKDNQGKELIAALAKFSADTGIRRIRIVERLTVIPIADKDGHIYKGYKGDSNHSVLILQSRETGRWRDHVLSSFDAAGSSSPAAVGEVVMQLHVDDALRIQPESGGKELVRVVKISAGKITVASLTEGGALKERDADREDPFKYRTWSAATLQRLKAVAVVVDPLGQVWPLRRPGARTCS

SEQ ID NO: 18320 - protein, 1016 aa, unidentified
  REGION 1..1016: note = Cas Enzyme sequence
MATMRYRLGLDLGSTSLGWAMVRLDSSNRPCAIIKAGARIFSDGRNPKDGSSLAVTRREARSMRRRRDRLLKRKSRMLRSLVEHGFLPVDEVQRKSLVTMNPYALRAKGLDEALKPEEFGRALFHINQRRGFKSNRKTDKRDNDSGVLKNAISKLREALHAENCRSVGEWLHKRDCAKQTVRARYRQDKVVKEDGKIRIDKHYDLYIDRAMIEAEFDTLWRKQSEFNPKLFSDAARADLRDVLLHQRPLRPVKPGRCTLLPDEERAALALPSTQRFRIYQEVNNLRILRPSLKEEQLTLTQRDHLVAALEESSKRSFTQIKKAVGLGGAVQFNFEDPKRQELKGNMTTAILARSEHFGDSWHVFSESKQDEIVNQLVTEENEAKLIRWLQHETGVDERRAEAVANVGLPEGYGSLSAKALARILPELRRSVLTYDKAVLAAGFEHHSNISASASGEILPELPYYGIPLRRHVGFGTGNPEDNDERRFGRIANPTVHIGLNQTRLVVNALIKRYGHPSEVIVEVARELKQSKDQRDDENKRQAENQRRNLRLRSDIAGVLNLSPERIKTVDIQKMILWEELSSNIADRRCPYSGIQISAYMLLGEQVEIEHILPFSETLDDSLNNKTVALRTANRIKGNRAPWDAFGAQQISGFDYASILARAELMPKSKRYRFGEDAMQQWLKDDAGFLPRALNDTRHMSKVAREYLSLVCPQGTRVIPGRMTAMLRGKFGLNEVLGLHGEKNRNDHRHHAVDACVVAVTDQGLLQRFAAASASARERQLNRLVEDMPLPWANYLAHARRAIADIWVSHKPDHGYEGSMHNDTAYGLLGDGQVQFHKVIDGQRKRIKERLTVIEFSDARATERHGVLPNGMPRPYKGYKGDSNYCFEIVRSDAGQWQGEVVSTYDAYQLVRHHGLARVNSGTRSVSGKPLVFRLMIDDTVRLEVEGTVRTMRVATVSGNGQVFMAEVQEANVDARNRDKSDPFSYVSKMAGSFHRAKARRVTVSPIGELHDGGYRG

SEQ ID NO: 18321 - protein, 1013 aa, unidentified
  REGION 1..1013: note = Cas Enzyme sequence
MRYRLGLDLGSTSLGWAMVRLDSSNRPCAIIKAGARIFSDGRNPKDGSSLAVTRREARSMRRRRDRLLKRKSRMLRSLVEHGFLPVDEVQRKSLVTMNPYALRAKGLDEALKPEEFGRALFHINQRRGFKSNRKTDKRDNDSGVLKNAISKLREALHAENCRSVGEWLHKRDCAKQTVRARYRQDKVVKEDGKIRIDKHYDLYIDRAMIEAEFDTLWRKQSEFNPKLFSDAARADLRDVLLHQRPLRPVKPGRCTLLPDEERAALALPSTQRFRIYQEVNNLRILRPSLKEEQLTLTQRDHLVAALEESSKRSFTQIKKAVGLGGAVQFNFEDPKRQELKGNMTTAILARSEHFGDSWHVFSESKQDEIVNQLVTEENEAKLIRWLQHETGVDERRAEAVANVGLPEGYGSLSAKALARILPELRRSVLTYDKAVLAAGFEHHSNISASASGEILPELPYYGIPLRRHVGFGTGNPADNDERRFGRIANPTVHIGLNQTRLVVNALIKRYGHPSEVIVEVARELKQSKDQRDDENKRQAENQRRNLRLRSDIAGVLNLSPERIKTADIQKMILWEELSSNIADRRCPYSGIQISAYMLLGEQVEIEHILPFSETLDDSLNNKTVALRTANRIKGNRAPWDAFGAQQISGFDYASILARAELMPKSKRYRFGEDAMQQWLKDDAGFLPRALNDTRHMSKVAREYLSLVCPQGTRVIPGRMTAMLRGKFGLNEVLGLHGEKNRNDHRHHAVDACVVAVTDQGLLQRFAAASASARERQLNRLVEDMPLPWANYLAHARRAIADIWVSHKPDHGYEGSMHNDTAYGLLGDGQVQFHKVIDGQRKRIKERLTVIEFSDARATERHGVLPNGMPRPYKGYKGDSNYCFEIVRSDAGQWQGEVVSTYDAYQLVRHHGLARVNSGTRSVSGKPLVFRLMIDDTVRLEVEGTVRTMRVATVSGNGQVFMAEVQEANVDARNRDKSDPFSYVSKMAGSFHRAKARRVTVSPIGELHDGGYRG

SEQ ID NO: 18322 - protein, 1058 aa, unidentified; identical to SEQ ID NO: 15853
  REGION 1..1058: note = Cas Enzyme sequence

SEQ ID NO: 18323 - protein, 1056 aa, unidentified; identical to SEQ ID NO: 15551
  REGION 1..1056: note = Cas Enzyme sequence

SEQ ID NO: 18324 - protein, 995 aa, unidentified
  REGION 1..995: note = Cas Enzyme sequence
MIRLNADSEPCAIIKAGVRIFSDGRNPKDGASLAVTRREARAMRRRRDRLLKRKACVMRTLVAHKFFPEEKIERKALETMDPYLLRARGLDEKLTPAEFGRALFHINQRRGFKSNRKTDKKDNDNGALKTAIKNLHAKLKDENCRTVGEWLHRRNLAGETVRARYRENKVQRDDGKSKIEKSYDLYIDRTMVEAEFDALWEKQSALNPTQFTEVAREELRHALLHQRPLKPVKPGRCTFLPDQERAPKALPSTQRFRIYQEVNHLRILQPGLKEQALTLQQRDDLVQALERNSKRNFTQIKKLLGVGGAVQFNFEDPKRQELKGNMTSAILSKADNFGAAWFGFDEAKQDAIVLQLVTEENEAKLVRWLQEETGVDAARAEAIANEGLPEGYGSLCVVALARILPELRREVITYDKAVLAAGFEHHSNINPAASGEILPYLPYYGLPLQRHVGFGSNDPNDPDEKRYGRIANPTVHIGLNQVRLLVNALIKRYGHPSEVIIEVARELKQSKDQRDAESKRQADNQKRNKRLRTDIAGILQISEERVRIADIQKMILWEELSFDPADRRCPYSGVQLSAHMVLSDEVEIEHILPFSRTLDDSLNNKTVALRQANRIKGNATPWEAFGLKQVHGFDYAAILARAENMPKSKRYRFGEEGYQQWLKDDAGFLARALNDTRHMSIVAREYLRLICPKTRAIPGQMTAKLRANFGLNDILGLHGEKNRNDHRHHAVDACVIGVTDQGMLQRFAQASADTRDKQLSRLVENMPLPWQNYREHVARAIDRIWVSHKPDHSHEGAMHNDTAYGLRGEGRVSVRKLVDGQRVRVEEKLKVIEFASAKAGSRHGFLPDGAPRPYKGYKGDSNYCMEILRTEKGKWEGEVISTFAAYQMVRDHDFARLRNPSTGTNGKPLVMRLMIGDGVRLEVDGKLRTMRVVNLSANGQIFMTDLNEANADARNRTKEDGFSYVSKYAGSLQKAKGRSISISPIGELRDPGFRG

SEQ ID NO: 18325 - protein, 1042 aa, unidentified
  REGION 1..1042: note = Cas Enzyme sequence
MKYRLALDLGSTSLGWAMVRLNANNEPCAIIKAGVRIFSDGRNPKDGSSLAASRREARAMRRRRDRLLKRKNRMMAALLRHGFFPHDEAARKALEKTDPFALRAKGLDHALLPEEFARALFHINQRRGFKSNRKTDKKDNDSGALKTAIGQLREAMQVTGSRTVGEWLHARHQQGLSVRARYRENRTLNDNGKTKIEKSYDLYIDRAMIEAEFDALWAKQCELNPTLFHNTARDELKDCLLHQRPLKPVKPGRCTLMPDEGRAPLALPSQQRFRIYQEVNNLRLLREGLTGEPLTLTQRDQIINLLERPVREKKTAHEVSFDQIRTTLGLDGSTQFNLEDEKRKSLKGNTTNATLGKKVFFGDQWFTWSERQQNAIVRQLVNQENESRLIKRLHKYCGVSESTARDIANVSLAEGYGSLSAKALEKILPALRNDVITYDKAVRAAGFSDHSLLQAGDEVEGMSFDTGIERVNQLTGEITRLQAFFQLPYYGQYLQRHVGFGTGKPEDTAEKRYGKIANPTVHIGLNQVRTVVNALIKRYGHPSEVIVEVARELKQNWLQREEEKKRQVANQQRNNRLRADIATLLGISPERVHRADIQKMLLWEELSFNVADRRCPYSGVQISAQMLFSDQVEIEHILPFSQTLDDSLNNKTVATRQANRIKGNRTPAEAASDFETQGWRTEDMLQRASLMPKGKRYRFASDGMAQWLREDKGFLARALNDTRHLSRVAHEYLSLICPQNTRVIPGQMTAMLRGKFGLNDILGVGGEKNRSDHRHHAVDACVIAVTDQGMLQRFAKASASAREKQLNKLVETMPLPWDSYREHVQRAIGNIWVSHKPDHGHEGAMHNDTAYGLLGGGRVHVRKTVDGVRTREIGSLKVIEFSDASASTRHGLLPNGDPKPYKGYKGDSNYCMEIVRNQKGKWEGEVVSTFEAYQLVRQHGGNRLRHPKLSLSGKPLVMRLMIGDYLRFQTDDQLFVMRIASINSAGRLSLASHHEANTDARNRDKEGSWRYTYKQAGSLEKAKGRHIKISPIGELRDPGFIA

SEQ ID NO: 18326 - protein, 1025 aa, unidentified
  REGION 1..1025: note = Cas Enzyme sequence
MIRLNKDDQPCAVIKAGARIFSDGRNPKDGSSLAVTRRAARAMRRRRDRLLKRKNRLMATLVSLGFFPANINARKALQQLDPYGLRTKGLDAVLQPAEFARALFHLNQRRGFKSNRKTDKADNDSGALKTAISALRQELVATACRTVGEYLHRRNSAQQTVRARYREKRVILDDGKAKITKSYDLYIDRAMVEAEFDALWSKQSELNPTLFTDSARNQLKDCLLHQRPLKPVRPGRCTLLPEEERAPLALPSQQRFRIYQEVNNLRILRDGLRDEVLTLAQRDQVVQALEVNGKRTFNQLKKLLGLRGTDGFNLEDAKREELKGNASSAALSRNDAFGKKWFDFGPDLQDAIVLQLAGEENEAKLIEWLTSETGIDVLVAENIAGVGLPEGYGSLSVEALARMLPFLRGSVCSYAEAAKFAGFHHSRLDTNVEIADLTFQAERVVAETGEIQTLHTFKTLPYYGEYLQRHVSFGTGKSEDSPEKRFGKIANPTVHIGLNQLRIVVNALIARYGHPDQVVVELARDLKQSRDQRLETQKRQAENQRRNQRIRAEIAGLKGGELESVKAADIQKMILWEELSNDVADRRCPYSGTTISAAMLLSDQVEIEHILPFSRTLDDGLNNKTVAMRKANRIKGNRTPWEAKDDFLLQGWGFESVLERAKLMPLNKRYRFGEEGYQKWLREDKGFLARALNDTRYLSRVATEYLRLVCPQDTRVIPGQMTAMLRAKFGLNHVLGLDGEKNRDDHRHHAVDACVIAVTDQGLLSRFASASASAREKQLNRLVEKMPMPWGDDQDGIFFKSVQRAVGAIWVSHKPDHGYEGAMHEDTAWGISVNGQSSRRVRGDDGKRHREVKNRAVIPISSTNDALRHGLDEEGQPKAYKGYVGGSNYCIEIVRTATGGWEGETVSTFEAYQIIRQLAATNGLKRLRSPSASLSGKSLAMRLQLGDTVRLLVNGNLETMRVVKIGSNGQMFFAPHNEANVDARNRDKNSSFSYVSKYAGSLRKAEGRKITVSPAGELRDPGFRG

SEQ ID NO: 18327 - protein, 1045 aa, unidentified
  REGION 1..1045: note = Cas Enzyme sequence
MSEGFRYRLGLDLGASSLGWCLVRLNQQNAPVALVKLGVRIFSDGRNPKDGSSLAVTRRMARQMRRRRDRLLKRKTKLADALIRLNFFPSDEVERKALANLNPYILRQKGLDEALTPAEFARALFHINQRRGFKSNRKTNKNDNDGGKLKTAIRRVHEELQSNNARTIGEWLADRHTRRESVRARLRGSTKKEQAYDLYIDRAMVEAEFDALWSRQSELQPERFNQTSRDVLKDILLYQRPLKPVVPGRCTLNPEEERAPVALPSVQRFRIYQEVNHLRLMEGLAGEAPLTLEQRDSVVDLLEKKSEVSFIAIRRALGIGGGQRFTLEDAEGRRDRLKGNATSAQLSRKELFGPDWHAFTPDKQETIAEKLINEQSESALIDWLVAETGIDDVRAERIANASLPDGFGNLGRTAIGKVLPELQAAVITYDKAVIHAGYDSHSALSHSESTGEIMRALPYYGEALQRHVGFGSGRVEDSPEMRYGRIANPTVHIGLNQVRQVVNAIIGRYGNPAEIVIEVARDLKLGQEKKAEIRRDQAERQKQNDRWREEIRKIKDGMDATAEDMLRMRLWTELNPTDAADRRCPYTGEQISLGMLFSDAVEIEHILPFSRTLDDSLNNKTVALRRANRDKGNRTPFEAFGHSPEGYVYQNIQNRALSMPGNKAKRFAPDGYEKWLKEDKSFLARALNDTAYLSRVAREYLSLVCPARDVRAVPGRMTAMLRGFFGLNSLLSGSAVKNRDDHRHHAVDAAVIAITDQGLLQRFATASASAREKQLRRLVENMEPPWQGYRDQVGAAIARCRVSHKPDHGHEGGLHNDTAYSLLPEGRVSHRVFLSSFSSDKEIEKTEFASPLLKEWLLEQTRGLSGKEFAAKLDAITRDFRHRRVKIVEKLNVLQIANRDGKPYKGYKGDSNHCIEIVGNDKGKWQGEVISTFDAYRIDAKEKGRLRHSGLSQSGKPLVMRLCIDDTVMFETEGVPVVYRVASIRSNGVMSFAPIHEANVDARNRDKEESFSYVSKTAGSLQAAKGRRVTISPLGMLNGQRHFTG

SEQ ID NO: 18328 - protein, 1016 aa, unidentified
  REGION 1..1016: note = Cas Enzyme sequence
MRYRLALDLGSTSLGWAMVRLNTENPPAPVAVIKAGVRIFSDGRNPKDGSSLAVTRREARAMRRRRDRLLKRKARMMHTLIAHGFFPKDVAARKILETLNPYELRSKGLSEALRPEEFARALFHLNQRRGFKSNRKTDKKDNDSGALKTAINRLRETLKTENCRSVGEWLHKRQANGQTVRARYHQRRIEKEDGKNRIDKSYDLYIDRAMIEAEFDTLWAKQTELDPHVFNETARAELKDCLLYQRPLKPVRPGRCTLLPEHERAPLALPSQQRFRIYQEVNNLRILRDGLKEEPLSKMQRDQIVTALEQNTKCSFIKIRKLLGLDSTVQFNFEDPKRQELKGNGTNIILSKPEHFGSQWFQWSEHQQDQIVMQLITEENLTRLIDWLQKETGIDEAKAEKIAEASLPEGYGSLSIQALTKILPVLRQELVSYDKAVLAAGFAHHSLINHAHTGEILSSLPYYGQYLQRHVGFASPDAKPSDSPEKRYGKIANPTVHIGLNQIRTVVNAIIQRYGHPTEVIIEVARELKQNREQRKEEIQHQANNQKRNERLRADAAQILECAPERVRHADIQKLILWEELNLKDSANRCCPYSGIQISAHMVLSDQVEIEHILPFSQTLDDSLHNKTVALRQANRIKGNRTPWEARDDFAAQGWDYEAILERAKQMDRRKAYRFGEEGYQKWLKDDKSFLARALNDTRYLSRVAREYLSLICPQATRVIPGQMTAMLRRQFGLDNILGSNSEKNRNDHRHHAIDACVIAITDQGMLQRFAKASASTKEKQLNRLVEAMPLPWTTYREHVARAIQHIWVSHKPDHGHEGAMHNDTAYSLLGEGRVSVHKIIDGKRQREVSVLKVIEFTDAQASQRHGVLADGSPRPYKGYKGDSNYCIEIVRNEKGKWEGEVISTFQAYQLVRQHGLQRLTHSSLSASGKPLVMRLIRNDCIRIKQNGLYRTLRLCKMRAEGQMGFADLNEANVDARTRSKELSYVLKSAGSLQISQARRVAISPIGELRCVGFKV

SEQ ID NO: 18329 - protein, 1013 aa, unidentified
  REGION 1..1013: note = Cas Enzyme sequence
MNKMRYRLALDLGSTSLGWAMVRLNVHNEPCAVIKAGVRIFSDGRNPKDGSSLAVSRREARAMRRRRDRLLKRKARMMKTLIAHGFFPQEEAARKALERLEPLALRVKGLDSALKPGEFARALFHINQRRGFKSNRKTDKKENDSSALKKAIGQLREAMQTTDCRTVGEWLYARHQKGLPIRARYRETRTTKDDGKTKIEKSYDLYIDRAMIEAEFDALWAKQAQLNPGLFHETAHAELKDCLLHQRPLKPVKPGRCTLMPEEERAPLALPSQQRFRIYQEVNNLRLLREGLTEELLTLAQRDEVVHALETNPKRTFTQLRKLLGFSGKFNLEDDKRTELKGNVTSAMLSKKEMLGSQWASMNEAQQDALVMQLLTEENESKLISWLQTSTGVDEVTAERLANAGLAEGYGSLSAKALEKILPELRRAVITFDKAVIAADFEHHSHISHAATGEILPKLPYYGEYLQRHVGFGSGKPEDPAEKRFGKIANPTVHIGLNQVRTVVNALIARYGHPSEVVVEVARDLKQSKEQRKEEQKRQADNQRRNERMRTQIAGLLNTSPERVRVADLQKMILWEELNRDNAADRRCPYSGVQISAAMLFSEQVEIEHILPFSQTLDDSLNNKTVATRQANRIKGNRTPWQAKDDFAVQGWSTADMLDRAELMPKNKRYRFGQNGYEKWLREDKGFLARALNDTRHLNRVAKEYLSLICPQDTRAIPGQMTAMLRAKFGLNDILGVDGLKNRNDHRHHAVDACVIAVTDQSLLQRFAQASASARERQLNKLVETMPMPWKNYREHVQRAIYNIWVSHKPDHGHEGAMHNDTAYGLLGNDRVHVRKMVDGQRVREESTLKVIAFTNAKVNARHGVLPNGEPRPYKGYKGDSNYCIEIVRNDKGKWEGEVISTFEAYQLVRQADVKRLRHPTLSCSGRPLVMRLVIDDMVVLMIDGTKHVLRLAYMASAGTLAFAPCNEANVDKRTRAKELAYIFKTAGSMQKANGRKVTISPIGELSDPGFRD

SEQ ID NO: 18330 - protein, 1012 aa, unidentified
  REGION 1..1012: note = Cas Enzyme sequence
MQKMRYRLALDLGSTSLGWAMVRLDSQTEPCAVIKAGVRIFSDGRNPKDGSSLAVSRREARAMRRRRDRLLKRKNRMMATLLRHGFFPQDETARKALEKTDPFALRAKGLDQILLPEEFARALFHINQRRGFKSNRKTDKKENDSSALKKAIGQLREAMQDTGCRTVGEWLYARHQQGLSVRARYRENRITKDDGKTKIEKSYDLYIDRAMIEAEFDALWAKQSELNPTRFHDTARAELKDCLLHQRPLKPVKPGRCTLLPDEERAPLALPSQQRFRIYQEVNNLRLLREGLSEESLTLAQRDQLAQALETNTKRSFTQIQKLLGFSGQFNLQDEKRTELKGNSTSAMLSKKEFFGSQWVSFDEAQQDAIVMQLVSEENEARLIAWLQTETGVDEITAERIANLPLAEGYGSLSAKALETILPALRGEVITYDKAVLAAGFDHHSHISHAATGEILPELPYYGQYLQRHVGFGTGKPEDPAEKRYGKIANPTVHIGLNQVRTVVNALIKRYGHPSEVIGELARDLKQSQEQRKEEQKRQADNQRRNERMRSVIADLLNTSPDRVRTSDLQKMILWEELSFNVADRRCPYSGVQISAQMLFSDQVEIEHILPFSQTLDDSLNNKTVAMRQANRIKGNRTPAEAAADFETQGWPAAEMLQRASLMPKGKRYRFAQDGLEQWLREDKGFLARALNDTRHLSRVAREYLSLICPQGTRVIPGRMTAMLRAKFGLNDILGLDGEKNRNDHRHHAVDACVIAVTDQGLLQRFAKASASAREKQLNKLVETMPLPWPSYRDHVQRAIQNIWVSHKPDHGHEGAMHNDTAYGLLGGGRVQVRKWVEGARTREISALKVIEFSDASASARHGLLPNGEPRPYKGYKGDSNYCMEIVRNEKGKWEGEVVSTFEAYQLVRQYGLTRLRHPALSVSARPLVMRLMIGDSVGIEMEGLRKIYRLSYMASAGTMAFSECHESNVDKRTRTKELSYLFKTAGSLQKSKGRRVAISPAGELKDTGFSG

SEQ ID NO: 18331 - protein, 1011 aa, unidentified
  REGION 1..1011: note = Cas Enzyme sequence
MRYRLALDLGSTSLGWAMVRLNLQDEPCAVIKAGVRIFSDGRNPKDGSSLAVSRREARAMRRRRDRLLKRKNRMIATLLRHGFFPQDEAARKALEKTDPFALRAKGLDQALLPEEFARALFHINQRRGFKSNRKTDKKENDSGALKTAIGQLRQALQATGCRTVGEWLFARHQQGLSVRARYRENRIAQDNGKTKIEKSYDLYIDRAMIEAEFDALWAKQCELNPALFHDTARDELKDCLLHQRPLKPVKPGRCTLMPDEERAPLALPSQQRFRIYQEVNNLRLLREGLSEEPLTLTQRDQLVHALETNSKRSFIQIQKLLGFSGQFNLQDEKRTELKGNSTSAMLAKKEFFGSQWVSFDEVRQDAIVMQLVAEENEARLIAWLQTETGVDEMTAERIANVPLAEGYGSLSAKALETILPALRAEVITYDKAVLAAGFDHHSHISHAATGEILPELPYYGQYLQRHVGFGTGKPEDTAEKRYGKIVNPTVHIGLNQVRTVVNALIKRYGHPSEVIVELARDLKQSQEQRKEEQKRQADNQRRNERMREDIAKLLHTSPERVRAIDLQKMILWEELSFNVADRRCPYSGVQISAQMLFSEQVEIEHILPFSKTLDDSLNNKTVAMRQANRIKGNRTPAEAAADFATQGWPIEDMLQRASLMPKGKRYRFAPDGLEQWLREDKGFLARALNDTRHLSRVAREYLSLVCPQDTRVIPGRMTAMLRAKFGLNDILGLDGEKNRNDHRHHAVDACVIAVTDQGMLNRFAQASASAREKQINRLVETMPLPWESYRDHVKRAIDHIWVSHKPDHGHEGAMHNDTAYGLLGGGKVQVRKTLDGVRTREVAALKVIEFADAHATARHGLLPNGEPRPYKGYKGDSNYCMEIVRNEKGKWEGEVVSTFEAYQLVRKHGLVRLRHPVLSVSGRPLVMRLMKDDCVRLTVDGVTDLYRVCWIRTDTRLAFAKINEANVDARDRDKSSNFSYLVKSASVLKTMAAQGIVISPIGLVTDRSAKS

SEQ ID NO: 18332 - protein, 1011 aa, unidentified
  REGION 1..1011: note = Cas Enzyme sequence
MRYRLALDLGSTSLGWAMVRLNLQDEPCAVIKAGVRIFSDGRNPKDGSSLAVSRREARAMRRRRDRLLKRKNRMIATLLRHGFFPQDEAARKSLEKTDPFALRAKGLDQALLPEEFARALFHINQRRGFKSNRKTDKKENDSGALKTAIGQLRQALQATGCRTVGEWLFARHQQGLSVRARYRENRIAQDNGKTKIEKSYDLYIDRAMIEAEFDALWAKQCELNPALFHDTARDELKDCLLHQRPLKPVKPGRCTLMPDEERAPLALPSQQRFRIYQEVNNLRLLREGLSEEPLTLTQRDQLVHALETNSKRSFIQIQKLLGFSGQFNLQDEKRTELKGNSTSAMLAKKEFFGSQWVSFDEVRQDAIVMQLVAEENEARLIAWLQTETGVDEMTAERIANVPLAEGYGSLSAKALETILPALRAEVITYDKAVLAAGFDHHSHISHAATGEILPELPYYGQYLQRHVGFGTGKPEDTAEKRYGKIVNPTVHIGLNQVRTVVNALIKRYGHPSEVIVELARDLKQSQEQRKEEQKRQADNQRRNERMREDIAKLLHTSPERVRAIDLQKMILWEELSFNVADRRCPYSGVQISAQMLFSEQVEIEHILPFSKTLDDSLNNKTVAMRQANRIKGNRTPAEAAADFATQGWPIEDMLQRASLMPKGKRYRFAPDGLEQWLREDKGFLARALNDTRHLSRVAREYLSLVCPQDTRVIPGRMTAMLRAKFGLNDILGLDGEKNRNDHRHHAVDACVIAVTDQGMLNRFAQASASAREKQINRLVETMPLPWESYRDHVKRAIDHIWVSHKPDHGHEGAMHNDTAYGLLGGGKVQVRKTLDGVRTREVAALKVIEFADAHATARHGLLPNGEPRPYKGYKGDSNYCMEIVRNEKGKWEGEVVSTFEAYQLVRKHGLVRLRHPVLSVSGRPLVMRLMKDDCVRLTVDGVTDLYRVCWIRTDTRLAFAKINEANVDARDRDKSSNFSYLVKSASVLKTMAAQGIVISPIGLVTDRSAKS

SEQ ID NO: 18333 - protein, 1012 aa, unidentified
  REGION 1..1012: note = Cas Enzyme sequence
MRYRLALDLGSTSLGWAMVRLNLQDEPCAVIKAGVRIFSDGRNPKDGSSLAVSRREARAMRRRRDRLLKRKNRMIATLLRHGFFPQDEAARKALEKTDPFALRAKGLDQALLPEEFARALFHINQRRGFKSNRKTDKKENDSGALKTAIGQLRQALQATGCRTVGEWLFARHQQGLSVRARYRENRIAQDNGKTKIEKSYDLYIDRAMIEAEFDALWAKQCELNPALFHDTARDELKDCLLHQRPLKPVKPGRCTLMPDEERAPLALPSQQRFRIYQEVNNLRLLREGLSEEPLTLTQRDQLVHALETNSKRSFIQIQKLLGFSGQFNLQDEKRTELKGNSTSAMLAKKEFFGSQWVSFDEVRQDAIVMQLVAEENEARLIAWLQTETGVDEMTAERIANVPLAEGYGSLSAKALETILPALRAEVITYDKAVLAAGFDHHSHISHAATGEILPELPYYGQYLQRHVGFGTGKPEDTAEKRYGKIANPTVHIGLNQVRTVVNALIKRYGHPSEVIVELARDLKQSQEQRKEEQKRQADNQRRNERMREDIAKLLHTSPERVRAIDLQKMILWEELSFNVADRRCPYSGVQISAQMLFSEQVEIEHILPFSKTLDDSLNNKTVAMRQANRIKGNRTPAEAAADFATQGWPIEDMLQRASLMPKGKRYRFAPDGLEQWLREDKGFLARALNDTRHLSRVAREYLSLICPQGTRVIPGRMTAMLRAKFGLNDILGLDGEKNRNDHRHHAVDACVIAVTDQGLLQRFAHASASAREKQLNRLVETMPLPWESYRDHVQRAIDHIWVSHKPDHGHEGAMHNDTAYGLLGGGKVHVRKTLDGVRTREVAALKVIEFADAQATARHGFLPNGEPRPYKGYKGDSNYCMEIVRNEKGKWEGEVVSTFEAYQLVRQHGLARLRHPALSVSGKPLVMRLMIGDVLALSTPDNPKMIARITTISGNGQIFMAAHNEANVDARNRDKSDPFGYVSKMAGSLQKANGRHASISPIGQLLDPGLSN

SEQ ID NO: 18334 - protein, 1016 aa, unidentified
  REGION 1..1016: note = Cas Enzyme sequence
MTKMRYRLALDLGTTSVGWAIARINDENKPFAFIKAGVRIFRDGRNPKDGSSLAVSRREARAMRRRRDRLLKRKNRMMATLLRHGFFPQDAVARKALEKIDPFEVRAKGLDHALRPEEFARALFHINQRRGFKSNRKTDKKENDSGALKTAILQLRQAMQASGCRTVGEWLNNRHQNGLTVRARYRENRMLKEDGKTKIEKSYDLYIDRAMIEEEFDALWRKQSALNPTQFTETARAELKDCLLHQRPLKPVTPGRCTLLPDEVRAPLALPSQQRFRIYQEVNNLRLLGEGLTEEPLTLEQRDMVVNSLETNTKRSFLQIQNTLGLSGRFNLQDEKRADLKGNSTSATMRKKELFGNKWAYFDEATQDHIVMQIISQESETGLIAWLQSETGVDEVSAERIANAPLAEGYGSLSIKALNQILPALRSKVTTYDKAVQAAGFAHHSHISHAATGEILPELPYYGQYLQRHVGFGTGKVEDIPEKRFGRIANPTVHIGLNQVRAVTNALIKRYGHPSEVIVEVARDLKRSQAQRKEMQLRQAANQKRNDRMRNDIANLLNISPERVRTNDLQKMILWEELSFNVAERRCPYSGIQISAQMLFSDLVEIEHILPFSQTLDDSLNNKTVATRQANRVKGNRTPAQAAADFEAQGWPRSGMELRASLMPKDKRYRFGEDGLARWLREDQGFLARALNDTRHLSRVAREYLSLICPQNTRVIPGSMTALLRRRFGLDDLLGANGHKNRNDHRHHAVDACVIAVTDQGLLSRFASASADAKEKQLGKLVETMPLPWPNYRDHVERVIDNIWVSHKPDHSHEGAMHNDTAYGLLDNGFVRVQKTIDGVRLRDTFALKVIEIRAQKASARHGLLPNGDLKPYKGYKGDSNYCIEIVRNAKGKWEGEVVTTFEAYQVVRQHGVSRLRNNNLSLSGKALVMRLMINDVLALNMDDGQKMIARIATISGNGQIFLAAHHESNVDARNRDKADPFAYVSKTAGSLQKANGRRASISCIGELREYKLTDL

SEQ ID NO: 18335 - protein, 1063 aa, unidentified
  REGION 1..1063: note = Cas Enzyme sequence
MLHKMRYRLALDLGSTSLGWAMIRLNADNEPCAVIKAGVRIFSNGRNPKDGSSLAVTRREARAMRRRRDRLLKRKARMMRTLIEYSFFPSEESERKALETMNPFALRAKGLDAALTPAEFGRALFHINQRRGFKSNRKTDKKDNDSGALKTAINKVRATIEAEGCRTVGEWLNKRDVAGQTVRARYRQNKIIKDDGKTKIDKSYDLYIDRAMIEHEFDELWKKQAELNPALFTEAARADLKDVLLHQRPLKPVKPGRCTFMPDEERAPLALPSTQRFRMYQEVNNLRILRDGLKEEPLTLRQRDDLIAALEAHNKRTFTQIKKLLGVGGAAQFNFEDPKREELKGNTTSAILSKDEHFGSAWFTFDEAKQDTIVLQLVKEENEAKLIRWLQDETGIDEKHAQAIANVGLPEGYGSLCALALARILPELRRDVVTYDKAVQAAGFDHHSRLNPYAEIPNITFKIESIDQDSGEIKQFHIHKELPYYGEYLQRHVGFGSGKPEDVPEKRYGKIANPTVHIGLNQVRLVVNALIKRYGHPSEVIVELARDLKQSKDQRDEENKRQTANQNRNKRLRTSIAEVLRISEERVRRDDIEKMILWEELSFDPADRRCPYSGAQISTAMLLSDEVEIEHILPFSQTLDDSLNNKTVALRKANRVKGNHTPWEARLEFANQDWDYAAILARAEQMPKAKRYRFAEDGLQRWLKDDAGFLPRALNDTRHMSKVAREYMSLICPNTRVIPGRMTAMLRGKFGLNDVLGLNGEKNRNDHRHHAVDACVIAVTDQSLLKKFADASASTRERQLNRLVENMPTPWGTDGDKKYLKSVKHAIENIWISHRPDHAYQGGIFDATIYGLRGKGKATYRQEVDGKRQRPILNREVVAFADDKAKSQNGYRHGLLEDGSPKPYMGLWSRSNYCIEIIKTENGEWSAEVIERYRAYQIVAEFGEARLRHPTLSISGEPLVMRLLIDDYVRAKIDGKTQLLCVLKINSTGAITFVLHNESNISARYTAKLAAQKAQREEKPFNTSALEDNFFQKSISSDSLRSFKARRVSISPIGELHDPGFKD

SEQ ID NO: 18336 - protein, 1031 aa, unidentified
  REGION 1..1031: note = Cas Enzyme sequence
MPVTYRLALDLGSTSLGWAVLRLDPAALEPIAIIKAGVRIFSDGRNPKDGASLAVTRRAARAMRRRRDRLLKRKARMQDKLVKHGFFPSDMDERKALERLDPYALRAKGLREALTPGEFARALFHINQRRGFKSNRKTDKKDNDSGALKKAISHLRQQMEAGGHRTVGEHLWSRLQQGLGVRARYRETPFTNDEGKKRIDKSYDLYIDRAMIEQEFDALWAAQAAFNPALFHEVARADLKDTLLHQRRLRPVKPGRCTLLPEEERAPLALPSTQRFRIYQEVNHLRLLGEDLREVALTLAQRDAVANALESKARLTFEQIRKLLKLSGSVRFNLEDAKRTELKGNTTSAALARKELFGAAWGGFGEALQDEIVWQLVTEEGEGALIAWLQAHTGVDEARAQAIADASLPEGYGSLSRKALARIVPALRAGVVTYDKAVQAAGFDHHSQLGFEYDAGEVEDWVHPDTGEIRPVFKQLPYYGKPLQRHVAFGSGKPEDPDERRYGKIANPTVHIGLNQVRTVVNALIRRYGRPTEVVIELARDLKQSREQKAEAQRKQAENQRRNVRIRKSIAEVLGIGEERVRGADIQKWICWEELSFDVADRRCPYSGVQISARMLLSDEVEVEHILPFSKTLDDSLNNRTVAMRQANRIKRNRTPWAAREDFEAQGWSYEGILQRAERMPLRKRYRFAPDGYERWLGDDKDFLARALNDTRYLARVAAEYLRLVCPGSGTRVIPGQMTARLRGKFGLNGVLDPDGEKNRNDHRHHAVDACVIGVTDQGLMQRFANASAQAREDGLTRLVDDMPRPWPTYRAHVERAVRHIWVSHRPDHGFEGAMMEETSYGIGKDGSIKQRRKADGSPGREITNLIRIHEATQPQRHGAGPDGQPLPYKGYVGGSNYCIEITMNDKGKWEGEVISTFRAYGIVRTSGLGQLRHPRMGQNGRELVMRLVIGDSVRLEVDGIERTMRVVKISGSNGQIFMAPIHEANVDARNSDKQDAFAYTSKYAGSLQKTKARSVTISPIGEVRDLGFKG

SEQ ID NO: 18337 - protein, 1016 aa, unidentified
  REGION 1..1016: note = Cas Enzyme sequence
MTKMRYRLALDLGSTSLGWAMVRLNESNEPNAVIKAGVRIFSDGRNPKDGSSLAVTRREARAMRRRRDRLLKRKARMMNYLTRYGFFPSNEDDRKKLEILDPYELRSRGLTKALTPGEFARALFHINQRRGFKSNRKTDKKENDSSALKNAIKGLKLAIQTDGCQTVGEWLYKRHTSGQTVRARYRQTPIKQENGKIKINKSYDLYIDRGMIEAEFDALWHVQSNYNPALFSELVRADLKDCLLHQRPLKPVRPGRCTLMPDEERAPLALPSVQQFRIYQEVNNLRILGEGLSEGPLTLDQRNNLVEALEANSKRTFTQIKRLLDLSGTVQFNFEDPKRQELKGNTTNAILSKTDHFGLEWFNFTLDRQDEIVEKLIDEENETRLIAWLQNEFNLPEDRAEKIANTSLPEGYGSLGVKALKRILPELKKSVITFDKAVISAGFEHHSNISHASTGEILPSLPYYGEYLQRHVGFGTGVPEDHPEKRFGKIANPTVHIGLNQIRVVVNSLLKRYGHPSEVIVELARDLKQSQLQRKEDNLRQAENQRRNERFKIDIASALNISTERVRSADIQKMIMWEELSHDIADRRCPYSGVQISVHMLLSDQVEIEHILPFSQTLDDGINNKTVAMRQANRVKGNRTPWEAKDDFLRQGWKYEEILSRAEKMPKNKRYRFGDDGYQHWLREDKTFLARALNDTRHLSRVAREYMSLICPQATRVIPGQMTAMLRSKFGLNDILGLKGEKNRNDHRHHAVDACVIAVTDQGMLQKFSRASASAREQNLTRLVENMPLPWETYREHVARAIAAIYVSHKPDHGHEGAMHNDTAYGLLGDGIVRTHKVVDGIRTREDSNLKVIEISSTKAMNRHGTLPDGFPRPYKGYKGDSNYCIEIFKTDDGKWVSEVISTFQAYQVVRHEGIERLKHSKLSLNGKVLIMRLMIGDTLRFDVDSQTKTMKIATISGSGQMFFSPLSEANVDARNRDKTDAFKYISKMAGSLKSANARQITISPIGEVRDKGFAG

SEQ ID NO: 18338 - protein, 1058 aa, unidentified
  REGION 1..1058: note = Cas Enzyme sequence
MCGFSFGASFSLLAFRAHISIKYMFNYIIKFSKSTQIFQEAAMTKMRYRLALDLGSTSLGWAMVRLNESNEPNAVIKAGVRIFSDGRNPKDGSSLAVTRREARAMRRRRDRLLKRKARMMNYLTRYGFFPSNEDDRKKLEILDPYELRSRGLTKALTPGEFARALFHINQRRGFKSNRKTDKKENDSSALKNAIKGLKLAIQTDGCQTVGEWLYKRHTSGQTVRARYRQTPIKQENGKIKINKSYDLYIDRGMIEAEFDALWHVQSNYNPALFSELVRADLKDCLLHQRPLKPVRPGRCTLMPDEERAPLALPSVQQFRIYQEVNNLRILGEGLSEGPLTLDQRNNLVEALEANSKRTFTQIKRLLDLSGTVQFNFEDPKRQELKGNTTNAILSKTDHFGLEWFNFTLDRQDEIVEKLIDEENETRLIAWLQNEFNLPEDRAEKIANTSLPEGYGSLGVKALKRILPELKKSVITFDKAVISAGFEHHSNISHASTGEILPSLPYYGEYLQRHVGFGTGVPEDHPEKRFGKIANPTVHIGLNQIRVVVNSLLKRYGHPSEVIVELARDLKQSQLQRKEDNLRQAENQRRNERFKIVIASTLNISTERVRSANIQKMIMWEELSHDIADRRCPYSGVQISVHMLLSDQVEIEHILPFSQTLDDGINNKTVAMRQANRVKGNRTPWEAKDDFLRQGWKYEEILSRAEKMPKNKRYRFGDDGYQHWLREDKTFLARALNDTRHLSRVAREYMSLICPQATRVIPGQMTAMLRSKFGLNDILGLKGEKNRNDHRHHAVDACVIAVTDQGMLQKFSRASASAREQNLTRLVENMPLPWETYREHVARAIAAIYVSHKPDHGHEGAMHNDTAYGLLGDGIVRTHKVVDGIRTREDSNLKVIEISSTKAMNRHGTLPDGFPRPYKGYKGDSNYCIEIFKTDDGKWVSEVISTFQAYQVVRHEGIERLKHSKLSLNGKVLIMRLMIGDTLRFDVDSQTKTMKIATISGSGQMFFSPLSEANVDARNRDKTDAFKYISKMAGSLKSANARQITISPIGEVRDKGFAG

SEQ ID NO: 18339 - protein, 1020 aa, unidentified
  REGION 1..1020: note = Cas Enzyme sequence
MTTKTGRFRLALDLGSNSIGWVVFALDEDDIPSAVERAGVRIFSNSRNAKTNVPLSVEYREARGARRRRDRFLARKKTILGELKRGEALPSYPADRSAFANSDPYLLRHKALSEKLTPHQLARVILHLSQRRGFKSNRKDKKKEEGGKTLGERIGALKSAIHQSGAETLGSFLYLERRAKSLPTRMRSNEEWYPSRELYQAEFTAIRNAQESYGTLSPKAWDTIQNALFFQRPLAKQPVGRCLFMHDHDRGRRALPSFQSFRLLQQLANLKVYELGKPARSLTEQERLILLEKLGRSKELDFQSARELLHLADARFNLEVRRQGFRAASKLYGDRTGTFLAGKKYFGKAWWNIPRDVQDRIVNQILDSEDYKDECTLKEYLEELGLLDSEQIEDLLNLDEDSFEKGYCEFCPEFLNKLAERMLTHPSDTYDKAVAALGYHHSHEDVAVKSKLPYYGAAIPQSVRVTGKERNPEEREFGKIANPTVHVALNQLRKVVNALLERYCSFSDVIIEVARDLPLGEDGIRELAKENRNNEKQNQKWREMLQELGQRDNYKNRLKLRLWKELGGDKTVGIKCPYSGEGIGMERLFSAEIEVDHILPKSLTFTNHHSNLTLCVRHANQFKGDRAPYEAFTSAQSPYRYEDILARASLLPPAKARKFSPDAMEAFKDKGAFLERQLNDTHYISKVANRYLREISPRVMTSRGRLTAFLRGELRLNFLLSNDGRKDRNDHRHHAVDAFLVGLSAPKSLDLVERCVNGRKNGELMTPVTRLVTEFQKLITTMVVSHRIDHDPAKGLFEDTNYGYATDGRLLVRKPLDKLTSYDAIVDERIKSLALSLIEQGIEDKSEIASAITQKFGAKKVRIFKKDASAVEITHPIGNRRFKKHIVPLDICKVEFWRMPRATELVAASYTRCETLNGVQKKPHPAAKLIFTFQKGDFLRIEDQSGLRTVVIESLRPSNSQILFYDSTSSKPENAVGRTVLFSGLANRKARTVHVNVLGEVKDPGPWWINGNKNSGNTEC

SEQ ID NO: 18340 - protein, 1050 aa, unidentified
  REGION 1..1050: note = Cas Enzyme sequence
MISKMRYRLALDLGVSSIGWCLIRLNAKERPVAIIRMGTRIFPDGRKPKDGTSLAVERRNLRQMRRRRDRLLKRKSRMMSALIRLDFFPKDEKQRRELLKLDPYVLRKKGLYEPLSGPEFARALFHINQRRGFKSNRKTDKNSNDKEKGVANKAIQDLHEKLKQEDCQTLGEWLANRHARRESVRARLRIEEKDEGEKIKKIKRYDFYVDRAMVEHEFDVLWKKQHSYNPTLYNDAARAELRDELLFQRELKPVKPGRCTLLPDEVRAPLALPSAQRVRIYQEVNNLRILNEDLTEKPPLTLEQRNQIINLLEHQKEVTFVQIRKELGLSGVTQFNLEDQKRNKLKGNLTNAVLAKKGVFGKQWYEFNDNLQETIVEKLLDEENLSELVIWLQENTGVDESMAEKIADTGLPEGYSRLSSAALRRLLPELSQDVLVYSEAVKRAGLGSHSALSHTERTGELMDELPYYGIPLQRHVAFPKENPRNDEERYGKIANPTVHIGLNELRKVVNGLIKRYGHPSEVIIEVARELKLSKKKKEQLQKEQAERQKLNEKHVKEACKVLGLNPDHIEHNKRRELSQKMQLWVELNSDITNRKCPYTGEQIAIHRLLTPEVEIEHILPYSRTLDDSMNNKTISLHRANRDKGNLTPHEAFAQHPDYNYEAILERANYMPKAKARRFSPDGYDYWLKNEKDFLARALNDTAYLSRIAGEYLTLICPKENVHVIPGRMTALLRGKFGFKKNRHDHRHHAQDASIIGISDRSLLQRLATASASAREKQLEKLIETIPLPWPCFQRQVERALKNVIVSHKPDHSFEGSMFKETAYGVNADGSVKQKKNSDDKKERTISYVIPISDAHQNDRHGVTETGDSRPYKAYAPDGNYCLEIIETESGIWQMETIPVFKAYQIARTFDSGKYDQTEVVKKIIQTKLSTIPGKLVMKLIPGDVICIDYKGVKNRLLYVVKMSVQGGATFTDINEANISARYDARRKARNKINKEGIPYEQLESQEQFAFNDEFLYSLIGVNDLKAGKARKVTISPIGDLNDFGFKGSRK

SEQ ID NO: 18341 - protein, 1020 aa, unidentified
  REGION 1..1020: note = Cas Enzyme sequence
MLPKMRYRLALDLGSTSIGWCVLRLDPQDSPIAIVKAGVRIFSDGRNPKDGASLAVTRREARQARRRRDRVLKRKQRMMDALIRLGFFPADENARRKMLDVDPYFLRKKGLKESLSAAEFARALFHLNQRRGFKSNRVTDGGDSESGVMNRAINDLRERLARESCETLGEWLANRHAKGESVRARLRGKKQSDKAYDFYADRSMVEQEFDALWRKQKEFDAKLYSDESYAELRDILRFQRPLKPVSPGRCTLLPEEERAPLALPMVQRFRIYQEVNNLRYQDQNFKEIGLTLEQRDKVVELLEKRKNATFQQIRRELRLPESAVFNLEDSVGKRSGLNGNMTSVILSGKQAFGPRWYSFDDQTQDRIVEELLYEQSQEKIIKWLGDIAGVDQSTAETISNIRLPQGYGNLSRKAIVRILPQLQKEVITYDLAVRNAELGSHSALSHTEKTGEIMDSLPYYGIPLRRHVAFEKDNPRNDEERFGKIANPTVHIGLNQLRKVVNAVIEKYGHPSEVVVEVARELKQGQKKNLEIQQDQKKRQDRNEKHIAEACSVLGISPEALSRSQRREISQKMQLWVELNPNNVAERQCPYTGEQIGIEKLLSSEVEIEHILPFSRTLDDSMNNKTVSLRRANREKGNMTPDEAFAHHSEYCYEDILKRASVMPRAKAQRFAPDAYQKWLRDNKDFLARALNDTAYFSRIAKEYLSLICPPNKVWAIPGSLTATLRGKFGLDGLLSGSEKKNRNDHRHHAIDAAVIGVTDRGLLQKFSNANASAKSMQLNRLVEEMPLPWPTYREHVQRAIDHVIVSFKPDHGYQRRMHEDSAWGLLGNGMVRRYKLSDDGIRVREIKNQKVIEINSTNNRERHGLDQDGNPKAYKGYVGGSNYCIEICKNESGKWEGEVVPTFNAYQLVRKLGEPQALKKLRDKRFSLSGKELVMRLQRDDMVKMKINDQNVLFRVVTIRWDGQVSFAPHSEANVDARNRDKNDSFKYISKMPGALRTVQARKVSVSEIGELRDSGFKD

SEQ ID NO: 18342 - protein, 1022 aa, unidentified
  REGION 1..1022: note = Cas Enzyme sequence
MPFRYRLALDLGPTSLGWAVFRINAENKPIALVLSGVRIFSDGRNPKDGTSLAVTRRLARAMRRRRDRLLKRKSKLIAALIKHGFFPADEKERKALEVLDPYRLRAEGLNRALAAHEFGRALFHLNQRRGFKSNRKTDKRETDSSVMKSTISSVRNALEEGGFCTVGEWLYQRSRQGQKVRARFNAQRITTDAGKTKIEKSYDLYVDRAMVEHEFDVLWARQAKLNPELFHEQAKAELRDILLFQRRLRPVDPGRCTFYTKEARAPLALPSVQRFRFYQELNNLRWLDDSLVERPLTLAQRDAMAAALEASVKKTFQQLRAIAGLGSGATFSIEDLKRQEFKGNTTSCILSKKQHFGSRWGRFDEALQDEIVMRLLMEENESALIAWLQEHTGVDEAQAEAIANVALPEGYGRLSLKAIRKILPALREDVRTYDKAVLAAGIDHHSHLGARATGEILPELPYYGKALERHVGFGTGNPEDPEERRFGRISNPTVHVGLNQVRVVVNELIRRYGHPAQVVVELARDLKQTWEQKRETEREQAANQQRNTLYRREIADVLGIGEEQVKRELIEKRILWEELSFDPVKRCCPYSGEQIGLKMLFSDEVEIEHILPFAKTLDDSLNNKTVALRRANRLKGNCTPWEAFGRQEVAGFKYDDILQRAQAMPQRKRYRFAQDSMEQWLKNDKSFLDRALNDTRYLSRLAKEYLEWICPQATWVVPGQLTSMLRRIYGLNNPDILGWQGQKNREDHRHHAIDACVIGVTDRWLLQIMSDTSARARDQLHGRLLKNMPMPWPTYRDHVKRAVSRIWVSHKPDHSYEKAMHNDTAYGLLPGGYVRVRKEVDGVRVRTTEKLAVIPISSARAGARHGFLPDGSPKPYKGYKGDSNYCIEIVRDEASGKWMGEVISTYQAYQVIREHGRVNGWNRLRHPGCGLSGRSLVMRLMINDIVRLENNGELKTWRVAKISGNGQIYFADVHEANVDARNRDKNDSFSYVSKMAGSLNKAKARRVTISPAGRLADPGYIP

SEQ ID NO: 18343 - protein, 1239 aa, unidentified
  REGION 1..1239: note = Cas Enzyme sequence
MAYRLGIDLGTSSIGAAAYRIDENRRPVELIFADSYIFGEPVNPKDYTTLNSKRRAARLIRRQIARKAARMRKLAYISDFIGVSKEILDKVPADDINRLRAIAIEQEISLPEFIAVLFHLVKNRGYFGDVFEDDGGKIKAKINETSNEIKQEGFKTLGQLLYYKKQQACGSGIHAEESWRKLNEGGTFITRRIIEEEFELIWKEQSKHHKDLSGNYVISGEFAKNMFPDYPGKTEITLKQAFHSALFYQRPIKWPLASVGDCPLVPGEKRAAISQPAYQQYRLVKQLVDLRVKNRMPAMELFASESENSQPQMQERGLTYGEIQTVLRYALENCEEYSKEGKITYSKIYELLNFKEGQKFTIDRPALKGKGGIKGEMTLCVFNNFGLSHDWHILSEKEQEIVLEFLNNITKYSDIHNSTDEYIQQQIEKLAKNVQNQMEIHRKNAFSFIKIIKEKGLFAKSEFKLEQGRAEYGITALDVLTYGMLEGKEEYDIIEENYPKQVIEAENLRSAEEIIDNESINDAVIKKALREFKREMDFIIRKMGEKPAEITIELSREIKNSLSKRKYLETENRNMEKERIEAATKLQEQGVIKTSSNIERYMLWEEQEHKCPYCGGSIKFKHAFSPSTEVDHIIPQAKGGPNVYSNKVLAHKECNLQKGNNAPYDALINGKKLKDDLDIYLEYLAKKKASKKRKKQTDEDDDIARHYHIGSVIDFIQRLWLLFNKEQKGYYNKAKHRYEPTLKGRRIREKIDNLLTKNEDIDSNFAARQNQETAWIGKIVMEWCQDICPRANIVASTGSLTAYMRSLTGFEKVLPLVRIAEGKNLYHDEKCSIAINPEKWQLLFNGWIINMEQGEPLEIYDKRFPELKDYEILKQEFEEWLKEKESLGTEEAYTAKDREKSFRDFCKDIAGVNAFYKRCDHRHHAIDAAIIGLCTRSLVQRANTHAAKYGTLKTIHNPNGTEIPCFMPLTEGREMALLQQFRKKLLHYMKNYAVWHKPNHFPSGEMLQQTAFGLSEQEDGKKVFLYRVDIAKFDKKTQEKTVAELENYVFGDEIKKTIISQFKDRIRQGLPVKEALCGKADNHEDGIYFNGNKVKKVKSYFHYGSIVSFNANADKEIISTDKSGKEHRKAYINGGYACAEFNKTTGKFKRLIPLWEYEKIKGEPVPADTERIFAGDILCRLSDKTFYVVYKFSARDGLSLRNITETVGNKKDGTDILTKHTSGFKLVPDRKTLAQLKKN

SEQ ID NO: 18344 - protein, 1391 aa, unidentified
  REGION 1..1391: note = Cas Enzyme sequence
MTKVNKDYIVGLDIGTDSCGWVATDKKNNILKLQGKTAIGSRLFEEGHSAADRRTFRGTRRRLNRRKWRLKFLEEIFDPYMTKVDPYFFARLRESGLSPKDSTKNTQAIIFPTPKDDSDFYYKYHTIYHLRQALMSEDKKFDLREIYLAIHHIVKYRGNFLQNTPVKSFDASKINVKKTIKALNQLYAGSSNENQIELNIENTSKIEDIIRSKTTFKMDKAKQISKLLAMSSENKDINKQNRNIAKQITNAILGYKTQFETILSKKIDKNDKATWEFKLSDADVDDKLAILLPDLNQSEQGIIDEIKQLFSAVTLSDIVDEGKTLSESMIRKYNDHKKDLKLLKDVVRSQKDKDKAKRLSLAYDLYVNNQHGKLLEAKKAFKVMDKDKFYKIVKNNVDDSESAKTILKEIELDSFMPKQRTNQNGVIPYQLHQIELDKIIKNQSKYYPFLAEKNPVIDHQKQAPYKLDELVRFRVPYYVGPMITATDQEKTSGKNFAWMIRKEQGQITPWNFEQKVDRMASANKFIKRMTTKDTYLLGEDVLPANSLLYQKFTVLNELNNIRINNHRISVDVKQDVYKNLFKKYKTISSNKLSNYLKNNYNLKFVKITGLSDKSNNSKFNSSLATYYQLKHLNILGDKIDDPNYQKDLEHIIEWSTVFEDKSIYAAKLKTIDWLNVEQIKALSNLRYQGWGRLSHKLLTGLHDKNGQNIMEKLWDSQKNFMQIVKEPDFKAAIEKENQSVVKATDTEDILADAYTSPANKKAIRQVIRVADDIVKAASGKAPSQFAIEFARESEKNPKLSQIRGSKLRKSYEKVFENSANKLVDVSLKEELDNSIKSRKLVRDKYFLYFMQGGRDAYTGERINIDEVDTKYQIDHILPQSFIKDDSFNNRVLTLAKINNEKSDRLPFNYSNRPADKGRLGMTMHQMWHEWLESGLISKYKYRNLILDPNQVSKYQKSGFINRQLVETSQIIKLVATILQAKYPDSEIIVVKAGYNHALRERLNLCKSREVNDYHHAIDAYLTTICGNFLYQVYPDLRPFFVYGQFKKFSSNPDLEKQALKKHKKFDFIWPLLKKKDASEEIHQFKMGPVVFHKHEDIFNKLRRAYTFKYMLVSREVTTRDQEMFKMTLYPRADHDIKKSRKLIPKSKNMPTNIYGGYTSNSDAYMALVKIKKERSFIYKIIGVPMRALSKLKLAKKQGKYDQVLKDVLTPIIMLDKNGKTKRGIEEFRILKGKIPYRQIVLDDEKKFMLGSSTYVYNAKQLTLSNETMRIVTNNFTTKDDRSNLLNQAYDEILEKVDKYLPLYDINSFRNKLHKGKDKFSKLNIKEKEATLVEILNGLHDNSVMGKLKNIGFSTAFGQMQIPSGITLSPNAKLIYQSPTGLFEKRVKISEL

SEQ ID NO: 18345 - protein, 976 aa, unidentified
  REGION 1..976: note = Cas Enzyme sequence
VTKVKGDYMVGLDIGTNSCGWVATDMKNNILRLHGKTAIGSHLFEEGQPAADRRGFRTTRRRLNRRKWRLNLLQEIFDPYMTKVDPYFFARLRESGLSPLDKNKRFSSIIFPTAEEDQQFHQQYPTIYHLRNALMIEDRQFDLRLVYLAIHHIVKYRGNFLQATSVKDFEPSKIDVQAFLQKLNNAFADMGEDEAIQFAEQNADQIEQILRADDIFKKDKQSKISKLLVKFPADGQLSKSDQKELEKKYKAAANAVSTAIFGYKTKIEDIFNLEIPKEDKKDWEFKFTDTDADDKLAALSEKLTEKQQTVIAIVEELFGAITLSEIVDEGMTLSQSMINNYDQHRQDLHLLKTVISNQRGTDNAKKLQAAYDLYVNNRHASLLKAKKLLKSNGVLSIDDFNKIVTANLDDSESALKIKNEIDLGIFMPKQRTNQNGVIPFQLHQRELDQIIAKQGKYYPFLQESNPVSEHLNQAPYKLDELVRFRVPYYVGPMIAPKQSNDQQTQANQNFAWMVRRKDGQITPWNFDEQVDRMESANRFIKRMTTKDTYLLGEDVLPKHSLLYQKFEVLNELNNIRINGSRISFSDKQDVYKKLFKDDKSASVSVKHLTDYLKIEKHLPFVEIKGLANEAKFNSSLATYHELRKMGVFDLELDDPKYRTDFENIIEWATIFEDRSIYQQKLQTVSWLKPEQIKALTRLNHYQGWGRLSKKLLLDIHDSNGQNIMEQLWDSQKNFMQIVKEPDFVAQINAHNQQTAQEHGMEAILADAYTSPANKKAIRQVMKVVNDITRAASGKAPRQIAIEFARDAEKKPRLSTQRGRKLQQIYSKLSDEFVSEAMKQNLDQATDSRQLAHDKYFLYFMQLGRDAYSGKPINFDEIETKYQIDHILPQAFIKDDSLDNRVLVASELNNAKSDQVPVQLYAHKKVPGSNLTVRGLWDKWLDLKLISNRKHNNLLTDPTKINKYQKSGFIQRQLVEN

SEQ ID NO: 18346 - protein, 1030 aa, unidentified
  REGION 1..1030: note = Cas Enzyme sequence
LKQRKSQPYRLGLDLGSSSIGWCIYDLDVNKHQPAPSHIRCLGVRIFNNSRDPVKKQSLAVSRRLARQRRRRRDRFIRRKALLFKRLVRFGLYPSSPAEQLTLANLDPYICRARAVEGPVSSYELGRALYHLSQRRGFKSSRKRQDDADGRSLSAELDALELALKESGAKSLGQFFARRREQGLSTRARPDVGLYPRRKLYKAEFDLIRETQAKFHPTLNEENWDLLEHTIFFQRPLEAQKPGKCLLIENESRAARALPSFQRLRLLQQISDMKFQGEDYRYRNFDTAQKVKLAAYLEVHKELKFTAIHKLLGLPADTHFNLSSERRTKLNGNSTACFLRKKSTLGKTYDTLTLSEQDKLVEILSSEDDTEQLQKLLSENYSFSAEEVTRLIGNEVSIDDFESGYCSFSIKALNMILPHIGEPLFLGYSEAVKSAGFHHSNFRPDNLKDRLPYYGEVLRQSTIPVKSLTANKEEKRFGRIPNPTVHVGLNQVRKVVNTIIELHGLPKQIVVEIARDIPLGAEGITKLERQQVANQKDNQRIIAEIKTLIPGIVKVSSDDIQKYKLWEELGGTNLHRCLYSGRLISAAQLFNGDVEVEHILPFAETHDDSIGNKTIAFKQDNNKKGERSPYQAFRDEKGDYAYEKIFARVEQADKLPANKRWRFMADAMDRYLETEDFAARELNDTRYIARAAARYLQEVCSDVWTVKGWTTALLRRTWGLKKLKKRNDHRHHALDAAILGLVERSLIQKISKVFKDGSYSLKTPLPWPSFVEELKGRLNTLTVSIKPNHEKNRLIFKDYAYGTINQENGDSRESAHNLVARKSLLALSPKEAKEQIRSAALSSLVSNKLGQDEAKDISEILAEVSELTGAKRARILKKNQYAVQITHPSNSPRHKKALIPDENVWLDVWKLPSGDLQVIPIDTFRAAQYNANNYRPHPAAKRVWKIFKGDPVRFIDNGIEKIGRVETLAPSEGNEKIVVVDNYTATSSATASESKIMKKYFIKFSQFKKKQFRKLRVDVLGRVADPGPLP

SEQ ID NO: 18347 - protein, 1372 aa, unidentified
  REGION 1..1372: note = Cas Enzyme sequence
MYKGDYSIGLDIGATSVGFSAIDEKYRPIRLKGKTVIGARLFKEGTTAAERRGFRTTRRRLKRRKWRLSLLEEIFDPYMAKVDPTFFARLKESNLSPQDSKKRFSSSLLFPDETDSAFYDKYPTIYHLRYHLMNDDRQFDLREIFLAIHHIVKYRGNFLNNLPVSNFSTDKINFEEDFKAINDSFDEIDPETRFQINIEKTDVIAQKLLDNSVATLDKQKEVAKILYIVSGDKALDKLNSSIAKQISKAILGYKFDLAEVLKITTEDKNKWKIQLSDENIDDTLAELTGELNEPQLTILKILSKLYSQITLNDIVPSGQILSESMIKKYDAHKKHLEMLKKYAKSLDRKTYSEVMEAYAEYIGNSTKKSGTASQEDFYKVVKRSLNNTQLAEEIKILIDQNQFMPKQRTNQNGVIPYQLHLKELERIIENQSKYYPWLTEPNPNEKRRTRAKYKLSELVAFRIPYYVGPLITKEDQEKSSGKSFAWMIRKAPGKITPWNFDEKVDRTESANQFIKRMTTKDTYLTGEDVLPDHSLLYERFKVLNELNMVRVNGSKLEVGEKQETFEKLFKAKKTVKASQLANLLSKGMANRPIITGLSDPVKFNNSFGTYIDFKKIFGAKIDDPNLQNDFEQIIEWITVFEDRNILKTKLQGINWLTKEQITDLIAKRYQGWGRLSEKLLCGLKNEKGESILDLMWNTQRTFMEIVNEPVFAEQIKNANQDQINDEDYESILADAYTSPQNKKAIRQVVKVVDDIVRAAGKAPKFISLEFAREDQRSHRTQSRLAKLKDIYETTAKELVANEKVRQELGDVKDLNDRLFLYFTQLGRDMYTGEPINIDEISTKYDMDHILPQAFLKDDSLDNKVLVSRAVNNGKSNNVPLRMFGSKMKPLWKKLADHRLISKKKYNNLMTDPDSIDKYKANGFINRQLVETRQVIKLAANILASRYEQDDTQIIEVKAELNHQLREALKLYKNRDVNDYHHAVDGYLSAFVGQYLYHRYSGLQSYFIYGKYQRFFKKDTKQRFKFNRFNFLYDLTSNDEERIVDKSSGEIVGKKSDLIRQIKRVYGFKYMLISQETYTNSGAMFNQTIYPAKSDKKLIQTKQGRPTNIYGGYSGNKDAYMAIIRIPSRKEDKLRVVGIPVRSLSKLERLKKTDNAAYLSELHRVIAERTAREKTNRKTGEKTKVYIDFDIVVPKVMYRQLIIDGDLKYTLGSSTYQYNARQLVLSEKSMKILSTDFSKDSSSVDVQNEQLMFVYDDILDKVNRYLPLYDKNKFRKGLNEGRDKFKELPILPIYNGSSKKPDGKVDIINNMLLGLHCDPSMGDLKSIGIKTRFGMMQTKSGGLGVLIGKTADIIYQSPTGLFERRIRLSKLMK

SEQ ID NO: 18348 - protein, 1046 aa, unidentified
  REGION 1..1046: note = Cas Enzyme sequence
MASELVFGFDIGTTSIGSAVVRMDSNAETGSILHLGVRIFPEARDPEGIPLNQERRKRRMMRRQLRRRRVRRRDLNSLLTDSGLLPPFTKEMGSPWSIAMAQDPWVLRAQALDRALSPTELGRVLYHLAQRRHFRGRDLEGPAADLADSKEAPTADEQKAASQREKDRSTLKASGLTLGAFMAGIPDLTGRRRGHHFAREDVNAEFRAIISAQSPHHSKLRDQDLGTALEQTIFDQKPVFWRKATLGACRFMPDAELAASASWVAQEKRMLEKLNNLRIEEGNGRPLDDQERAAILNLLRKQDSVSWAGIHRHLKLYWRKHDLSEKPTFNLQRGGEKGLVGNRLENRLATIMGTRWETDPALQERMRREIHARLYAADYGQIGGRIVIRREAESLQERNRERERLKADFALSEQQADEIAKLSFAPGWEPFSEAALWLFLPRLQQGAVFGSLLASPEEEAWRAITFPQRAQPTGAWVDRLPTPGNSLEEVGRQKSVRNPTVLRVQNELRKVVNNLIAVYGRPDRIRVEVAREVGKSARERAEDLARNRDREKERKKAAEELQKCNITEPSREDIEKWLLWQECKHQCPYTGQMIDFAALFHRGEFQVEHIWPRWRSLDDSFANKTLCQRDFNLRKSNRTPFEVFENDQKSWEEALKRVQAFLGPPGRVAIKARRFAASAIPEDFAARQLTDTGYAARQAVGFLKMLFPDLGQTGEVRVATLSGRVTSRLRHNWGLNNILSDSGGKSRADHRHHAIDALVAALAHPGYTERLSRWFQARDSATPQPEPELRPPLPDVRHQAEKKVAETIVSHRVRRKVSGPLHKDTTYGDTGPAGGTGGIAYRWFVTRKSVGALSKSLLAEDEAWPDPHVRDRVRAWVAANGGDPKKAFANGYPTVSEGGASIRKVRIKFKQQQKLMAKLKNGYADLGNNHHMAVFRRADGRVENEIVSLFEAADRLRRKQPVISKPETGLSFVMSLAQGDTLLFPDGDVKGLWIVQSVWSSGQIVLCRAEDAAGTTVFRPTVASALKSGGRKVAVDPIGRIRTARD

SEQ ID NO: 18349 - protein, 911 aa, unidentified
  REGION 1..911: note = Cas Enzyme sequence
GRDLEGPEVALADSKEAPTADEQKAASQRERDRNTLKASGLTLGAFMAGIPDLTERRRGHHFAREDVSAEFRAIISAQSPHHSQLRDQDFGAALEQTIFDQKPVFWRKATLGACRFMPDAELAASASWVAQEKRMLEKLNNLRIEEGNGRPLDDQERAAILNLLRKQETVSWAGIHRHLKLYWRKHDLSEKPTFNLQRGGEKGLVGNRLENRLATIMGTRWETDPVLQGRMRREIHARLYAADYGQIGGRIVIRREAESLQERTRERERLKADFALSEQQADEIAKLSFAPGWEPFSEAALWQFLPRLQQGAVFGSLLASPEEEVWRAITFPQRAQPTGAWVDRLPTPGNSLEEVERQKSVRNPTVLRVQNELRKVVNNLIAVYGRPDRIRVEVAREVGKSARERTEDLARNRDREKERKKAAEELQKCNITEPSREDIEKWLLWQECKHQCPYTGQMIDFAALFHRGEFQVEHIWPRWRSLDDSFANKTLCHRDFNLRKSNRTPFEVFEHDQKSWEEALRRVQAFLGPPGRVAIKARRFAASAIPEDFAARQLTDTGYAARQAVGFLKMLFPDLGQAGEVRVATLSGRVTSRLRHNWGLNNILSDSGGKSRADHRHHAIDALVVALAHPGYTQRLSRWFQARDSATPQPEPELRPPLPDVRHQAEKKVAETIVSHRVRRKVSGPLHKDTTYGDTGPAGGTGGIAYRWFVTRKSVGDLSKSLLAEDEAWSDPHVRDRVRAWVAANGGDPKKAFANGYPTVSEGGAPIRKVRIKFKQQQKLMAKLKNGYADLGNNHHMAVFRRADGRVENEVVSLFEAANRLRRKQPVISRPETGLSFVMSLAQGDTLMFPGGELKGLWIVQSVWSSGQIVLCRAEDAAGTTVFRPTVASALKSGGRKVAVDPIGRIRTARD

SEQ ID NO: 18350 - protein, 1046 aa, unidentified
  REGION 1..1046: note = Cas Enzyme sequence
MASELVFGFDIGTTSIGSAVVRMDSNAETGSILHLGVRIFPEARDPEGIPLNQERRKRRMMRRQLRRRRVRRRDLNSLLTDSGLMPPFTKEMGSPWSTAMAQDPWVLRAQALDRALSPTELGRVLYHLAQRRHFRGRDLEGPEVALADSKEAPTADEQKAASQRERDRNTLKASGLTLGAFMAGIPDLTERRRGHHFAREDVSAEFRAIISAQSPHHSQLRDQDFGAALEQTIFDQKPVFWRKATLGACRFMPDAELAASASWVAQEKRMLEKLNNLRIEEGNGRPLDDQERAAILNLLRKQETVSWAGIHRHLKLYWRKHDLSEKPTFNLQRGGEKGLVGNRLENRLATIMGTRWETDPVLQGRMRREIHARLYAADYGQIGGRIVIRREAESLQERTRERERLKADFALSEQQADEIAKLSFAPGWEPFSEAALWQFLPRLQQGAVFGSLLASPEEEVWRAITFPQRAQPTGAWVDRLPTPGNSLEEVERQKSVRNPTVLRVQNELRKVVNNLIAVYGRPDRIRVEVAREVGKSARERTEDLARNRDREKERKKAAEELQKCNITEPSREDIEKWLLWQECKHQCPYTGQMIDFAALFHRGEFQVEHIWPRWRSLDDSFANKTLCHRDFNLRKSNRTPFEVFEHDQKSWEEALRRVQAFLGPPGRVAIKARRFAASAIPEDFAARQLTDTGYAARQAVGFLKMLFPDLGQAGEVRVATLSGRVTSRLRHNWGLNNILSDSGGKSRADHRHHAIDALVAALAHPGYTQRLSRWFQARDSATPQPEPELRPPLPDVRHQAEKKVAETIVSHRVRRKVSGPLHKDTTYGDTGPAGGTGGIAYRWFVTRKSVGDLSKSLLAEDEAWSDPHVRDRVRAWVAANGGDPKKAFANGYPTVSEGGAPIRKVRIKFKQQQKLMAKLKNGYADLGNNHHMAVFRRADGRVENEVVSLFEAADRLRRKQPVISRPETGLSFVMSLAQGDTLMFPGGELKGLWIVQSVWSSGVIVLCRAEDAAGTTVFRPTVASALKSGGRKVAVDPIGRIRTARD

SEQ ID NO: 18351 - protein, 1098 aa, unidentified; identical to SEQ ID NO: 17982
  REGION 1..1098: note = Cas Enzyme sequence

SEQ ID NO: 18352 - protein, 965 aa, unidentified
  REGION 1..965: note = Cas Enzyme sequence
LRAEALERALTPHELGRALFHLNQRRGFKSNRKADRKNKEDGKIAEGAKRLRERLASENARTLGEFLWRRQNKTNVAQRLPARIRLQGLGAKALYEFYPTREMIEDEFGQIWRAQAQFAPDVVTAEKGEAIHRVLFRQRPLKPPKVGFCTLVEGEQRLPKALPSVEARVIYETLNHIEIGAKARKLDLGERNALATVLLSGKNMTMGQIRKALKLPADQKINFEEGGRDKLEGAKSAWALGEKGPIGKAWAAWPLDRKDEFVWTLLTEADEFALVEILKRDFTLTEDQAARAAAIVPEEGYARLGPTANAAILAELIADVIPYSEAVVRAGKRRGENWHHSDERDGEILKPLPYYPEVLGRHIIPGDGVSEDTFQRLGRIANPTVHICLNQLRRIVNDLVATHGQPDEIVLELARDLKNSLERRKEIEADNRRNREAAEKRTQKLIELGQPDTGENRARLRMFEEQERAGAGVARCPYTLRAIGLTDLFSSEVDIDHVLPMSRTLDDGRANRLLCFREANRVKRNQTPWEAFGNGWTTAKGERVEWSAITANADTLPKGARWRFLPDAMERFNADGRDFLARQLNETRYLSRLAKAYLSKSCNPDNVWVVTGLMIGLLRGKWGMNDLFADHNHADLSPEAEEKARKDRNDHRHHAIDAIVIGAMTRGLVNEIARRAGQATDRDERLFAGLEPPFPEFRQAARAALDKMTVSHKPEHRTTAALHEDTAYGFIRGEKEAREIGNLVRRKPIDSLTGPEVDAVRDPVLRRELGAIRAPFADGKGKVKDAKAFQQALKAFGEERQIRRIRVGKADQSIVAIGDRHTGETYKALVPGENHHMDIVQMRDGSWKGFAATYFEINRKDWRPRWEAERTGGKLVMRVHKGDTIELVDTDGVRRIKTIVRLSPSNNILYLVRHTDAGDFQKRHDDPDDAFRWDFANVGKLRERGAVAVRVDEIGRVRRRKSNIS

SEQ ID NO: 18353 - protein, 1149 aa, unidentified
  REGION 1..1149: note = Cas Enzyme sequence
MTDFHKYLRFAFDLGTNSIGWAVYALDRAPTPDAPATVTTLLGCGVRLFDDGRNPKDGNSLAEMRRVPRSARRRRDRFIERRANLLSLLVTLGLMPADADARHKLASLDPYALRARGLEAELPPHELGRALFHLNQRRGFKSNRRADRRLDGKEKGKIAEASKRLKEQLAAENVRTFGALLWHRHGGADGNATPRVGRRAVRIRLEGEGAKALYDIYPTRDMLEHEFDLLIARQRKDMPHILTDAAIAELKRVMFFQRPLKPVERGRCTLVSSEPRLLKALPSVEERVIYETLNHLRYGAGVTRDKALTITERDLIAQPLLQGKSKRHVTFDTIRAALKLGSTIRFNREDDGKSDLHDVRSQSAEKLASKDRFGPRWHSLPLEERDRIVSRLIGSEEAAQIQEWLMRELELSSEVAAAIAEWRPSEREQALARPDRFGDSWKTYKTERRASIIRRLTGNEEDSDLAAWLKCDYGLDDEAALATADWAPREGVARLGKTANDAVLDELKNDVITYNEAVARAGWDHSPRGTGVIELPLPYYGQIIERHVAFGSGKPEDPAEKRYGRVTNPTVHIGLGQLRRLVNALVPTYGEPSQIVVELARDLKMTHKQKEREQRENAANKKLNDERRLRLQELGQDDTGENRLRLRLYEEQERAGGGVALCPYSLKPIGIEKLYSAEVEIDHILPYSRTLDDTRANRILCYRWTNRQKRRDTPHEAFANPTKALPGVPSFDAIVAAAAGLPANKRWRFAADAMERFEKRERDFLARQINETRHLSRLARLYLAAATGTTDQVYVTTGQLTAMLRARWGLNSLLGDDNRKVRTDHRHHAIDAITIGAIDRSLLQEMARRAGAAEEEGRDGITRDVPDPFPGFREAARAAIGNVVVSVKPEHGTGGALHEDTAYGLVKNPAEAAEIGNLVFRKPLADLNVNEIDRVRDPHLRKLLRELAAPFRNQKGKLEDEKGLKQALSAFRIREQHGDTIIERLVRRVRIGKAKTGEVHIKDRRTGSVYKALLPGENHHIDIVLMRDGAWRGFPATVFEVNQPGWRPDWERERLGGKLVMRVLKGDMVEVDCDDGQRRIMTVHRLSPSNNILYLAPHTEGGALQKRHDDKDDPFRWDFANIGGLKKRNARKVKVDEIGRTRSCPTNVG

SEQ ID NO: 18354 - protein, 1151 aa, unidentified
  REGION 1..1151: note = Cas Enzyme sequence
  SITE 19: note = misc_feature - Xaa can be any naturally occurring amino acid
  SITE 231: note = misc_feature - Xaa can be any naturally occurring amino acid
  SITE 247: note = misc_feature - Xaa can be any naturally occurring amino acid
  SITE 379: note = misc_feature - Xaa can be any naturally occurring amino acid
  SITE 570: note = misc_feature - Xaa can be any naturally occurring amino acid
MSKKKINIGLDLGIGSVGXAVVNAEEFEIIDAGVRLFPEAGKESENSAASRREKRSSRRMHRRSRLRLDTLLKYFVKYGFLNEVNDFYKIKQHRFASIAELKQYALTNPISLNEMMILLYHSVKKRGVFNFKQDVLENKMKDKKTGEIELSSDDLEKELEEKSKKLPSELQIKNFEESGKITGSDNRFPHEMFKKELEQIINFQKENGGVKLPEEFVNDFFVLFSRKREYXQGPSRGNSQSKSLFSXQTGKGDQKDQDEFYDRLIGKDSYDRTQLRAPKKGMYAAIFNLLNDLNNLTLYGINRKSEKITKEEKIKIIKSLFPKTKVENLTLKKLIKILDCEEINGYRVEGTKKTPIFTKFEGLNDIFNIFKKVGLDTTXLTYENCYLIDDIILILTKSQDTDIAEEKLNIFFKENNFDFSNKMAKELSILSSKYTGSHSLSNKTILSVYDIMVDEPLNSQLVFKKNNIKKQYKFPFLENAKYIPVLEDDINDLFISPVVKRTLIQALKVLRAIQIEFKEYEIDSINIELAREKNSEDERKYITLIQELNKNINDKIGKLLGIDNAVDIPXKLRTKIALFLEQDSKCVYCGKPIDLEELKMNSEKYEIDHIIPQSISFSTRHDNLVLVHSSENNAKGNLTAYQYINSDKSKLSFNDFELLIKRIYNQQIQIDKTRARQFYKKMNNLTNSTDFENDEDSRLKFIERNLVDTRYVTREVYMYLNELRKELKDNPLNSVKLNTSNGSHTDFIKRNIFHLPPKNRNDFRHHGIDAITIAYSEIITNDIRKISKENKNDNAIKLVSEKYLEARTKILDHNYHFSRKTNTNFNRQLSNDTLYSFKKYKGKKYKDENEFRQIMKVKLTDFDSGTMNVLKNIFSNDISEKDRIESLLELYDIKTFNYLKKIYNAYPIGYTYMNSESGKNDSIKNPFLYFKEKERKKICLQKNIKNPEKNPEIKTIRYYGNKMKKLLDISDKYDVDINKTKIGFTSLKPIRLDIYQSKLTNKYKIFPVNARVIKNLNEKEIIIDNIEYNKIISSKDEGFNINLNEFEKVLELFPRGTTIRITSQDSKYDSEFFEVVGSPKNGTIEVDFINKRKEKNESRIIFSLGTLLKIEKVNVNILGTKRKYITKENFSNKKNKKNIEVINEKEYNLIV

SEQ ID NO: 18355 - protein, 1157 aa, unidentified
  REGION 1..1157: note = Cas Enzyme sequence
  SITE 19: note = misc_feature - Xaa can be any naturally occurring amino acid
  SITE 231: note = misc_feature - Xaa can be any naturally occurring amino acid
  SITE 381: note = misc_feature - Xaa can be any naturally occurring amino acid
MNKKKVNIGLDLGIGSVGXAVVNAEEFEIIDAGVRLFPEAGKESENSAQSRREKRSSRRMHRRSRLRLDTLLKYFVKYGFLNETGDFYKLKLEKFGSIAELKMFSLSNPINLDEMMLILYNSIKKRGVFNFKQAAIDDKMKDTKNSDVELSREEIEKELKEKSKELPSELQLKNFDVNGKINGSDNRFPHEMFEKELKQILSFQKENNGINLPEEFVNDFFDLFNRKREYXQGPSKGNSQSRSLFSWQTGKGAQKDQEEFYDRLIGKDSYDRSQPRAPKKGMYASLFNLLNDLNNLTLSGVNRESSKITREEKLKVIESLFPKNKVENLTLKKLAKLLECDEKEIEGYRIKGSKKEPNFTNFDALNDIFKTLKKVGLDTNXLSYENRNLIDGVIVILTKSQDLDAAEERLNDFFKENNFEFASKLAKELAVLSSKNNGSHALSNKTILKVYDIMLDEPLNSQLVFKENSITKDYKFNFSNEVKYIPVLEDEINNLFISPVVKRTLIQALKVLRAIQIEFRDYEIDSISIELARERNSDDERKYITFVQELNKKANDKIAELLGVENVDEIPGKLLAKFSLYIEQDFKCVYCGRRIDEEELKRSPEKYEIDHIIPESISFNTKRDNLVLVHSTENNEKGNLTAYQYINSDKSSKTKLNYSDFLTLITIIYNQQIQRDKTKAKQLRQKIANLTNSTDFENDENSRLAFANRNLVDTRYVTSEVYAYLNELRNNLKDNPMNKVKLKVLNGSHTDFIKKSIFHLPVKNRNDFRHHAIDAITIAYSDIITQDILKTGRKNKEENAVELVSEKYVEARTQILEHNYHFSKKINKNFNRQLSNDTLYSFKKYDGEFRQMLKVNLTDVDPSTLNILKKMFSNDVDSKDHIVSLIELHDLETFKYLKKIYNAYPIGYSYKVQYTNKKNEVLEKEEKIRNPFLYFKIHENKKIYLQKNTKNPEKNPEIKTIRYYGNKMGKLLDVSDKYNVDTTKTKIGFTSLKPIRLDLYQSKITNKYKIFPVNARVVKAVKEKEIVIDDFKYYEMITSKQEGFNIDLNEFEKVLELFPRGTTVRITSQDQKYDNEIFEVVGSGHIGKIEVDFINRRKDETDKKQIEISVGTLAKIEKVNVNILGTKRNYIAKENFSNKKIEKVIAVVDEKDYNNFV

SEQ ID NO: 18356 - protein, 1147 aa, unidentified
  REGION 1..1147: note = Cas Enzyme sequence
  SITE 32: note = misc_feature - Xaa can be any naturally occurring amino acid
  SITE 259: note = misc_feature - Xaa can be any naturally occurring amino acid
  SITE 393: note = misc_feature - Xaa can be any naturally occurring amino acid
  SITE 516: note = misc_feature - Xaa can be any naturally occurring amino acid
  SITE 916: note = misc_feature - Xaa can be any naturally occurring amino acid
  SITE 944: note = misc_feature - Xaa can be any naturally occurring amino acid
  SITE 1041: note = misc_feature - Xaa can be any naturally occurring amino acid
MYGKERDNMEQNKSEKIKVNIGLDMGVGSVGXAVVRTDEYKVIAAGSRLFSQANTAEERRMSRGARRGYRRRDSRLNSLLNLFVEFGYLDNKDEFYELSIDKKFSNLAELKFEALNKEISSKQMLLILFNYVKKRGSFNLKDETVKNKTSKKENDYSKTELDNLTSNLKEAEKTRPVDKQLDNYKNGHKIRIAKSKDNIDEMDNQFSHEAYRLEIIELFKKQNENNKIYSDDFIKKYFNIFDKKLEYYLGPGEGSKYGXDQDETKFRERLLGTDSYDRSQLRAPRFGITAIKFDLLNDLNRLTIKSPNISNEKLTSEQKRLILSKMFPVGSGDNRVIENVTVDRIKKWLNLSKKETFIFNYRSDKAGKPIFTEFKSLMAIFNALKKSKLNDSXFNENNEELIDKIIDILVVSQSSEMAEKEIIKELNESLDLPEIELQNIARVLSILAVSTASAFSGTHELSEKSLKKLIPLLEEENIPFEEALKKAGMEKKYRFDTDKERYKYIPILKKEINDLXISPAVKRSFIQTLKVIKEIQKEFSDYEINAIVLELASDDNDKKRKESINRFQKMREDDKKQIQKELIKYNKLPEEITDTMIDKFFLYKEQDGHCVYCTTDLDLSIVLSNPHAYQIDHIIPESISHDTRKQNLVLVHQSCNHDKSNMTAYAYIVKNANSTKPNRITSYGAYEARLKDVVYKFDNVESRYFAEKISRLTDNTDFTKFSERQKFINRNLNDTRHAVKEVKSYLESVKNASYNIETTIGRETSYIRKNLLELEKNRDDYRHHAMDAIIIAYANELSNKFNQSYHFCNLEESENKKIIGPIKEELKLLKHEMENLSYNFSHLNEQKFNKKLFDDTLYSYKKNNGEFKEIVKVNLFETSPTTLSKIFNPAEDKEPEYIPLMKDNDPETFRYLCDIXNKYHDYHYLNEEGNEKIVKNPFVYYRDXADDEPNEQKFLLKKKNSNPNSYIPKVESIRCFSRANPNVFFDLTHKFKDANPDKVRIGHKSLKPFMIDIYQNKFNPAILKSVSLNVRVLKGNFDGEXSIDKDKYQKEIQNETYKINPENYKLLLRAYPNGTFVRITTNNNNFNNDIVSIIGIGAPGRNTIEVAPIDRKISDRKITRFSLSQIVEMDLVEMNILGTKKYYKKII

SEQ ID NO: 18357 - protein, 1012 aa, unidentified
  REGION 1..1012: note = Cas Enzyme sequence
MMSSKAIDSLEQLDLFKPQEYTLGLDLGIKSIGWAILSGDRIANAGVYLFETAEELNSTGNKLISKAAERGRKRRIRRMLDRKARRGRHIRYLLEREGLPTEELEEVVVHQSNRTLWDVRAEAVERKLTKQELAAVLFHLVRHRGYFPNTKKLLPDDGTDSADEEQGKINRATSRLREELKASDCKTIGQFLAQNRDRQRNREGDYSNLMARKLVFEETLQILAFQRKQGHELSKDFEKTYLDVLMGQRSGRSPKLGNCSLIPSELRAPSSAPSTEWFKFLQNLGNLQISNAYREEWSIDAPRRAQIIDACSQRSTSSYWQIRRDFQIPDEYRFNLVNYERRDPDVDLQEYLQQQERKTLANFRNWKQLEKIIGTGHPIQTLDEAARLITLIKDDEKLSDQLADLLPKASDKAITQLCELDFTTAAKISLEAMYRILPHMNQGMGFFDACQQESLPEIGVPPAGDRVPPFDEMYNPVVNRALSQSRKLINAVIDEYGMPAKIRVELARDLGKGRELRERIKLDQLDKSKQNDQRAEDFRAEFQQAPRGDQSLRYRLWKEQNCTCPYSGRMIPVNSVLSEDTQIDHILPISQSFDNSLSNKVLCFTEENAQKSNRTPFEYLDAADFQRLEAISGNWPEAKRNKLLHKSFGKVAEEWKSRALNDTRYLTSALADHLRHHLPDSKIQTVNGRITGYLRKQWGLEKDRDKHTHHAVDAIVVACTTPAIVQQVTLYHQDIRRYKKLGEKRPTPWPETFRQDVLDVEDEIFITRQPKKVSGGIQTKDTLRKHHSKPDRQRVVLTKVKLADLERLVEKDASNRNLYEHLKQCLEESGDQPTKAFKAPFYMPSGPEAKQRPILSKVTLLREKPEPPKQLTELSGGRRYDSMAQGRLDIYRYKPGGKRKDEYRVVLQRMIDLMRGEENVHVFQKGVPYDQGPEIEQNYTFLFSLYFDDLVEFQRSADSEVIRGYYRTFNIANGQLKISTYLEGRQDFDFFGANRLAHFTKVQVNLLGKVIK

SEQ ID NO: 18358 - protein, 1224 aa, unidentified
  REGION 1..1224: note = Cas Enzyme sequence
MTKVLGLDLGTNSLGWALVDESENGYALLDKGVAIFQEGVARDKNNEKPAVQDRTDARALRRHYFRRRLRKIDLLRVLVRYDLCPPLTDEQLSTWRQKKQYPLDEEFLRWQRTDDNEDRNPYHDRYVALTERLDLENRAQRWLLGRAFYHLAQRRGFLSNRKEAGNEKEDGTVKESIKNLSAEMEAAGCRYLGEYFYGLYQHKERIRGKYTSRNEHYLTEFNAICDRQQLPDKWRQALHRAIFFQRDLKSQKGSVGRCTFEPTKSRCPVSHPRFEEFRMWSFINNIRVTGPDDGTPRPLTPKEIETIRPLFFRKSKSYFDFEEIARRIAGKGKYACREERIEAPYRFNFARTATVSGCPVTASLMDIFGEEWLREIRGLYLLGDGKTEEQVLNDIWHALFSFKDEERLQEWAGKNMQLDEQQAQAFAAIRLPQDYAAMSLNAINKILPYLRCGYRYDEAVFLANLRAALPKEVYADEDRRHNIEQEIASLLLDYKRNPYDKFDSKERRIADYFSDHGLDMSRLDRLYHPSKIETYPDAKPNAEEIMQLGSPRTSAIRNPMAMRALFRLRDLINTLLREGRIDRDTKIRIEFARGLNDANRRKAIEQYQREREAENRKFAEEIRRQYTAETGREIEPSDDEVLKYRLWEEQQHICPYTGRQIRISDFIGANPGFDIEHTLPRALGGDDSQMNKTLCENRFNRETKRAKLPAELSNHAEIMERIESFGWREKVESLQKQIEAQVRRSKGAATKPEKDSAIQRRHYLQMQLDYWRGKCERFTMTEIPEGFSNRQGVDIGIIGKYARLYLKTVFDRIYTVKGSTTAAFRKMWGLQEEYVRKERVNHIHHCIDAITIACIGRREYDRWAQYAADEDRFNYGETGKPRFEKPWPTFTEDVKAVADELLVAHHTPDNTAKQTRKKLRVRGRVKLNADGEPIYQQGDTARCRLHQETFYGAIKREDEIRYVVRKSIKLLQPSDIDKIVDDAVRDRVRMAIDEVGFKTAINPDEYTIWMNREKGIPIRKVRIFTPGVTQPIALKKQRDLSDKEYKQDYHVANDGNYCMAVYEGKDKKGKLKRSFELVSNLEAAQYFKASADRETCPDLVPLADANGFPLKCILKAGTLVLFYENSPAELCDCTPKELTKRLYKVTGFSTLTVSNNSYGRLALKHHQEARPAGELKAKSGVWKTNEEYRPVISILHTQLNAYVEGYDFELTVTGEIKFKHGRPC

SEQ ID NO: 18359 - protein, 1331 aa, unidentified
  REGION 1..1331: note = Cas Enzyme sequence
MGGKRMKKDYTIGLDIGTNSVGYSVITDDYKLIAKKMKVFGNTDKKTIKKNFWGVRLFDSGETAQETRMKRTSRRRTSRRKNRLCYIQELFKPEIDKFDSNFFYRLNESFLTEEDAKFDKHPIFGTIEEEVSFHQNFPTIYHLRKYLADTDEQADLRFVYLAIAHIVKYRGNFLIEGELNTENHSVKELSKNFIQIYNQALNNLENFQEVDKSVDFSNELVAQLSKTERMENVIKLFPNEKGTGTLAQFIRLIVGNQANFKKVFQLEEDHKIQFSEDDYEENLEGLLAIIGDEYSDVFVIAQKLYQAVLLAGILTVGEEKTKARLSTAMIKRYEDHAEDLKTLKLFVREKMPDRYKEVFNDVDTNGYAGYIDGKTKEEQFYKYLKNLLSNVDGSEYFLQKIDQENFLRKQRTYDNGVIPHQIHAEELNAIIRRQEKYYPFLKENHKKIEQIFKVRIPYYVGPLAKNKEQSRFSWNIRNTDDAVRPWNLDEVINKDASAIAFIERMTIKDIYLGENVLPRHSLMYEKFTIFNELTKVTYSDDRGMYQKFSASEKIDIFNKLFKQDRKVTRKKLENYLVNELAISSPSVKGIEEQFNANFGTYLDLKKFDELAPYLDNEEFQDVLEEIVKILTVFEDRMMIQNQLAQLPLELSPKTIKSLSRKKYTGWGRLSAKLIDGIKDKQTGKTIMDFLIEDEIDSFMVNRNFMQLINDDNLTYKKTIEDNQPFQEKMSVEDIVMNLSGSPAIKKGILQSLKIVDELVKIMGYTPKNIVVEMARENQTTGQGKFNSKPRLKGIENGLKAFSDSVLKENPTDNRQLQNDRLYLYYLQNGKDMYTGKALDIDHLSDYDVDHIIPQSFITDNSIDNRVLTTSKANRGKSDNVPSEEVVSKMEYFWRKLLKEKLISERKFANLTKRKLTDNDKAGFISRQLVETRQITKNVANILDSRFNTDSSNREVQVITLKSSLVSEFRKTFHLYKVREINDLHHAHDAYLNAVVAISLLKVYPQLKPEFVYGEYGKNSIHEKNKATVKKQIYSNIMRFFSREDVLCNEDGEILWNKKQAIAQITKTLGKHQVNVVKKVEVQKGGFYDQNILKKGKYKKIYNIKRNLSGEKYGGYVKPTNSLSIILKEKKKKKILGITILDKQKYDENPKQFLDDKGFKNAELISKLRKYTLYETKDGTMRMVSSEKEALKANQLILSSELTTMVYHIKEYKNKESSISKAFIESNLDLLKKLSTELIEFAVKYIKKPLVIEEIKQMVDHCSDKNNLELAESLFNMLFFIHAGSSTEFVFMGKKISRDRLRYQSISDVFNAEIIHQSVTGLYETRISLAED

SEQ ID NO: 18360 - protein, 1104 aa, unidentified
  REGION 1..1104: note = Cas Enzyme sequence
MDNQSSAMATAVAEKWNNSPFFAPDTVVLGLDIGIEGIGITVRRGQEWIYSKTLLVDLPEAQALAERRAFRAARHARKNRKTRMRRLKELFAIHNLPWVSDDVMSRSDPFKLRYRAITGKLASREALSICIRSCVLRRGYNYLAMSDTESGGEFPWGTDSSLSEATKWLSTTYVDAEMRHQLIALAPLITYKKKELTEEQAELWAAMVNERYAKAESEGIPATLADYAKKKLNDRKARGRNFPRSHVEEHLRTIIQRHADLIDDASGFTEALFLPNDTKENKKRAIFHYNRKTPKEAQAHFETKVKKCPYCTWLELPESRCDLSGNTDIRKWKLIDFVSTRTFELISENKKPMGRQRLSEDAVRVLVQAVSHEGTGWGEAKKAMEAALKPAKLAPKSDWNKAQLEQLSDIVAPSPILRKGRSNMSAIAAAALYNAATCNGTIFAPEQLEEWKKESGLYTHRATISSAGGIYPQVQTLLGSLKKNSSVFATDGFLQRLFNNKLRDKLGGKSVPDYCIIECVKDPAPNKDIKAEIEKKQKENRARREKQAEKFGKANASKADFLRMRLFCEQGGSEKAPATCPFTGQQIPVADLFTAKLQLAHIYPDSRGGLYMAENLVLTTQEINLAMANRTPYEAATAGLPGWLSWSDMLAQSRKFHWADKKRELFAHSSDTSFPDFNNMTRTAQLASELRNLSAVWMGIAGDAKQIRERIGNPAGIYTAAARLCFFGPDYKKDRTDNNHHRWDAAAMTCIPPTALNDVRYGGIFQTELNGKGNRRLMCIRGLNTPDFEEVRKDGNECPLIKLNSRSKYKSLGDSTFWRVDKEGMTSQRTPLDPGTIKAKELSDTLRKMGIPSDQIPSEKKIESWLTDCQAATKDEAVVIKPLRLNNGTPIRSIWKFGSKGNLDNSPLGWNGIITENGKFDQLRSLAASNDRMELWLGWNAKKKQWEYYKRIIPTAAALAGFKRMGLPWRGTQNAPQYLLDLLQKRKARDLKELLCGTLPPHAVKVATFRKGDTFLLDFELDPKYVEKLQKKGLVNLEDFPKVIKTWGSISAVRSNKKLVFKSLSHKDRKEKELGDCSKLIALLPQETILAAKGIIDKQLTSQS

SEQ ID NO: 18361 - protein, 963 aa, unidentified
  REGION 1..963: note = Cas Enzyme sequence
PCYYDAWKMGLWSVNKPDVLESRITCQAESTRKVRFDRADVEREISTLAKQAAVQLHQLADSFAKWKRDGWKSIDSFPVAAKTFGEFLVYGPAGEPEGDARNNFSDYLKFRASNKIHPGSSDDWMGATAQKTPRFDNRIINTCALIPRLQVCNVTIRFNKSDSKPIPESLLATEVTFLMKLKNTLVTGYPAQRKLTTEEIRKLFEVVTAEALAKALSVGLDDKYRERKVAECYALTKTDWARTKGIKELGLFPLPGHMEIKAPKTDGRSRFSRPALRLIRALILSGQSPSAFHQRLLGRDRHLITEIGMDVLDAEPVRFVGAAGGEKTFIKAERPWVVTSDLKFLLDLARSNDTWDNIYFPEQRLDALEARYTDIKGKISVPQAVRELLGSINDPVVKHRLGVFSDRLTKLQRGDDKEGIPACGIPETVVLEFVREDFMGERAKRELQKFISDREKARKEAGDQAAALGVHEKSGRLKYELFKSQGSVCLYCQQNFKETDLADYRIEHIVPRAQGGPDAMVNYVLAHDACNDAKGDRTPFEWKHGQQGWDGYKACVEKHGTLLRNKKVQLLLREDAAELVGRYTALAETAWITKLAQKIVSLHFGWPRGVDREGNRRVIAVSGGLTARIRRKYRLNSLLNPPPVGTIDLNEWEAKAEKNRKDNRHHALDAMVINFLPQWMRDEKKGWFFRFPEPVRKNPRATFEKEIADVMPRLLAFEKAPLAETIYGGRMEKGKTTIVQRVPLRKLAFNTIKQKEVFDRKYLAGQIKSVRDPHIAEMLLRFLGKESNGESEWHDFCEDLFQRRRDGTKGARISKINVNVGSADEYAEMSKDRGGAYRKGKKGHKGQIIYLELTPTKKGAAKEIIHVRPVYAFESRLTIERKLRKELGDSIKIYGFFQSGCLIAVKKEVAHDKKPLPAGSYLLNTIMADAKCMKVTTQNGVTYPDIPRYSLSSLIEAGLCRAD

SEQ ID NO: 18362 - protein, 1158 aa, unidentified; identical to SEQ ID NO: 16387
  REGION 1..1158: note = Cas Enzyme sequence

SEQ ID NO: 18363 - protein, 1158 aa, unidentified
  REGION 1..1158: note = Cas Enzyme sequence
MKSIWSFDLGIASIGEAVRNLSDDSFPHKASFLLPEEFGETKTASLRRRMKRTRDAHKARESWLNAVWEAAGLEILTGRQVTFLNGKWSPASESQKQKDYRSLLQREFPRKGESICYNSALLRIKLLRGEKLEPWQIYKALWSSIQKRGYGLVPWANRELGKKELTLEEAEKLQKKQDDELAKKDPAYRHTLEAWPMFKREVPKDFHFPCYYNAFKMGLWHPSMPDSFGERITCHATSTRNVRFDRIDVEREAELLARNAAAQLPQLASLLTKIKNDGWLASDSKAGKEKNFRVFAEDFGEFFVHGPAGAKSLAARNDFSAYLAFLKNRGIHPGAKDEWMGATAQKTPRFDNRIINDCALLDGLQVCNVAVRYDSKNNRPATDSLLATEVTFLMKLKNILVHGAGGQRKLTAAEIGTIFSTISAKAVAKDSSLKDYSTSVINCFALTASAWGKAEGIKKLTLFPLPGHEVVRSPKTEGRSRFSRPALRLLRALILGGAKPSVFHQRLLDRDPALLDEIGMDVLDAEPVRITNGAKNFTKQPRPWVLAGQLKFLSDLSRTNDTWEGIYIPEQRLDSLEARHSDEDGNVARDAAIRELIGSVNDPVVRHRLGVFSSRLATLQKEFGQPEEIVMEFIRTDFMGDKAKRDLATFQKKREEARSAAIQQVGKTDAIKYELAAAQGCSCIYCGAGTGMTGLDSFEREHIVPRSQGGPDAMVNYALACRSCNEKKGERTPFQWLRHEDSWDAFESRVNSRATELRNKKVQLLLREDAPDLVQRYTALAETAWISRLAQKIVWLHFGWRNGIDGEGKKRVTIISGGLTGRIRRKYRLNSLLSPCPEGEDPMAWEAKADIPKNRKDDRHHALDAMLINFLPQWSRDARKQHFFRFPDAIQANPQAFFRREIDSVTPCNIAFEKPALADTIYGARQDAGGKVIVQRVLLFALGMQSVGQSKVAFNAKYLAAQSKTVRDPRIVAEINRYLAEEDHSEASWKKFCDTLHLPQKDGSKGPRVIKVNVTAGTPSEYIDMSKDLSGAYRKGKKGHRGQIVFLLRKKNKKGAIKETTCVRPVYAFESRHQAEKSLREEYGDAITIYGFFQSGCLVSVDAEVEHDTLKLPAGVYVLNTIILPGTVKLTNQQGKTYPDIPKYSLTKLIAAGLKRLK

SEQ ID NO: 18364 - protein, 1034 aa, unidentified
  REGION 1..1034: note = Cas Enzyme sequence
MSTVWSFDLGIGSIGEAVRNATTHEFLHVASLIIPAEFASTKEARTRRRMYRTRLAHQAREAWLDHVWQMADQTPLQKRVVWRNPATSKWELKHPADSRLEREFAQKGDSTCYTSCLLRIKLLRGESLEPWQIYKALHSAIQRRGYDPDIPWKAKESARRKDADSEKEEGETKKRMNAFTADLEVMFPDREECRLQCYFDAVKMGLLDPQNPNQLKERIDHTATTTRNQIVPRWMVEKEVRLLCEQAAKQIPGLRGRADFLLWGPAEQPYASYDSEKRKQFGLREGGAADWQGVVGQKIPRFDNRIIEKCSLIPRLNVCKIKSQGTKPEPESQVAYEATFLMKLRNMRVQGQNAQQRPLNASEIGELFKITEEGGYKISAAQWKKWCVKNGVRPLPGHEEVEAPRAGGRSRFCRPALHILKRLILSGTPPKTHRLAEIERLQGNTHPQKGLIESDLGFLERMGDTWEGIYIPDQKLDALLHSSESPEVAVRRIIGSQNDPVVRHRLGQFHERIKALHAAHGIPETVAIEFIRTDFMGDKALIEYRKFIKERENQRKKSREEAAQLGIEGRSGGLKMELLRIQGGLCLYTGNPLNPTDLDSYQVDHIVPRERGGPDSMLNYTLTTQRSNAEKGARTPFEWLSSTDHWDAYVSRIHSKAGALRNKKVKLLLNEDAAELAEKYTSLAETAWITKLSRAILDAFFGWRNGIDNRGVKRVVVVNGGLTARVRRKYKLNSILHPDSADESEAESKNRNDSRHHALDAMVINFIPGWTRDAAKEHFFRFPEGVHREFFQKYICSLMPRNLCLEKPTLAATLYGARGSGHSRIIVKRTSFFDMGYKPIAPGKTAYDLTYLTKQVTSIRDARIRALAQDFLRQHPGEAEWRAFCQTFALPRMDGSKGSRVKTVNVDVGGTEEYKDFSKDSSGAYRKASGSHKGQVVYRDPKGKYRVRPVYVFESVKAVQTEVRANGGEFVDFFQSGCAVSLAAPVEHKKTPLKSGDYLLGTMREDGYIVLKGPSGRCSPISIETFMQSGLRRI

SEQ ID NO: 18365 - protein, 969 aa, unidentified
  REGION 1..969: note = Cas Enzyme sequence
LDEVWKMAGQEPLRKRTVHRSSATGRWELLHPADFRLEREFPAKGDSTCYTSCLLRIKLLRGEKLDSWQIYKALWSAIQRRGYDPEIPWKAKETRRKEGQQSNDEEGITRDRMNQFTADLKEMFPTNPDLQLPCYFDAVRMGLMDPADPENLRDRIDHTAETTRNQIVPRCLVEKEVRLLCEAASKQVPGLIDRADFLLWGPAEKPYASSDPALRKAHGLREGGATDWQGVVGQKIPRFDNRIIEKCSLIPRLNVCKVRSDKGRPEIGSRIVFETTFLMKLRNLRVQSAAGSQRALSAVEVCDLFEASESLGYKMTAGQWKKWCIKNGVRPLPGHEAVEAPKPGGRSRFCRPALDVLKRLILSGQTPQDFKKAELVRLGGNANPLKGLVESDLAFLDRMGTTWEGIHVPDQKLEALLQASDSGEQAIRCIIGSQNDPVVRHRLGLFAERIRRFHSEYGEPETIVLEFIRTDFMGKTARAEYQKFIKEREKQRIESRQEAEKMGATSRGAGLRMELFRLQGGMCLYTGSPLRETEIEQYQVDHIVPRERGGPDSMLNYVLTTLEANREKGARTPFEWLSAGDGWDAYVNRVQGRSTALRNKKVRLLLGEDAVELAERYTSLAETAWITKLSRAILDAFFGWRNGVDSSGKRRVVIVSGGLTARIRRKYKLNSILNPEAIDETEAEKKNRNDDRHHALDAMVINFLPAWTRDSSREGFFRFPEGVHREFFKRALESVVPRNLCLEKPALAETSYGLRTVDGNKTIVSRTELKDLGFRSVQGKKKYDLGYLVKQAESIRDDRIREAVQKKAQEQPDEREWLNFCEEFRISRKDGTPGPRVLKVSVSVGAPAEYRDLSKDGTGAYRNGSRHRGQLVYRDSKGKYRVRPVYVFDSLVQVRAEVVLGGGQIVDFFQSGCAVSLDARVDHKKTPLDAGTYILSTIKATGETVLKTPTGNSAPIALNYFMQAGFRRI

SEQ ID NO: 18366 - protein, 1073 aa, unidentified
  REGION 1..1073: note = Cas Enzyme sequence
MEKRNNGLVLGLDIGVTSVGYGIVNRETGEAVDFGVRLFSEWDPANNQNRRAKRSGRRLRSRRKNRLQDMKKFLVDQGMIPSDYAFHLDPYALRVKGLSEKLTDEELATVLYNLAKLRGSSLETVEDTEEVKNDNVLSSKNNLKINDALIKSGKYICQIQQERLSEKGKLRGHINNFRTKDYVVELKQILSNQGKSKEFNDYVENLIVRRRDFSDGPGSQKSPTPYGRWLTKDQEEPIDLIEKMRGKCSYYPDQLRCAKMAYKADLFNLLNDLNNLSVKGEKLEREQKEQVIEYVNEKGSIKPKQLAKLLGLSDIDDISGFRIDKSDKPILTEFKGYTKVKKVLENSGLYHDHELVDQIIDVLTRDKVVERRANEIRKLSNKFSEEEIEALANLTQISGYHSMSAKAINEFNKEMLISPLNQMQIITNRGNQNDRFNKLKGMKEIHADDTAILSPVAKRAQREAMKVVNKLRELYGEFDSIVVETTRAKNSQEQKTKIKESQAFFEKEKKRAQQIVDENKYNLTVNAKLIQKLRLYAEQNCKTAYALMPIDLDLLISDPTAFEVDHIIPISISYDDSFSNKVLVTRWENQIKGNLTPLQAHKNHKFGEYSDLASYIANVNDLRKMNGMRYEKKKNLLLSDEDLTKFDTQKKFIARNIVDTAYAERVVLNTLQDYFRANEISTVVNTVKGNLTHMFRNKIHLDKERSDIDTGDAHHAIDALIIASLKVFRRFGEILDKRPETIIDEETGEVLEIIEDKKFFDPRYIEIVHKLSLIEKDVTKFSYKIDTKPNRQVADETIYSTRNINGEDLVVKKYKNIYEEKFVTLANDILENNVEKYLMYRNSPETFKYISDIVLHYAKEYRDDEKLMKNGLFVKNPLNRYYEEHHEYLHKPSKHNNGPSVISMKYTDGRLGNKIDISKNYSLDTEKKKVVLQQISPYRTDFYYSPTEGYRFVTVRYSNVCYSSFQGLYVIDKDWYEFQKKVKKIDDSFEFCFSMHRNEIIRIKKEDEDMMWRFTATNNDETNRIEVKPIGYKINKQLMPSIGKKILLLEKYATDVCGNLYKVTNQELKLEFK

SEQ ID NO: 18367 - protein, 1073 aa, unidentified
  REGION 1..1073: note = Cas Enzyme sequence
MEKRNNGLVLGLDIGVTSVGYGIVNRETGEAVDFGVRLFSEWDPANNQNRRAKRSGRRLRSRRKNRLQDMKKFLVDQGMIPSNYVFHLEPYALRVKGLSEKLTDEELATVLYNLAKLRGSSLETVEDTEEVKNDDVLSSKNNLRINDELIKSGKYVCQIQQERLSAQGKLRGHVNNFRTKDYVAELKQILSNQGKSKDFNEYVENLIVRRRDFSDGPGSQKSPTPYGRWLTKDQEEPIDLIEKMRGKCSYYPDQLRCAKMAYKADLFNLLNDLNNLSIKGEKLEREQKEQIIEYVNEKGSIKPKQLAKLLELKDIDEISGFRIDKSDKPILTEFKGYTKVKKVLENSGLYQDHELVDQIIDVLTRDKVVERRANEIRKLSNKLTEEEIEALANLNQISGYHSMSAKAINEFNKEMLISPLNQMQIITNRGNQNDRFNKLKGMKEIHADDTAILSPVAKRAQREAMKVVNRLRELYGEFDSIVVETTRAKNSQEQKTKIKETQAFFEKEKKRAQQIVDENKYNLTVNAKLIQKLRLYTEQNCKTAYALMPIDLDLLISDSTAFEVDHIIPISISYDDSFSNKVLVTRWENQIKGNLTPLQAHKNHKFGEYSDLASYIANVNDLRKMNGMRYEKKKNLLLSDEDLTKFDTQKKFIARNIVDTAYAERVVLNTLQDYFRANEISTVVNTVKGNLTHMFRNKIHLDKERSDIDTGDAHHAIDALIIASLKVFQRFGEILDKRPETIIDEETGEVLEIIEDKKFFDPRYIEIVHKLSLIEKDVTKFSYKIDTKPNRQVANETICSTRNINGQDYVIRKYKNIYDETNLKLANDILQNKFEKYLMYRNSPETFKYISDLVLHYAKEYHDDAKLMKNGLFVKNPLNRYYEEHHEYLHKPSKHNNGPAIISMKYIDGKLGNKIDISKNYSVDTEKKKVVLQQISSYRTDFYYSSTEGYKFVTVRYSNVYYSSDQGLYVIDKDWYESQKKVKKIDDSFEFCFSMHRNEIFRVKKEGEDIMWRFTATNDDKTNVLDIKPIGYKIDKQLKLVIGKKILLLEKYATDVCGNQYKVTNQELKLEFK

SEQ ID NO: 18368 - protein, 1073 aa, unidentified
  REGION 1..1073: note = Cas Enzyme sequence
MEKRNNGLVLGLDIGVTSVGYGIVNRETGEAVDFGVRLFSEWDPANNQNRRAKRSGRRLRSRRKNRLQDMKKFLVDQGMIPSDYGFCLDPHSLRVKGLSEKLTDEELATVLYNLAKLRGSSLETVEDTDDTKSDDPLSSKNNLRINDTLIKSGKYVCQIQQERLSEEGKLRGHINNFRTKDYVAELKQILSNQGKSKDFNDYVENLIIRRRDFSDGPGSQQSPTPYGRWLTKDQEEPIDLIEKMRGKCSYYPDQLRCAKMAYKADLFNLLNDLNNLSVKGEKLEREQKEQVIEYVNEKGSIKPKQLAKLLGFSDIDDISGFRIDKSDKPILTEFKGYTKVKKVLENSGLYQDHELVDQIIDILTRDKVVERRANEIRKLSNKFSEDEVDALANLTQISGYHSMSAKAINEFNKEMLISPLNQMQIITNRGNQNDRFNKLKGMKEIHADDTVILSPVAKRAQREAMKVVNRLRELYGEFDSIVVETTRAKNSQEQKTKIKESQAFFEKEKKRAQQIVDENKYNLTVNAKLIQKLRLYAEQNCKTAYALKPIDLDLLISDPTAFEVDHIIPISISYDDSFSNKVLVTRWENQIKGNLTPLQAHKNHKFGEYSDLASYIANVNDLRKMNGMRYEKKKNLLLSDEDLTKFDTQKKFIARNIVDTAYAERVVLNTLQDYFRANEISTVVNTVKGNLTHMFRNKIHLDKERSDIDTGDAHHAIDALIIASLKVFRRFGEILDKQPETIIDDETGEVLEIIEDKKFFDPRYIEIVHKLSLIEKDVTKFSYKIDTKPNRQVADETIYSTRNINGEDLVVKKYKNIYEEKFVTLANDILENNVEKYLMYRNSPETFKYISDIILHYAKEYRDDEKLMKNGLFVKNPLNRYYEEHHEYLHKPSKYNNGPAIISMKYTDGRLGNKIDISKNYSVDTEKKKVVLQQISAYRTDFYYSSTEGYKFVTVRYSSVYYSSAQGLYVIDKDWYESQKKVKKIDDSFEFCFSMHRNEIIRIKKEGEDMMWRFTATNDDLRNKIEVKPIGYKINKQLMPAIGKKILLLEKYATDVCGNLYKVTNQELKLEFK

SEQ ID NO: 18369 - protein, 1073 aa, unidentified
  REGION 1..1073: note = Cas Enzyme sequence
MEKRNNGLVLGLDIGVTSVGYGIVNRETGEAVDFGVRLFSEWDPANNQNRRAKRSGRRLRSRRKNRLQDMKKFLVDQGMIPSDYAFHLDPYALRVKGLSEKLTDEELATVLYNLAKLRGSSLETVEDTDDTKSDDSLSTKNNLRINDALIKSGKYVCQIQQERLSEKGKLRGHINNFRTKDYVSELKQILSNQGKSKDFNEYVENLIVRRRDFSDGPGSQKSPTPYGRWLTQDQEEPIDLIEKMRGKCSYYPDQLRCAKMAYKADLFNLLNDLNNLSVKGEKLERDQKEQVIEYVNEKGSIKPKQLAKLLGLSDIDDISGFRIDKSDKPILTEFKGYIKVKKVLENSGLYHDHELVDQIIDVLTRDKVVERRANEIRKLSNKFSEEEIEALANLTQISGYHSMSAKAINEFNKEMLISPLNQMQIITNRGNQNDRFNKLKGMKEIHADDTAILSPVAKRAQREAMKVVNRLRELYGEFDSIVVETTRAKNSQEQKTKIKESQAFFEKEKKRAQQIVDENKYNLTVNAKLIQKLRLYTEQNCKTAYALVPIDLDLLISDPTAFEVDHIIPISISYDDSFSNKVLVTRWENQIKGNLTPLQAHKNHKFGEYSDLASYIANVNDLRKMNGMRYEKKKNLLLSDEDLTKFDTQKKFIARNIVDTAYAERVVLNTLQDYFRANEISTVVNTVKGNLTHMFRNKIHLDKERSDIDTGDAHHAIDALIIASLKVFRRFGEILDKRPETIIDEETGEVLEIIEDKKFFDPRYIEIVHKLSLIEKDVTKFSYKIDTKPNRQVADETIYSTRNINGEDLVVKKYKNIYEEKFVTLANDILENNVEKYLMYRNSPETFKYISDIILYYAKEYSDDEKLMKNGLFVKNPLNKYYEEHHEYLHKPSKHNNGPSIISMKYTDGRLGNKIDISKNYSVDTEKKKVVLQQISPYRTDFYYSPTEGYRFVTIRYSNVYYSSTQGLYIIEKDWYKSQKKSKKIDDSFEFCFSMHRNEIIRIKKEDEDMMWRFTATNNDSTNKIEVKPIGHKINKQLILAIGKKIILLEKYATDVCGNLYKVTNQELKLEFK

SEQ ID NO: 18370 - protein, 1073 aa, unidentified
  REGION 1..1073: note = Cas Enzyme sequence
MEKRNNGLVLGLDIGVTSVGYGIVNRETGEAVDFGVRLFSEWDPANNQNRRAKRSGRRLRSRRKNRLQDMKKFLVDQGMIPSDYAFHLDPYAFRVKGLSEKLTDEELATVLYNLAKLRGSSLETVEDTEEVKNDNVLSSKNNLKINDALIKSGKYICQIQQERLSEEGKLRGHINNFRTKDYVAELKQILSNQGKSKDFNDYVENLIIRRRDFSDGPGSQQSPTPYGRWLTKDQEEPIDLIEKMRGKCSYYPDQLRCAKMAYKADLFNLLNDLNNLSVKGEKLEREQKEQVIEYVNEKGSIKPKQLAKLLGLNDIDDISGFRIDKSDKPILTEFKGYTKVKKVLENSGLYHDHELVDQIIDILTRDKVVERRANEIRKLSNKFSEEEIEALANLTQISGYHSMSAKAINEFNKEMLISPLNQMQIITNRGNQNDRFNKLKGMKEIHADDTAILSPVAKRAQREAMKVVNRLRELYGEFDSIVVETTRAKNSQEQKTKIKESQAFFEKEKKRAQQIVDENKYNLTVNAKLIQKLRLYAEQNCKTAYALMPIDLDLLISDPTAFEVDHIIPISISYDDSFSNKVLVTRWENQIKGNLTPLQAHKNHKFGEYSDLASYIANVNDLRKMNGMRYEKKKNLLLSDEDLTKFDTQKKFIARNIVDTAYAEKVVLNTLQDYFRANEISTVVNTVKGNLTHMFRNKIHLDKERSDIDTGDAHHAIDALIIASLKVFRRFGEILDKRPETIIDEETGEVLEIIEDKKFFDPRYIEIVHKLSLIEKDVTKFSYKIDTKPNRQVADETIYSTRNINGEDLVVKKYKNIYEEKFVTLANDILENNVEKYLMYRNSPETFKYISDIILHYAKEYRDDEKLMKNGLFVKNPLNRYFEEHHEYLHKLSKHNNGPTIISMKYTDGRLGNKIDISKNYSLDTEKKKVVLQQISPYRTDFYYSPTEGYRFVTIRYSNVYYSSIQGLYVIDKDWYEFQKKVKKIDDSFEFCFSMHRNEIIRIKKEDEDMLWRFTATNNDSTNKIEVKPIGHKINKQLMPAIGKKIILLEKYATDVCGNLYKVTNQELKLEFK

SEQ ID NO: 18371 - protein, 1035 aa, unidentified
  REGION 1..1035: note = Cas Enzyme sequence
VKNLRYRLGIDLGTTSIGTALVELTEANDLLVPSSVMHMGVRIFEDGRDPKTKEPLGVTRRNAKQARKNRDRYLRRRKRLMDALIEFGLMPKQEDQRKCLALLNPYDLRMRGLDEQISLSELARAIFHLNQRRGFKSNRKAQGGEDGKIRVAVNALKEIFQKENCRTLGEFYYKTRLQKGLSVRSRLEGNGAKAAYPFYPSREMLEDEFNKLWGTQAQFYPKVLTHEAKEKIRDIFLYQRPLKPVKPGRCTLEPGELRAPLASPLFQKFRILQQINELRILDHYGNKRLLTQEQRDLLYKELSHKKELKCTDARNKILNLARNERFSIEDDRKDKLSGDQIAALLGAKKYFGENWFKLPLENQCEIVNAIRNEENSEKLIDILMAFGVSHEIGASICEENLPAGYGNLSEKVLKKIIPELEAEVITYAEAAKRAGYNHSSNYTGEIFDKLPYYGKILENRVAHGSGLETDSDEKRYGKIANPTVHIALNQLRHVVNCVIKHFGAPEQIVIEVARDLKMSIEETKDYTKRQKENQDNNERINKELEKLGQVPNGANRERYKLWENLGDNPMDRRCPYTQQIISVNMIFSAEVEVEHILPFGQTYDDSLANKTLSMRYANRAKGNKSPFEAFGNSPTIAGVTYDYQVMMDSLPKSEFWTRNRWRFEKDALDRFNENGDFQNRQLTDTAYASRLALEYLQYICPPPNLWAIPGRLTSMMRSKWGLNEILGIEQEDGTFKKSRDHHGHHAIDALVVAMTDRSLLQRISKMSGEHWINEKHLLKGFEPPIADLQSQARDRLQKLVVSHRKDHGAGGCLHNDTAYGFVGEYDANGASQVRHRVFLNSLKKDAIANVQSEPIKVRLEELAADCSTEKEWSDALLQFSQETGIRRVRIIEKISVIPIANRETGAVYKAFKTDGNYCYDMWADGDKWTGRVISRYEANVNSAKRPENVLMRLRGGDTICLENMDFRFFYVVGISLGRVTLAPIFESGNLRERDRSKIDSFKYLVKSPNALLPLKARVVHVDECGFVYDPGFKEK

SEQ ID NO: 18372 - protein, 1035 aa, unidentified
  REGION 1..1035: note = Cas Enzyme sequence
VKNLRYRLGIDLGTTSIGTALVELTEANDLLVPSSVMHMGVRIFEDGRDPKTKEPLGVTRRNAKQARKNRDRYLRRRKRLMDALIEFGLMPKQEDQRKCLALLNPYDLRMRGLDEQISLSELARAIFHLNQRRGFKSNRKAQGGEDGKIRVAVNALKEIFQKENCRTLGEFYYKTRLQKGLSVRSRLEGNGAKAAYPFYPSREMLEDEFNKLWDTQAQFYSKVLTHEAKEKIRDIFLYQRPLKPVKPGRCTLEPGELRAPLASPLFQKFRILQQINELRILDHYGNKRSLTREQRDLLYKELSHKKELKCTDARNKILKLARNERFSIEDDRKDKLSGDQIAALLGAKKYFGENWFKLPLENQCEIVNAIRNEENSEKLIDILMAFGVSHEIGASICEENMPTGYGNLSEKVLKKIIPELEAEVITYAEAAKRAGYNHSSNYTGEIFDKLPYYGKILENRVAHGSGLETDSDEKRYGKIANPTVHIALNQLRHVVNCVIKHFGAPEQIVIEVARDLKMSIEETKDYTKRQKENQDNNERINKELEKLGQVPNGANRERYKLWENLGDNPMDRRCPYTQQIISVNMIFSAEVEVEHILPFGQTYDDSLANKTLSMRYANRAKGNKSPFEAFGNSPTIAGVTYDYQVMMDSLPKSEFWTRNRWRFEKDALDRFNENGDFQNRQLTDTAYASRLALEYLQYICPPPNIWAIPGRLTSMMRSKWGLNEILGIEQEDGTFKKSRDHHGHHAIDALVVAMTDRSLLQRISKMSGDHWINEKHLLKGFEPPITDLQLQARNRLQKLVVSHRKDHGAGGLLHNATAYGFVGEYDANGASQVRHRVFLTSLKKDAIVNVQSEAIKVRLEELAADCSTEKEWSDALLQFSQETGIRRVRIIEKISVIPIANRETGAVYKAFKTDGNYCYDIWADGDKWTGRVISRYEANVNGAKTPENVLMRLRGGDTICLENMDFCFFYVVGISLGKVTLAPIFESGNLRERDRSKIDSFKYLVKSPNALLPLKARVVHVDECGFVYDPGFMEK

SEQ ID NO: 18373 - protein, 1031 aa, unidentified
  REGION 1..1031: note = Cas Enzyme sequence
MQKKRYRLGIDLGTASIGTALVELDGPTEHPHPTNILHMGVRIFEDGRDPKTKVPLGVARREAKQARKMLDRYLRRRKRLTDALIKFKIWPEDENKRKSFCLFNPYDIRTRALDEKISLEELGRAIFHLNQRRGFKSNRKTDGGEDGKIRTAVAKLEQIFQSEGCRTLGEFYQKRLIKGQSIRARLEGAGAKAEYPFYPSRQMIEHEFDKIWDKQVEFYPNILTEDAKKVIRSTLLYQRPLKPAKPGKCFLEPSEDRAPIASPYFQRFRILQTINELRIIDRYGDKRPLTKEERDILLEELSQKKELKFSAAKKLLSLSNNNRFSIQDEGRDKFQGDQIAVLLGNKKYFGKNWKLLPIENQNEIVKALIDEQDTEKLIATLAVFGLSKEAAAQLSEETLPTGYGRLSVVALKKIVPFLEESVITYSEAAAKAGYNHSDNYTGEIFRYLPYYGKVLENRVMRGSGNEADNDEDRYGKVGNPTVHIALNQLRRVVNCVIKHFGAPEQIVIEVARDLKMTQDEIKDYKKHLAENEKRNERIDKELEKLGQSINRDNRERYKLWEELATDPMERCCPYTGIRIGIEKLFSDEVEIEHILPFAQTYDNSLANKTLSMRYANRLKQNRSPYEAFAEHSYKGILSYQEMLDRLPQDKVWESKRWRFEKGALDKYNENGDFQARQLTDTAYASRLALEYLKFICPKDSIWAIPGRLTSMLRRQWGLNSILGRELPDGTFEKSRDHHGHHAIDGLVVAMTDRALLKKMSDATQTNWENQERVLSHIDPPIVDIFDQAKERLSHLVVSHRKDHGLGGALHNDTAYGIVGEFKEGTVSTVRHKIPITSITGSNINQVENSFIRESIQNLIADFGTGASLEAAINEFSSKTGIRRVTLTEKLSVVPIKDKTGRIYKAFKPDGNYCYDIWSNGDKWEGKIISRFEANSKNFNKKQNCLMRLFVGDTLCCELNEQKKFYHILGITDGKVTLAEIHEAGNLKERDRDKKDYFKYIFKAPSKLKDFKARLVHVDECGFVYDPEFKEK

SEQ ID NO: 18374 - protein, 1003 aa, unidentified
  REGION 1..1003: note = Cas Enzyme sequence
MSSKMRYRLALDLGTTSIGWAMLRLDQQDRPCAVIRAGVRIFNDGRVPKTGEALAVQRRLARQQRRTRDRSLRRKNKLINMLVRFGFFPENLAERKSLERLNPYELRAKGLEHQLKPEEFARALFHLAQRRGFKSNRKTDRGDAESGVMKTAIVETKQEIETLGCRTIGEYLYKRLQAGLGTRARLRDKPKVKGGATKSYDLYLERSQVETEFDALWDVQSRFAPELFTQKKREALRDTIFHQRDLRPVKPGRCTLFPEEERAPLALPSQQRFRICQEVNNLRKIDEHLCSIELTQTEKAKLVQALSGARKKTFEQLRKVIGYEGQFNLEEAGAGRADLKGNETAVVIGKIIGKDWLKYSLSEQDKLVLKLLNIESESELIGMLQEEFDLSEAVAKKLSGAPLVNGYGSLSCKAIDLILPFLEQGMTYDKAVAAADIPSHSDLTWQVKSDELMDQLPYYGEVLQRHVGFGSGNPEDAPEVRFGKIANPTVHICLNQLRLIVNLIIKRYGNPDGVVIEVARDLKLSREKKNEIVRKQKKNQEKREQVRKEIAAILECDETLVTSEDIEKWLLWEELNPGNALDRRCPYTGRQISAVDLLSKAFEIEHILPRSRTLDDSRANKTESYWEANRLKSNLTPWEAREIFETHGWNYEDILKRAENLPPNKRYRFGADGYKTWLREDSDFLARELTDTQYISRIAREYVSLVCPKNTYVIPGRMTAMLRHCLGLNTILSDDDKKNRNDHRHHAVDACVIGITDRSLLNKIAALSARGEEQNDRKFQRSVEEPWRGFRESVCRAVERINVSHRPEHSYEGQMHDQTAYPIDKNGQGWKKEVKSNGQTEWKKISVIPMVSQKAAQRHGYLSDGTLRPYKGYSGNSNFCIEITVNEKGKWQAEFVTTYDAYQIARKFGKDKLYGKESQSGHKLVMRLMKKDVVAMEDVDGCRRLYLLHKFSTNGVLSFAPINESNVSARVTEGSFKYVSKTAGSLQRAKARQVMLSPLGDRS

SEQ ID NO: 18375 - protein, 1003 aa, unidentified
  REGION 1..1003: note = Cas Enzyme sequence
MSSKMRYRLALDLGTTSIGWAMLRLDQQDRPCAVIRAGVRIFNDGRVPKTGEALAVQRRLARQQRRTRDRSLRRKNKLINMLVRFGFFPENLAERKSLERLNPYELRAKGLEHQLKPEEFARALFHLAQRRGFKSNRKTDRGDAESGVMKTAIVETRQEIETLGCRTIGEYLYKRLQAGLGTRARLRDKPKVKGGATKSYDLYLERSQVETEFDALWDVQSRFAPELFTQEKREALRDTIFHQRDLRPVKPGRCTLFPEEERAPLALPSQQRFRICQEVNNLRKIDEHLCSIELTQTEKAKLVQALSGARKKTFEQLRKVIGYEGQFNLEEAGAGRADLKGNETAVVIGKIIGKDWLKYSLSEQDKLVLMLLNIESESELIGTLQEEFDLSEAVAKKLSGAPLVNGYGSLSRKAIDLILPFLEQGMTYDKAVAAADIPSHSDLTWQVKSDELMDQLPYYGEVLQRHVGFGTGNPEDAPEVRFGKIANPTVHICLNQLRLIVNLIIKRYGNPDGVVIEVARDLKLSREKKNEIVRKQKKNQEKREQVRKEIAAILECDETLVTSEDIEKWLLWEELNPGNALDRRCPYTGRQISAVDLLSKAFEIEHILPRSRTLDDSRANKTVSYWEANRLKSNLTPWEAREIFEAHGWNYEDILKRAENLPPNKRYRFGADGYKTWLREDSDFLARELTDTQYISRIAREYVSLVCPKNTYVIPGRMTAMLRHCLGLNTILSDDDKKNRNDHRHHAVDACVIGITDRSLLNKIAALSARGEEQNDRKFQRSVEEPWRGFRESVCRAVERINVSHRPEHSYEGQMHDQTAYPIDKNGQGWKKEVKSNGQTEWKKISVIPIVSQKAAQRHGYLSDGTLRPYKGYSGNSNFCIEITVNEKGKWQAEFVTTYDAYQIARKFGKDKLYGKESQSGHKLVMRLMKKDVVAMEDVDGCRRLYLLHKFSTNGVLSFAPINESNVSARVTEGSFKYVSKTAGSLQRAKARQVMLSPLGDRS

SEQ ID NO: 18376 - protein, 1003 aa, unidentified
  REGION 1..1003: note = Cas Enzyme sequence
MSSKMRYRLALDLGTTSIGWAMLRLDQQDRPCAVIRAGVRIFNDRRVPKTGEALAVQRRLARQQRRTRDRSLRRKNKLINMLVRFGFFPENLAERKSLERLNPYELRAKGLEHQLKPEEFARALFHLAQRRGFKSNRKTDRGDAESGVMKTAIVETKQEIETLGCRTIGEYLYKRLQAGLGTRARLRDKPKVKGGATKSYDLYLERSQVETEFDALWDVQSRFAPELFTQEKREALRDTIFHQRDLRPVKPGRCTLFPEEERAPLALPSQQRFRICQEVNNLRKIDEHLCSIELTQTEKAKLVQALSGARKKTFEQLRKVIGYEGQFNLEEAGAGRADLKGNETAVVIGKIIGKDWLKYSLSEQDKLVLMLLNIESESELIGKLQEEFDLSEAVAKKLSGAPLVNGYGSLSRKAIDLILPFLEQGMTYDKAVAAADIPSHSDLTWQVKSDELMDQLPYYGEVLQRHVGFGTGNPEDAPEVRFGKIANPTVHICLNQLRLIVNLIIKRYGNPDGVVIEVARDLKLSREKKNEIVRKQKKNQEKREQVRKEIAAILKCDETLVTSEDIEKWLLWEELNPGNALDRRCPYTGRQISAVDLLSKAFEIEHILPRSRTLDDSRANKTVSYWEANRLKSNLTPWEAREIFEAHGWNYEDILKRAENLPPNKRYRFGADGYKTWLREDSDFLARELTDTQYISRIAREYVSFVCPKNTYVIPGRMTAMLRHCLGLNTILSDDDKKNRNDHRHHAVDACVIGITDRSLLNKIAALSARGEEQNDRKFQRPVEEPWRGFRESVCRAVERINVSHRPEHSYEGQMHDQTAYPIDKNGQGWKKEVKSNGQTEWKKISVIPIVSQKAAQRHGYLSDGTLRPYKGYSGNSNFCIEITVNEKGKWQAEFVTTYDAYQIARKSGKDKLYGKESQSGHKLVMRLMKKDVVAMEDVDGCRRLYLLHKFSTNGVLSFAPINESNVSARVTEGSFKYVSKTAGSLQRAKARQVMLSPLGDRS

SEQ ID NO: 18377 - protein, 1044 aa, unidentified
  REGION 1..1044: note = Cas Enzyme sequence
MAEKKFKYRLGLDLGTNSIGWCMLRLNKDNEPAAVIKSGVRIFHDGRNEKTKEPLAVVRRNARSIRRNLDRKISRRNHLLNTLVKYFLLPSNEIERKALAVLNPYELRSRAVNERLELFELGRLLMHLSKRRGFKSNRKVDKEDSSGKIKPAIERLKNKMQETNKKTAGEYLYSLMQNGKPVRARLGRIDGSNGYEIYLDRALIEEEYNLIMNEQKKHHKELTDDIINEIFNIIFYQRPLKKQIIGKCSLTGEDTKLKKAHVLAQDFILLQKVQDLRVFDDNQLEFRPLSNDEKDIIKRELRKKKEVSYENIRKLLKKYYENVKYGMFSHETLYKKLQGNKTNALMSDKEIIGDSWYSLSPEVQYDIIEELYSDKDNDELSKLYSEKFNLNESQINGLLNKAIYRLDSGYIRYGKTAVTNLNSIMDKDNLNLHDAREEAGYEKENKQDASEYLEYYGKVLPDSVVDPQIENPKNDEERYGKIANPTVHAALNQLRKLVNELIKLYGKPEQIVIELARDLKNSRKAKDVINKKIAENRKLNEEVDKTLQEYSEKYNTHIVKNKLNRDKVKLWRELGKDPLERKCIYTGEQINIAKLFSDEVQIEHIVPYSKTLDDSFNNKTLSMKQANYYKGNKTPYEAFKDSKDGYNYDDIIARAKLLNNDNKFKRFTKDAMDIYNRDGKDFIARQLSDTQYLSTRALIYLQSLYEKAHHSSIWTIPGQLTALIRNYLGLNTLISNDKNKNRNDHRHHAVDAFVVAVTSRSLLQKISYAASLQEDLDNRNVSSYRNKLLEKMPEPFPNYRKSLELAIDNIKTSHKADRSISGKLHEDTAYGIVENDDKYNVVTRWTVDKFKEQKHFETIRDNELKEIACSDKELFAKIVETRKIKSIRKLAKENPVIKIKDKSGRDYKAFAGGNNICVEIYEVDGVRKSEVIQLFDAAQKGFMPEWMKKYPNGKLLMRLFKGDVIGFIENRKYNYYTIKGISIADQNLKLLAINKAEGIFKKGLNILFDSNNKNSLNAKQFNISVTGIVTKKKTADVNFWKNRK

SEQ ID NO: 18378 - protein, 1336 aa, unidentified
  REGION 1..1336: note = Cas Enzyme sequence
MKHFTLGLDIGITSIGWSVIDTDQGKLIDLGVHLFEEENPASDARSNRCARRGIRRRKWRKGQLRSAFIDFGVLSREEIEQPGYLSYTSDTDTLHRPKDETVYHLRKRALHEKVSLRELLLALYNICGTRGHFLMENVNFDSQEGITFDLFRERFYEVIVDVIEILDRDTFEQTVLRPLFEQGKLPKKEITSLKNTGMTEDAEALMQVLCLLSGYKATLSKISESVALPDVSGTVDLLTLIKRDELNDFLEGIIELHDMVEVSKILQQYQYICEAAVDQLERVKEIYLLEKSDPAAYKEEVKAIHSKMKVTDPKHKLRVVKNIENKYPNGLYVKEARAILRKQRTFYPEQISDAFIEVCITIIRARIPYYIGPLSEQAKNAWLVKTGNFRYSYAYSAKSAVDEQESIRRWKLAMISHCTYLPEEYALAKGSFIAETANILNELNVLQAIDQNEDRYYLTMKDKLQVIDQLFLRNAKVAYSDVAQLLGLKSFGPKRRSGNQRFHAQYTLYHSIVALLPQLALHSITELFEHGDKVDTLEDLVLNINLFDEESSKETYLQEQMHLERSVAKKLSKLKSNGFYAFSRKFLMDTEMNEQGQSLLEALISDNCEEYTNEQMTLITQARDVQGNAIHFDSNKYMEKLEKDGRLSIDLLIENGKPFIPISRPVIRALNECFKLYEEIIQTYGVPARVVIETARDLKDSSRQGEVPARHFDNMSTLYNSLMNQLKQPEKKLYHHSLEDWEEISTYLTRNKQKVELYLRQNGLDMISGDPIDLHHLEEYEMDHILPRGFGDNSMDNLMLIHKTYNSAKGDRVPLEYIENDPVKNKAGKTITSGDFTRRVNELFELRMISEKKVKQLMLSSSEEAFGFINRNLVDTRYIIRELTAILRAYNTVHAYDTHIVSLRASFTAVYRQALRFRKNRDIGTQHHAHDAAIVSIADQVLSTYYPHYDERGNQKNYQNFLQMVKENTGKNEKEKSERSKLNTFIEIAYWKTYGNLPTQPDSLVSQIKATVPLYSIKAEKNYRGKFFDATIMTQEELKKLEKKGKTPLSIIGVNTDQHAFTGVNCAAVDFYKFTVNKGTKKEKKKHVAIHIPKVIIHPDGTIDKEKYIALIRDYYKVNELLDENGELKEYYFRLRVFKNDLIYNTGDRMIQKFNIGSIALKKLEMKHIYQFSYDDIYDQVTFMRKSLSIRYDFKLRHINPSGTKKFQDIDIYDMIHFCMDNLMDIHDRERYKKAIVEYLEKETNFQTFLEKAAYVNLVVNRPCTPPTIFGQYCPTASAADEEAQYVKIKSSILGIRYWINEDGVLIINGPNGARQKYSKIKKEAFSWKICQSMVK

SEQ ID NO: 18379 - protein, 1330 aa, unidentified
  REGION 1..1330: note = Cas Enzyme sequence
MNHFTLGLDVGITSIGWSVMDMEQNKLIDLGVRLFEEAKPAASARDFRSARRTLRRKKWRKNQLKKAFIDFGLLSQEIIDQKDYLSFTVSNEHFQRPEDETVYHLRLRALHEQVTIRELLLALYNICKTRGHFLMETVNFDSKEGITYELFRERFYQTVEEYVHFKDKDDFETKILRRLFAEGKIPKTECTKLLKNGYGISNEDDVALKQIIFLLSGFKANLSEVSEQAALPDVTKTIDILTLIKKDELNDFLNAVIELHDMIEVSKVLQKYQYICELDVDKLNQVSVIQAMQKTDPDRYKSEVKTIQNKMKIANPGDILRVIKNIENKYPNGLYVKEARAILRKQQEYYPELISNAFIEVCISIIQARIPYYIGPLSMDAKHAWLVKKDKFKYSYAYSKEQAVDEFQSIKNWKLAMISRCTYLPDEFALPKGSFIAETFNILNELNVLQAVDQNENSYQLTQNDKLRILDQLFLRQKQVKYQEIAELLNLKSFGTRRKSGLQKFRSGYTLYHQIRAILPSYQLETIDELFKKTEKIERLEELILNINLFDEEASKLEFLGKDEAIGLSAAKKLAKLSSSGFYAFSKKFIMDTPMNETGQSLLEELFDDNVADYTNEQMTLISQAKDTAGNPVHFDSNKYMDKLKKGKHLSVDLLIEKGKPFIPVSRPVIRALNECFKLYEEIIRTYGVPKRVVIETARDLKDSSRLGEIPAKHFDEMKRCFDYLQEQLKKPEKKLYDHKIEDWDKISTFLNRNKRKIELYIRQNGLDMISGDPIDLDHLTDYEMDHILPRGFGDNSMDNLMLIHKTYNAMKGDRVPLEYIENDHVTNKAGKTVTTGDFLRRVNELFELRMISEKKVKQLQLASAEEAFGFINRNLVDTRYIIKELMAILRAYHTVNEYDTHIVSLKSAFTSIYRQALRFQKNRDIGTQHHAHDAAIIAIADHVLSTYYPNYDQRGNQSAYHRFIEQIIEQKGKNEQEKSEQSKINDFIEFAYYKAYGDLPTHPGSMVSQVKASVPLYSIKAEKKYTGELFNATILKPSKVDEKSPLSILGVNNDIHAFSSVNCAAVDFYKVPTKKGQHKHVAIHIPKVIVHADGTIDKEKYIALVRDFYKETILLDEHGEIKEFYFKLRLFKNDLVYDTEHHVIQKFNIGSIALKKLEMKHIYQFSYDEIYDQVWFMRKALCIHFDMKLRHINPSGKTQFKDLPIQKVIEFCLDNLMDINDKERYKQSIVKILEQETSMQSFLEKAAFIQLIVNRSCTPPTIIGRNCPTATAVNGDEQYIKIKSTILGIRWQYNENGNLMISGPNGAIHKYSKIRKEPFSWKICKSVIE

SEQ ID NO: 18380 - protein, 1080 aa, unidentified
  REGION 1..1080: note = Cas Enzyme sequence
MKYVLGIDIGTSSLGLNINKLDNNENIINIIDTEDYIFGEPVINNKGKYITKNQNKRVNQLEQVQNERKNRRKNAIYHLAKEIDIKKEDIKYIQENENLLKIRAKAYKEKISLPELFAVMVHISTNRGYSGRLKKEDKGLGELFSQTKEKMDELDAKTIGELKYLLVQKQNSKILSKTKNNEGTFFKREEIEKEFDLIIEEQIKHYTILERELKYPYINDIEKNLIVCKKLKAIIFFQRPIKWDKNSIGNCNIYRDKKVVSKSSILFEKYRTLQMLSNLEFTDYTKIDIKYFSKALNILDGKKDMSVTKFLKGLGYENKTFKNNGNIKDEKIKGLYTNKKLSENFKEWDTLTLEQQESVIDFLSILSSSDEIELGDLEKIYDDYISFSNRDTNIKEFLELNKHKLEPLSEFNLPKSRSSYSKEALEKFIEFFENGMIDGINEPEKILRKIENIEEPKKIFENLNITNPIVLRAIKESLYEIEKVVKVYGEPYKINIEFTRDIKKSLKQRGEIEAKNNIRHKDKNLIKNELQKYGLKLTNNNIKKYILWQQQNYRCPYTGKMINMCAYTGSKIEKTSDILNYELEHIVPESKGGTRAMYNLVLADKEANKDKNNKTPYEYFNDKENWRYIQGYIEHLEKITKETKNLEIFIEGKEKIILDKEELKKKLKLLKSQKSAMELGKSEFGQRSYSDTSYIAKELTQLLKDKYLNTKDIVITKGGIVAYLRNIWGLNDILPYIRDKENKPIYDKDRNKIPYEEYQKVKKENLFEFDKRCDHRHHAIDAIVISFCSRSLVNKLSTFHGKFGHLPRKKAKDYFKDGEIELYNEVKSLFDKNSFYTKVQNIIADITVWHKPDRHPRGDFFDETIYGKDSDGYFIKRVKAVDFFDKITKIEKVKENIEKWVVSKETKIALIENFEKFKEEQSIKEIASNLYNYKRQTSIKKIQIKAGRTKKQKFNDTLDKKLKNGYGVNSGYSCINIDKSTFKFDLIPNHKFKYNKDKNILQLFPNDIIFDKQTKRFFIVSSFAEKEIIKAKNITESDSFDKVRDSSIKEVSYKYFGKRSLKNIILVNSKVDIEIIKKSY

SEQ ID NO: 18381 - protein, 1335 aa, unidentified
  REGION 1..1335: note = Cas Enzyme sequence
MGEITLGLDIGVGSVGWALINQEQNHLIDMGVRIFNQATPAQESRLARGARRNQRRRKWRERQLLDAFCDFHIVSKEEISQPDYLSYTVNSDIFHRPKDDTVYHLRKRALSEEVSTRELILCLYNICKTRGHFLMETVNFEKESITFPLFVEKFHELIDSYVDFDDQQGFDETVLKKLFEQRKIGQSEIKRYITHGNYGKTERDDSALKEVCNLLNEYKAKLQVLDENLDLEKTVNINDLLKRDDLSDLEQGLIELHDLIRIAQTLKSHNYLCEIAVEKLDKMKDIYALETSDPEEYKKVKDDIQGRMNLSDKKKKQGCKSLKVVKNLTNNYPNGLYVKEARAILQQQQKYNPKISNSFIDICLDIIKARIPYYVGPLSEDGKNAWIKKTGKFKYSYQYSEKQAVDLEDTITAWKQRMISRCTYLPDEYALPKGSLLAEVFSIANEMNNLMASDKNGDTYYLTQKDKVVLFDKLFLVKKQVTFKDVCGALDLDAFGTNMPSNIKRFNNSITLYQSIVKLIPKLKLDSVMEIFENSSKIDEIEQIVLYINLYDEELTKREYFEKLYENKDLASKLARLQSKGFYSFSKQFIFKEVMDVNGNTLLEKLFSDNKKDVKNEQMTIITNATDINGKPRNFLSNKYIKKLQKDNRLGIDLLMEDGKPVIPVARPVIRSLNECLKVYSGILDIYGVPDRVVIETARDFDNENKGKMTTNHHDQMKKLYDDLMKQIHEDKKHRLHPNKQLSEWDTIESYLSKNRQKVELYIRQNGRDLLSGDPIDINRLENYEIDHVLPRGFGDNSMGNLMLITHEHNAKKSNRLPLQYIESGECRDESGHIVTSKEYEQRIKELYELKLINELKRERCLLADTDSLEGFINRNLVDTRYIIKEFMSILRAYNQVNEFKTHIVALQSKYTKVYRRAFNMNKTRSLGDQHHAHDAAMLAIADHVLSNYYPNYDRRPNFKAYQKFMAQMSKRDRDEIMTTNHWVRVMYENTYNEYVNDKDSLIAQIKSCVPLYSLKAEKNFKGAFFNATIYPQSDKKEKGVLELLGINNDKHVFSSIECATVDFYKLKDKKGKAKHVAIHIPKVIIDPDGNINKEKYIKLVRDYYKESDLIDEKGDIKTYYFRFRAFRNDIIYDTCTQMPQKFNIGSIVNQKLELKHIYNFSYNEIYGDMLANKKMIEEQFNLKNKYNNALNARLFKDIVPDQMIDYCLDNLIVIEDRKRLEASVRKFLKTHMNNFWEYLESLAFVGLVINRPCTPKEFYGQYKPVVNNLNIKPKDIHDSKNDTEYVKLKYSILGIRYWKTKDGLQIAGPNRAVNQYSKIRKEKFSWQICREVIK

SEQ ID NO: 18382 - protein, 1355 aa, unidentified
  REGION 1..1355: note = Cas Enzyme sequence
MEGVTMNNKYVLGLDIGITSIGWSIIDEVKGKLLDMGVHMFEQATPAQEARLNRSARRTLRRRNWRKKQLKNAFIEFGLISKEEMNQRDYLSYTANSDTFTRPEEDTVYHLRLKALNDKVSLRELLLCLYNICGTRGHFLMENINFASSEPITFEFFVEQFYEFTHAYVNFEEDTKEFEQTILKPIFEKGKVKSNELKSLLKDEYTVEAEDNDALLEILKLICGFKCDLKKISESVVLVQEDKTKESVKLDELLQLDNLNEFLNNAVELHDVIAVSQILKDHNYICEVAVEKLNEVLKIQKLEHSDPDKYKEEKNNIQKKMSKAIGDRLRVVKNMENKYPNGLYVKEASDILHKQQEFYPNLITDNFIEACISTIKARIPYYIGPLSSQAKNSWIDRKDGTFKYGYDYCKDALVNEEESIQNWKLNMISHCTYLPEEYALPKGSFIAETFSLLNELNILTAIDKDENRYYLTREDKLKVFDELFLKRTDYVSHKEVAELLDLKSFGPKDSHKAGKFKNRYTLYQNIISVFPQFELHSIIDLFNENEKEKVNKIEDIILNLNLFDEEQSKVNYFTKKLNLDNDDAKKLARCKSNGFYAFSKQFIMETKMNVDGETLLEEMLRDNSENQKNEQMTLITEATDLDGNRINFDSNKYMTLLKDTKKLSIDLLIQDGKPFIPIARPVIRALNECFKLYEEVVNTYGVPDRVVIETARDLKDSAHDGDEPAKHFDQMKNLYDYLTKQIKERKDNAKISKQYLEDWDVIQPYLEKNKRKVELYIRQNGRDMVTGDEIDIQKLEDYEMDHILPRGFGDNSMDNLMLIKKEINGKKADRLPLEYIEAETVTNKAGKRIISSDFKRRCYELNEMKLISDKKLKRLLLASTDEAMGFINRNLVDTRYIIRELMAILRAYNQVNNYDTHIVSLRSSFTTVYRNAFNMKKNRDIGDQHHAHDASIVAIADMVLSTYYPNYDERGNNKYYQEFLKRMKETQDPDRDKSENQKLYGFIKYAYFKRFGNYPNDNDSLVSQVRAMVPLYSVKAEKNYKGAFFDATIYPQMDKKKNIPREKGVLGLLGVNNDKRIYSSINCVAVDFYKYTDKKGKKVHVGIHIPKVIVNNNGEINKEQYVKLIRDYYKVPELLDENGNVKECYFRMRVFKNDLIYDTNNYTIQKFNIGSIVNKKLEMKHLYVFSYDEIYKQVYFYKKELAGQFDFKLPKINPDGKKKFSDYKISEIISYCVDNLMDIRDLNRYKGTIEKILKEKTNYQEFLETMAYLDLIVNRNCTPPTIVGQYLPVAGSIDDKTDKENKAQYIKIKSSILGIRYTYNENGKLLISGPRKAPGKYSKIKKEKFSWKICSNVLQ

SEQ ID NO: 18383 - protein, 1345 aa, unidentified
  REGION 1..1345: note = Cas Enzyme sequence
MDNKYVLGLDIGITSIGWSIIDEVKGKLLDMGVHMFEQAIPAQEVRLNRSARRTLRRRNWRKKQLRNAFVEFGLISKEEMNQRDYLSYTANSDTFSRPEEDTVYHLRLKALNDKVSLRELLLCLYNICGTRGHFLMENINFASSEPITFDFFVEQFYEFTHAYVNFTENTKEFEKTILKPIFEKGKVKSNELKSLLKDEYTVEAEDNDALLEILKLICGFKCDLKKISESVVLVQEDKTKESVKLDELLKMDSLNEFLNNAVELHDVIAVSQILKDHNYICEVAVEKLNEVLKIQKLEHSDPDKYKEEKNNIQKKMSKAIGDRLRVVKNMENKYPNGLYVKEASDILHKQQEFYPDLITDNFIEACISTIKARIPYYIGPLSSQAKNSWINRKDGTFKYGYEYCKDALVNEEEGIQNWKLNMISHCTYLPEEYALPKGSFIAETFSLLNELNVLTAIDKDENRYYLTREDKLKVFDELFLKRTDYVSHKEVAELLNLKSFGPKDSRKEGKFKNRYTLYQNIISVFPQFELHSILDLFNENEKEKVDKIEDIILNLNLFDEEQSKINYFTKKLNLDEKDAKKLARCKSNGFYAFSKQFIMETKMNVDGETLLEEMLRDNSENQKNEQMTLITEATDLDGNRINFESNKYMTLLKNTKKLSIDLLIQDGKPFIPIARPVIRALNECFKLYEEVVNTYGVPDRVVIETARDLKDSAHDGDEPAKHFDQMKNLYDYLTKQMKEQKDNAKISKQYLEDWDVIESYLEKNKRKVELYIRQNGRDMVTGDEIDIQKLEDYEMDHILPRGFGDNSMDNLMLIKKEINGKKADRLPLEYIEAETVTNKAGKRIISSDFKRRCYELNGMKLISDKKLKRLLLASTDEAMGFINRNLVDTRYIIRELMAILRAYNTVNNYDTHIVSLRSSFTTVYRNAFNMKKNRDIGDQHHAHDASIVAIADMVLSTYYPNYDERGNNKYYQEFLKRMMESQGPDSDKSENQKLYGFIKYAYFKRFGNYPNDNDSLVSQVRATVPLYSVKAEKNYKGAFFDATIYPQMDKKKNILREKGVLGLLGVNNDKRIYSSINCVAVDFYKYTDKKGKKVHVGIHIPKVIVNNNGEINKEQYVKLIRDYYKVPELLDENGDVKECYFRMRVFKNDLIYDTNNYIIQKFNIGSIVKNQLQLDHIYVFSYDEIYKQVIFYKKELATQFDFKMAKINPEGKKKFSDYKIEKIVDYCIDNLMDIRDIERYRNGVYELLKKQEKYQKFLETMAFLQLIVNRKRTWPKVICQYVPRINTDMESESYYIKIKSSILGIRYTYNENGKLLISGPRKAPGKYSKIKREKFSWKICSDVLQ

SEQ ID NO: 18384 - protein, 1350 aa, unidentified
  REGION 1..1350: note = Cas Enzyme sequence
MDNKYVLGLDIGITSIGWSIIDEVKGKLLDMGVHMFEQATPAQEARLNRSARRTLRRRNWRKKQLKNAFVEFGLISKEEMNQRDYLSYTAHSDTFTRPEEDTVYHLRLKALKEQVSLRELLLCLYNICGTRGHFLMENINFTSSEPITFEFFVEQFYEFAHAYVNFEEDTKEFEQTILKPIFEKGKVKSNELKSLLKDEYTVEAEDNDALLEILKLICGFKCDLKKISESVVLVQEDKTKDSVKLDELLKMDSLNEFLNNAVELHDVIAVSQILKDHNYICEVAVEKLNEVLKVQKLEHSDPDKYKEEKNNIQKKMSKAIGERLRVVKNMENKYPNGLYVKEASDILHKQQEFYSNLITDNFIEACISTIKARIPYYIGPLSSQAKNSWIDRKDGTFKYGYDYCKDALVNEEESIQNWKLNMISHCTYLPEEYALPKGSFIAETFSLLNELNILTAIDKDENRYYLTREDKLKVFDELFLKRTDYVSHKEVAELLNLKSFGPKDSRKEGKFKNRYTLYQNIISVFPQFELYSILDLFDENEKEKVNKIEDIILNLNLFDEEQSKVNYFTKKLNLDNEDAKKLARCKSNGFYAFSKQFIMETKMNVDGETLLEEMFRDNSENQKNEQMTLITEATDLDGNRINFDSNKYMTLLKDTKKLSIDLLIQDGKPFIPIARPVIRALNECFKLYEEVVNTYGVPDRVVIETARDLKDSAHDGDEPAKHFDQMKNLYDYLTKQMKEQKDNAKISKHYLEDWDVIQPYLEKNKRKVELYIRQNGRDMVTGDEIDIQKLEDYEMDHILPRGFGDNSMDNLMLIKKEINGKKADRLPLEYIETETVTNQAGKRIISSDFKRRCYELNGMKLISDKKLKRLLLASTDEAMGFINRNLVDTRYIIRELMAILRAYNTVNNYDTHIVSLRSSFTTVYRNAFNMKKNRDIGDQHHAHDASIVAIADMVLSTYYPNYDERGNNNYYQEFLKRMMKSQGPDSDKSENQKLYGFIKYAYFKRFGNYPNDNDSLVSQVRAMVPLYSVKAEKNYKGAFFDATIYPQMDKKKNIPREKGVLGLLGVNNDKRIYSSINCVAVDFYKYTDKKGKKVHVGIHIPKVIVNNNGEINKEQYVKLIRDYYKVPELLDENGNVKECYFRMRVFKNDLIYDTNNYTIQKFNIGSIVNKKLEMKHLYVFSYDEIYKQVYFYKKELAGQFDFKLPKINPDGKKKFSDYKISEIISYCVDNLMDIRDLNRYKGTIEKILKEKTNYQEFLETMAYLDLIVNRNCTPPTIVGQYLPVAGSIDDKTDKENKAQYIKIKSSILGIRYIYNENGKLLISGPRKAPGKYSKIKKEKFSWKICSDVLQ

SEQ ID NO: 18385 - protein, 1355 aa, unidentified; identical to SEQ ID NO: 18237
  REGION 1..1355: note = Cas Enzyme sequence

SEQ ID NO: 18386 - protein, 1354 aa, unidentified
  REGION 1..1354: note = Cas Enzyme sequence
MNNKYVLGLDIGITSIGWSIIDEVKGKLLDMGVHMFEQATPAQEARLNRSARRTLRRRNWRKKQLKNAFIEFGLISKEEMNQRDYLSYTANSDTFTRPEEDTVYHLRLKALNDKVSLRELLLCLYNICGTRGHFLMENINFASSEPITFEFFVEQFYEFTHAYVNFEEDTKEFEQTILKPIFEKGKVKSNELKSLLKDEYTVEAEDNDALLEILKLICGFKCDLKKISESVVLVQEDKTKDSVKLDELLKMDNLNEFLNNAVELYDVIVVSQILKDHNYICEVAVEKLNEVLKVQKLEHSDPDKYKEEKKIIQSKMSKAIGERLRVVKNMENKYPNGLYVKEASDILHKQQKFYPNLITDNFIEACISTIKARIPYYIGPLSSQAKNSWIDRKDGTFKYGYDYCKDALVNEEESIQNWKLNMISHCTYLPEEYALPKGSFIAETFSLLNELNILTAIDKDENRYYLTREDKLKVFDELFLKRTDYVSHKEVAELLNLKSFGPKDSRKEGKFKNRYTLYQNIISVFPQFELHSILDLFDENEKEKVNKIEDIILNLNLFDEEQSKINYFTKKLNLDEKDAKKLARYKSNGFYAFSKQFIMETKMNVDGETLLEEMLRDNSENQKNEQMTLITEATDLDGNRINFDSNKYMTLLKDTKKLSIDLLMQDGKPFIPIARPVIRALNECFKLYEEVVNTYGVPDRVVIETARDLKDSAHDGDEPAKHFDQMKNLYDYLTKQMKEQKDNAKISKQYLEDWDVIQPYLEKNKRKVELYIRQNGRDMVTGDEIDIQKLEDYEMDHILPRGFGDNSMDNLMLIKKEINGKKADRLPLEYIEAETVTNQAGKRIISSDFKRRCYELNGMKLISDKKLKRLLLASTDEAMGFINRNLVDTRYIIRELMAILRAYNTVNNYDTHIVSLRSSFTTVYRNAFNMKKNRDIGDQHHAHDASIVAIADMVLSTYYPNYDERGNNKYYQEFLKRMMESQGPDSDKSENQKLYNFIRYAYNKRFGNFPNDNDSLVSQARATVPLYSVKAEKNYKGAFFDANELPRYDTKGNEKKLGVLGILGVNKDGRIYNKIKCVAVDFYKYTDKKGKKAYVGIQIPKVIVNENGEIDKEQYIKLIKNYYKVPELLDENGNVKEYYFRLRIFKNDLFYETETNTILKFGVGSITKKLLEPSHIYCLSYNDIYKEVYSLRKEMAVRFDFKENIVNPSGHHKFGDYAVNELFDFCLDNYMNLENPKNQRKLVSNTFNDMMKKQMNTVGKINYQWFLETIVYLNLIVNRKCSPLDRYRPGTDIVKKKNNEDAEYIKIKSSILGIRYTYNENGKLLISGPRKAPGKYSKIKKEKFSWKICSDVLQ

SEQ ID NO: 18387 - protein, 1350 aa, unidentified
  REGION 1..1350: note = Cas Enzyme sequence
MDNKYALGLDIGITSIGWSIIDVVRGKLLDMGVHMFEQAIPAQEARLNRSARRTLRRRNWRKKQLKNAFVEFGLISKEELNQRDYLSYTANSDTFSRPEEDTVYHLRLKALKEQVSLRELLLCLYNICGTRGHFLMENINFASSEPITFEFFVEQFYEFTHAYVNFEENTKEFEQTILKPIFEKGKVKSNELKSLLKDEYTVEAEDNDALLEILKLICGFKCDLKKISESVVLVQEDKTKESVKLDELLKMDNLNEFLNNAVELHDVIAVSQILKDHNYICEVAVEKLNEVLKVQKLEYSDPDKYKEEKKIIQSKMSKAIGERLRVVKNMENKYPNGLYVKEASDILHKQREFYPDLITDDFIEACISTIRARIPYYIGPLSSQAKNSWINRKDGTFKYGYEYCKDALVNEEESIQNWKLNMISHCTYLPGEYALPKGSFIAETFNLLNELNILTAIDKDENRYYLSREDKLKVFDELFLKRTDYVSHKEVAQLLDLKSFGPKDSHKAGKFKNRYTLYQNIISVYPQFELHSIIDLFDENEKEKVNKIEDIILNLNLFDEEQSKINYFTKKLNLDENDAKKLARCKSNGFYAFSKQFIMETKMNVDGETLLEEMFRDNTENQKNEQMTLITEATDLDGNRINFDSNKYMTLLRDTKKLSIDLLIQDGKPFIPIARPVIRALNECFKLYEEVVNTYGVPDRVVIETARDLKDSAHDGDEPAKHFDQMKNLYDYLTKQMKEQKKKAKLSKQYMEDWDVIEPYLEKNKRKVELYIRQNGRDMVTGDEIDIQKLENYEMDHILPRGFGDNSMDNLMLIKKEINGKKADRLPLEYIEAETVTNKAGKRIISSDFKRRCYELNEMKLISDKKLKRLLLATTDEAMGFINRNLVDTRYIIRELMAILRAYNQVNNYDTHIVSLRSSFTTVYRNAFNMKKNRNIGDQHHAHDASIVAIADMVLSTYYPNYDERGNNKYYQEFLKRMKETQEPDSDKSENQKLYNFIRYAYNKRFGNFPNDNDSLVSQVKATVPLYSLKAEKNYKGAFFDATIYPQKDKKKNIAREKGVLGLLGVNNDKRIFSSINCVAVDFYKYTDKKGKKVHVGIHIPKVIVNNKGEINKEQYIKLIRDYYKVPELLDENGNVKECYFRMRVFKNDLIYDTNNYTIQKFNIGSIVNKKLEMKHLYVFSYDEIYKQVYFYKKELAGQFDFKMPKINSDGKKKFSDYKITEIIGYCLDNLMDIRDMHRYKGTVEKILKDKTNYQEFLETMAYLDLIVNRNCTPPTIVDRYIPVAGSIDDKTDTENRAQYIKIKSSILGIRYTYNENGKLLISGPRKAPGKYSKIKKEKFSWKICSDVLQ

SEQ ID NO: 18388 - protein, 1350 aa, unidentified
  REGION 1..1350: note = Cas Enzyme sequence
MDNKYVLGLDIGITSIGWSIIDEVRGKLLDMGVHMFEQATPAQEARLNRSARRTLRRRNWRKKQLKNAFIEFGLISKGEMNQRDYLSYTANSDTFSRPEEDTVYHLRLKALNDKVSLRELLLCLYNICGTRGHFLMENVHFASSEPITFDFFVEQFYEFTHAYVNFTENTKEFEKTILKPIFEKGKVKSNELKSLLKDEYTVEAEDNDALLEILKLICGFKCDLKKISESVVLVQEDKTKESVKLDELLKLDNLNEFLNNAVELHDVIAVSQILKDHNYICEVAVEKLNEVLKIQKLEHSDPDKYKEEKNNIQKKMSKAIGDRLRVVKNMENKYPNGLYVKEASDILHKQQEFYPDLITDNFIEACISTIKARIPYYIGPLSSQAKNSWINRKDGTFKYGYEYCKDALVNEEESIQNWKLNMILHCTYLPEEYALPKGSFIAETFSLLNELNILTAIDKDENRYYLTREDKLKVFDELFLKRTDYVSHKEVAELLNLKSFGPKDSRKEGKFKNRYTLYQNIISVFPQFELHSILDLFNENEKEKVDKIEDIILNLNLFDEEQSKINYFTKKLNLDEKDAKKLARCKSNGFYAFSKQFIMETKMNVDGETLLEEMLRDNSENQKNEQMTLITEATDLDGNRINFESNKYMTLLKDTKKLSIDLLIQDGKPFIPIARPVIRALNECFKLYEEVVNTYGVPDRVVIETARDLKDSAHDGDEPAKHFDQMKNLYDYLTKQMKEQKDNARISKQYLEDWDVIEPYLEKNKRKVELYIRQNGRDMVTGDEIDIQKLEDYEMDHILPRGFGDNSMDNLMLIKKEINGKKADRLPLEYIEAETVTNQAGKRIISSDFKRRCYELNGMKLISDKKLKRLLLASTDEAMGFINRNLVDTRYIIRELMAILRAYNTVNNYDTHIVSLRSSFTTVYRNAFNMKKNRDIGDQHHAHDASIVAIADMVLSTYYPNYDERGNNNYYQEFLKRMMKSQGPDSDKSENQKLYGFIKYAYFKRFGNYPNDNDSLVSQVRAMVPLYSVKAEKNYKGAFFDATIYPQMDKKKNIPREKGVLGLLGVNNDKRIYSSINCVAVDFYKYTDKKGKKVHVGIHIPKVIVNNNGEINKEQYVKLIRDYYKVPELLDENGNVKECYFRMRVFKNDLIYDTNNYTIQKFNIGSIVNKKLEMKHLYVFSYDEIYKQVYFYKKELAGQFDFKLPKINPDGKKKFSDYKISEIISYCVDNLMDIRDLNRYKGTIEKILKEKTNYQEFLETMAYLDLIVNRNCTPPTIVGQYLPVAGSIDDKTDKENKAQYIKIKSSILGIRYIYNENGKLLISGPRKAPGKYSKIKKEKFSWKICSDVLQ

SEQ ID NO: 18389 - protein, 998 aa, unidentified
  REGION 1..998: note = Cas Enzyme sequence
FYPNLITDNFIEACISTIKARIPYYIGPLSSQAKNSWIDRKDGTFKYGYDYCKDALVNEEESIQNWKLNMISHCTYLPEEYALPKGSFIAETFSLLNELNILTAIDKDENRYYLTREDKLKVFDELFLKRTDYVSHKEVAELLDLKSFGPKDSHKAGKFKNRYTLYQNIISVFPQFELHSIIDLFNENEKEKVNKIEDIILNLNLFDEEQSKVNYFTKKLNLDNDDAKKLARCKSNGFYAFSKQFIMETKMNVDGETLLEEMLRDNSENQKNEQMTLITEATDLDGNRINFDSNKYMTLLKDTKKLSIDLLIQDGKPFIPIARPVIRALNECFKLYEEVVNTYGVPDRVVIETARDLKDSAHDGDEPAKHFDQMKNLYDYLTKQIKERKDNAKISKQYLEDWDVIQPYLEKNKRKVELYIRQNGRDMVTGDEIDIQKLEDYEMDHILPRGFGDNSMDNLMLIKKEINGKKADRLPLEYIEAETVTNKAGKRIISSDFKRRCYELNEMKLISDKKLKRLLLASTDEAMGFINRNLVDTRYIIRELMAILRAYNTVNNYDTHIVSLRSSFTTVYRNAFNMKKNRDIGDQHHAHDASIVAIADMVLSTYYPNYDERGNNKYYQEFLKRMMESQGPDSDKSENQKLYGFIKYAYFKRFGNYPNDNDSLVSQVRAMVPLYSVKAEKNYKGAFFDATIYPQMDKKKNIPREKGVLGLLGVNNDKRIYSSINCVAVDFYKYTDKKGKKVHVGIHIPKVIVNNNGEINKEQYVKLIRDYYKVPELLDENGNVKECYFRMRVFKNDLIYDTNNYTIQKFNIGSIVNKKLEMKHLYVFSYDEIYKQVYFYKKELAGQFDFKLPKINPDGKKKFSDYKISEIISYCVDNLMDIRDLNRYKGTIEKILKEKTNYQEFLETMAYLDLIVNRNCTPPTIVGQYLPVAGSIDDKTDKENKAQYIKIKSSILGIRYTYNENGKLLISGPRKAPGKYSKIKKEKFSWKICSDVLQ

SEQ ID NO: 18390 - protein, 1040 aa, unidentified
  REGION 1..1040: note = Cas Enzyme sequence
VSTSVGLYQIGDRLRVVKNMENKYPNGLYVKEASDILHKQQQFYPNLITDNFIEACISTIKARIPYYIGPLSSQAKNSWINRKDGTFKYGYEYCKDALVNEEESIQNWKLNMISHCTYLPEEYALPKGSFIAETFSLLNELNILTAIDKDENRYYLTREDKLKVFDELFLKRTDYVSHKEVAELLNLKSFGPKDSRKEGKFKNRYTLYQNIISVFPQFELHSILDLFNENEKEKVDKIEDIILNLNLFDEEQSKINYFTKKLNLDEKDAKKLARCKSNGFYAFSKQFIMETKMNVDGETLLEEMLRDNSENQKNEQMTLITEATDLDGNRINFDSNKYMTLLKDTKKLSIDLLIQDGKPFIPIARPVIRALNECFKLYEEVVNTYGVPDRVVIETARDLKDSAHDGDEPAKHFDQMKNLYDYLTKQMKEQKDNAKISKQYLEDWDVIEPYLEKNKRKVELYIRQNGRDMVTGDEIDIQKLEDYEMDHILPRGFGDNSMDNLMLIKKEINGKKADRLPLEYIEAETVTNKAGKRIISSDFKRRCYELNGMKLISDKKLKRLLLASTDEAMGFINRNLVDTRYIIRELMAILRAYNTVNNYDTHIVSLRSSFTTVYRNAFNMKKNRDIGDQHHAHDASIVAIADMVLSTYYPNYDERGNNKYYQEFLKRMMESQGPDSDKSENQKLYGFIKYAYFKRFGNYPNDNDSLVSQVRVMVPLYSVKAEKNYKGAFFDATIYAQMDKKKNIPREKGVLGLLGVNNDKRIYSSINCVAVDFYKYTDKKGKKVHVGIHIPKVIVNNSGEINKEQYVKLIRDYYKVPELLDENGNVKECYFRMRVFKNDLIYDTNNYTIQKFNIGSIVNKKLEMKHLYVFSYDEIYKQVYFYKKELASQFDFKMPKINPDGKKNFSDYKINEIISYCVDNLMDIRDLNRYKGTLEKILKEKTNYQEFLETMAYLDLIVNRNCTPPSIIEQYKPVAGSIDDKTDKENKAQYIKIKSSILGVRYTYNENGKLLISGPRKAPGKYSKIKKEKFSWKICSDVLQ

SEQ ID NO: 18391 - protein, 1345 aa, unidentified
  REGION 1..1345: note = Cas Enzyme sequence
MDNKYVLGLDIGITSIGWSIIDEVKGKLLDMGVHMFEQAIPAQEVRLNRSARRTLRRRNWRKKQLKNAFVEFGLISKEELNQRDYLSYTANSDTFSRPEEDTVYHLRLKALNDKVSLRELLLCLYNICGTRGHFLMENINFASSEPITFDFFVEQFYEFTHAYVNFTENTKEFEKTILKPIFEKGKVKSNELKSLLKDEYTVEAEDNDALLEILKLICGFKCDLKKISESVVLVQQDKTKESVKLDELLKMDSLNEFLNNAVELHDVIAVSQILKDHNYICEVAVEKLNEVLKIQKLEHSDPDKYKEEKNNIRKKMSKAIGDRLRVVKNMENKYPNGLYVKEASDILHKQQEFYPDLITDNFIEACISTIKARIPYYIGPLSSQAKNSWINRKDGTFKYGYEYCKDALVNEEESIQNWKLNMISHCTYLPEEYALPKGSFIAETFSLLNELNILTAIDKDENRYYLTREDKLKVFDELFLKRTDYVSHKEVAELLNLKSFGPKDSRKEGKFKNRYTLYQNIISVFPQFELHSILDLFNENEKEKVDKIEDIILNLNLFDEEQSKINYFTKKLNLDEKDAKKLARCKSNGFYAFSKQFIMETKMNVDGETLLEEMLRDNSENQKNEQMTLITEATDLDGNRINFESNKYMTLLKDTKKLSIDLLIQDGKPFIPIARPVIRALNECFKLYEEIIRTYGVPDRVVIETARDLKDSAHDGDEPAKHFDQMKNLYDYLTKQMKEQKGNAKISKQYLEDWDVIESYLEKNKRKVELYIRQNGRDMVTGDEIDIQKLEDYEMDHILPRGFGDNSMDNLMLIKKEINGKKADRLPLEYIEAETVTNKAGKRIISSDFKRRCYELNGMKLISDKKLKRLLLASTDEAMGFINRNLVDTRYIIRELMAILRAYNTVNNYDTHIVSLRSSFTTVYRNAFNMKKNRNIGDQHHAHDASIVAIADMVLSTYYPNYDERGNNKYYQEFLKRMMESQGPDSDKSENQKLYGFIKYAYSKRFGNYPNDNDSLVSQVRATVPLYSVKAEKNYKGAFFDATIYPQMDKKKNILREKGVLGLLGVNNDKRIYSSINCVAVDFYKYTDKKGKKVHVGIHIPKVIVNNNGEINKEQYVKLIRDYYKVPELLDENGNVKECYFRMRVFKNDLIYDTNNYTIQKFNIGSIVKNQLQLDHIYVFSYDEIYKQVIFYKKELATQFDFKMAKINPEGKKKFSDYKIEKIVDYCIDNLMDIRDIERYRNGVYELLKKQEKYQKFLETMAFLQLIVNRKRTWPKVICQYVPRINTDMESESYYIKIKSSILGIRYTYNENGKLLISGPRKAPGKYSKIKREKFSWKICSDVLQ

SEQ ID NO: 18392 - protein, 1360 aa, unidentified
  REGION 1..1360: note = Cas Enzyme sequence
MEGIKMDNKYVLGLDIGITSIGWSIIDEVKGKLLDMGVHMFEQATPAQEARLNRSARRTLRRRNWRKKQLRNAFVEFGLISKEEMNQRDYLSYTANSDTFSRPEEDTVYHLRLKALNDKVSLRELLLCLYNICGTRGHFLMENINFASSEPITFDFFVEQFYEFTHAYVNFTENTKEFEKTILKPIFEKGKVKSNELKSLLKDEYTVEAEDNDALLEILKLICGFKCDLKKISESVVLVQEDKTKDSVKLDELLKLDNLNEFLNNAVELHDVIAVSQILKDHNYICEVAVEKLNEVLKVQKLEHSDPDKYKEEKKIIQSKMSKAIGERLRVVKNMENKYPNGLYVKEASDILHKQQQFYPDLITDNFIEACISTIKARIPYYIGPLSSQAKNSWINRKDGTFKYGYEYCKDALVNEEESIQNWKLNMISHCTYLPEEYALPKGSFIAETFSLLNELNILTAIDKDENRYYLTREDKLKVFDELFLKRTDYVSYKEVAQLLDLKSFGPKDSHKAGKFKNRYTLYQNIISVFPQFELHSIIDLFDENEKEKVNKIEDIILNLNLFDEEQSKVNYFTKKLNLDNEDAKKLARCKSNGFYAFSKQFIMETKMNVDGESLLEEMFRDNSENQKNEQMTLITEATDLDGNRINFASNKYMTLLNDSKKLSIDLLMQDGKPFIPIARPVIRALNECFKLYEEVIRTYGVPDRVVIETARDLKDSSQDGDVPAKHFDQMKKLYDYLNDQMKEQKKKAKLSKQYMEDWDVIEPYLEKNKRKVELYIRQNGRDMVTGDEIDIQKLENYEMDHILPRGFGDNSMDNLMLIKKEINGKKADRLPLEYIEAETVTNKAGKRIISSDFKRRCYELNEMKLISDKKLKRLLLATTDEAMGFINRNLGDTRYIIRELMAILRAYNQVNNYDTHIVSLRSSFTTVYRNAFNMKKNRNIGDQHHAHDASIVAIADMVLSTYYPNYDECGNNKYYQEFLKRMKETQEPDSDKSENQKLYNFIRYAYNKRFGNFPNDNDSLVSQVKATVPLYSLKAEKNYKGAFFDATIYPQKDKKKNIAREKGVLGLLGVNNDKRIYSSINCVAVDFYKYAKKNGRKAYVGIQIPKLIVNNNGEINKEQYVKLIKDYYKVPELLDENGNVKEYYFRMRVFKNDLFYETESNTILKFGIGTITRKILEPSHVYCFSYNDIYKDLNYLKRELADKFDFKEYIVNPTGHHKFTDYTIDELLEFCLDNYLDFDNPEKQTKLVVNKFMEMMNKQKSKEGKIGYQWFLETIVYLNLIVNRECSPLDRYRPGTDIVKKKNNEDAQYIKIKSSILGIRYTYNENGKLLISGPRKAPGKYSKIKKEKFSWKICSDVLQ

SEQ ID NO: 18393 - protein, 1137 aa, unidentified
  REGION 1..1137: note = Cas Enzyme sequence
MNNNNLTVAFDIGKASTGVAVSDGYHIIYMGSHVFNEAKEAKDPRNNRSARRNKTRKNWRKGQLIDAFDDFNVISKAEIKQKGYLSFTAKGKNFSRPIDKTIYHLRKRALESQVNKRELFLCLYHILHARGHFLLETVDFSKKEPINFNDFKAAFYATTEDFFIISDENKIIFEKEILKTVFYEKLNSNDIKALCENAKFTFNNDTDKDALLETIKFICGYKAKIKKINPNFDFEKDTYDIAMIKAMEDEVPEFFSSIVELNDMIRIFRILKDHNYLCEVAIEKLDNFDKLVKDQKSEEFLALKKQIENSSKSKSHLRVVRNLENGYPNGLYVKEVKEILHTQQKYYPEITDEFIEVCESIISARIPYYIGPLNENAKNGWVVKNNNFKYSYDYSVKHLNAVDVQESIKKWKERMISHCTYCPDEFALPKGSLIAETVSILNELNVLKAIDLDENQYYLTYQDKVNIINTLFLNGNIVSQNDIATLLNLKSFGTKKNLEKVRKLNNRYTLYPQIARLIPELKLQSIEEVFSNSEKIDEIEDIILSINLYNEEKSKRDYFVKKGYSSTIAKGLSKLTSKSFFSFSRKFVLNQPFDEYGDSLLTLLFEDNTNKYTNEQMTLISRAVDENGKPIDFSSNKYEKLLKENNGQLNINLLIKNGSPVIPISRSVIRGLNEAMKMYTELVKVYGVPKRVVIETARDLKDHTVVKEQQAYHTDNAKNLYAHLEKQIKENKKYHLTLDVDNWEELKAYEEQNKVKIELYIRQNGRDLLTGEKIILNDLDNYEIDHILPKGFGDDSMDDKMLISKIANAKKGDRLPLEFIESGESINEHVITSSSFIKRVEMLYDMKLISEQKRKRLLLESSNDLEEFINQNLVDTRYIIREFMSILNAYNHYHQYDTRVVSLRAAYTNLYRKAFRFDKVRDYGDQHHAHDAAILIVADKTLSTYYPHYDERKHGEEKFKSYHQFIKDMLSNDEKTKTDLISFIQYMFYKAYEVSWNSPLSIISEIKETVPYYSNKVEKNYMGQFFDINSLKQKKDKNSNTSVLSLLGINNDKRFYSGVNCAAVDFYKYTDKKGNKVNVAIQIPKVIVNSKGQIDKEKYLLLVKDFYKATQLLDENSELITGYFRFRAFENDIIYNT

SEQ ID NO: 18394 - protein, 1186 aa, unidentified
  REGION 1..1186: note = Cas Enzyme sequence
MEGNISYAIGIDVGLNSVGLAAIRLDNNGEPIRILKAMSVIHDAGIDPNGAKESDTRKAISGVARRVRRLYRQRRRRLQKLDFLLHSLGFPVVENKDLDFSDSFTPWIFRAKLADEYIADEKQRKQMLSVAIRHIARHRGWRNPYQSIKSMTQETEYSEFYNELLKNIEKFAPGVSCEGSTPAQLVRDYLLSQQGKASRRLRITTDDRRKNHPNSLDPVLPRKLMQSDNMLEILNIFNVQHIDNKYVREQIINAVFYAKSPRGSAENRVGKDAITGKGKRALKASLAFQKYRIISTISNLRIRENSKERCLTIEEKQSVYKLLTTSTDESSKEKSAEAPLYTWIDVADCLGIERYKLRGVGSQIEDGESVGNRPPMLNSELAILYANAKSLKQSLITWWLAANRTQEDKEALIEILSNTVDIEAIHDNPEYQDKYGSAIAFIDSMDETEIAALENISLPDGRAAYSLETLDKLNKQMLETDDDLFEARKKLFNLPNNWRPSEAPIAEPTGNPSVDRVLKIVHRFLISAKNRWGNPERINIEHVRSGFQSKKMANSYKELLDKRTKGKENLKAMMRNSLHLGTSDSISDADIRRYEAVQRQNGQCLYCGSEITYNTCELDHIVPRKGPGSTNTRENLVATCSSCNAQKCNTPFATWCEQSTYCKNHDISVDSAINRVRAFIFPPNSYDKRGASQFKKEVISRLKQKVGDEAFDNRSIESVAWMANELHRRIDWYYNSQNYQTNNGISDISNKAKTNVGVYAGSLTAIARRMSGIDGKLEFFDGRRKTRFDRRHHAVDASVIAMMTPGIAQILAIKCNLRETQLLQGNKVVPGGIDWKEYPTANDQGYQQYANWSVRMNALLKLLNEEMRADRIAVVNSIRLRYSNSSVHKYEVHALLKLHVGDEIDSKTIRRASTPALYCALTRNPDYDVNNGLPENPDRTILLHNKKLNADDSITFFEAQAAQLFVREGSVEIGNSTHHLRIYEYFKKLKSGKVQKSYGMIRVFQNDLHRHIHEDLFSCDLPEQSISMRYADTEVAHAVQAGNANYLGYLVPGDEIIVDFSHAKLSGYIGDFVEFLNKIGADCTAYKHWVVVGTDTEKVLILKPSMISSEGIDKLYSNCKRNNFDYSSYEKSINEILVGKGWRVSVNVLAKYNAETIRRNALGEPRWTSHSHLPISWSWNTGENRE

SEQ ID NO: 18395 - protein, 1190 aa, unidentified
  REGION 1..1190: note = Cas Enzyme sequence
MILYMEGNISYAIGIDVGLNSVGLAAIRLDNNGEPIRILKAMSVIHDAGIDPNGAKESDTRKAISGVARRVRRLYRQRRRRLQKLDFLLHSLGFPVVENKDLDFSDSFTPWIFRAKLADEYIADEKQRKQMLSVAIRHIARHRGWRNPYQSIKSMTQETEYSEFYNELLKNIEKFAPGVSCEGSTPAQLVRDYLLSQQGKASRRLRITTDDRRKNHPNSLDPVLPRKLMQSDSMLEILNIFNVQHIDDKYVREQIINAVFYAKSPRGSAENRVGKDAITGKGKRALKASLAFQKYRIISTISNLRIRENSKERCLTIEEKQSVYKLLTTSTYESSKEKGSEAPLYTWIDVADCLGIERYKLRGVGSQIGDGESVGNRPPMLNSELAIIYANNKSLRQSLLTWWLDANRTQEDKEALIEILSNTVDIEAIHDNPEYQDKYGSAIAFIDSMDETEIAALENISLPNGRAAYSLETLNELNKQMLETDDDLFEARKKLFNLPNNWRPSEAPIAEPTGNPSVDRVLKIVHRFLISAKNRWGNPERINIEHVRSGFQSKKMANSYKKLLDERTKGKENLKAMMRNSLHLGTSDSISDADIRRYEAVQRQNGQCLYCGSEITYHTCELDHIVPRKGPGSTNTRENLVATCSSCNAQKCNTPFATWCEQSTYCKNHDISVDSAINRVSAFIFPPNSYDKRGANQFKKEVITRLKQKVGDEAFDNRSIESVAWMANELHRRIDWYYNSQNYQTNNGISDISNKAQTNVGVYAGSLTAIARRMSGIDGKLEFFDGRRKTRFDRRHHAVDASVIAMMTPGIAQILAIKRNLRETQLLQGNKVVPGGIDWREYPTANDQGYQQYANWSVRMNALLKLLNEEMRADRIAVVNSIRLRYSNSSVHQYKVNALLKLHVGDEIDSETIRRASTPALYCALTRNPDYDVNNGLPENADRTILLHDKKLNADDSITFFKAQAAQLFVREGSVEIGNSIHHLRIYECFEKLKSGKIKKSYGMIRVFQNDLHRHIHEDLFSCDLPEQSISMRYADTKVAHAVQTGNANYLGYLVPGDEIIVDFSHVKLSGYIGEFVEFLNKIGANCAAYKHWVVAGTDDKTILILKPSMISSEGIDKLYSNCKRNNFDYSSYEKSINEILVGKGWRVSVNVLAKYNAETIRRNALGEPRWTSHSHLPISWSWDTRENRE

SEQ ID NO: 18396 - protein, 1539 aa, unidentified
  REGION 1..1539: note = Cas Enzyme sequence
MARILGLDLGTNSIGWAVIDATLKDGKVECYRSVIDSGVRIFPEGVEPTTIGQGDKEQSKNATRREHRQMRRQFFRKKLRKVKLLEALIQLSMCPLSTEGLYRWSKWQRSLKTNGQQFPSEPDFVEWLKLNPYELRAKALNEPISLHELGRIFYHFIQRRGFLSSRKGSDDGAIYKGKENMSGIDSTRQLMNGQTLGKALHDISYKTGEKYHNKTDDEGKALRVRARYTQRDMYINEFLKIWEQQAPRLGLDRQNMPVRKVRFLKGSLESPRNQHKLAKYKEKYGADNLLIKGNKVTSIAKVPLKEYFAGEIDERDGQLKFKSNESLLFWQRPLRSQKNLLDNCRFENNRPVLMANGQYRMKNGKVVLRSKKPCPLSHPEFELFRAYQFINNIRYGKGQKLTTEQRQLVLELMNSKDGNFNFEEIPKALKLTYEKFNYDNDQKIAGNTTIKKLNALFPDEVWSRNYEAIWHCFYFYDDNEQLFAKLKKDFQLKVNDPDKISKIRLKDGYSNVSLKAIRNINPFLAKGHLYADAVVLGGVKNAFGQRWENFEMYRDEIEQAVCQILREDNKEGEAIEKIKDWLASPVNSYGFAKADPAFSQLYHHSQEISEQEQQAFVPELENLRNPIVQQALQEMRRLVNSLLKKYREIEPGFLFDRIHVEMGRDLKNNKTKRQELTRNIRDNEKKNDDARKRLEEFGLRPTRDNLLRYLLYDEIQTHVSGPVLCPYTGKVISMADLIGGGNTVQIEHMIPYSVSLDDSFGNKTLCEANFNRMKGEKTPYEFYLVNPDYKLWGINKYKDLEDGWKEISERAFKVLPYRKAKRFTLKKKIEKADFIERQLNDTRYISRKAVELLLAICRDVRMLPGQVTAELRHLWGINNILNPVLGIENFKAEVRGNERLPYYVLTDEDSRVLAIQRKTNDRPASEAEQLVLTGAVDKGTFSSKYLRMKIDAPNLKDGEYWAVVNVSEPHSFQAVYAEKPIGDEQHLVFKGRIEKQFFTNDTIGKRIKAEGKEEGAYWASFSIKGQEFKLAEGKGKLKTTGSTIALFGEIRNGQFSCHIYQCETNLPDGKYWALLELDFEQVDYVRTVNPKPEATERQLMSYATVDEDAYMAADPDPGYRRKVNEPEGRYYCLFDIESVEQTLYPMENEAPVPEKGQRLTEATVWVDKATGEIKYDPKKNRDDHRHHAIDAITVALTEQGFLQRLSTYHAQEENEKRGIDSTEKFPEPWPGFTDDVKKAAEGMFISYKQNNKVLTKISKTVAKNGEAHRSVGFAARGQLHKETVFGRRKAPGQAEHSFHIRKDITGLKDKKQINKVVDDTIRKHILNHLRDNCGVDISKPNFTVPKDAFFKDGQYRLFLPNRKGGEPVPVKKVRMREIVSNAELLKKDINQYVNPRNNHHIIIFEKEDSTLDKDIVSFLKVVERQLNHQPTYQLPAEGEKLIYTFEANDMFLLGLTDDEYDVYRDEVSELSKHLYRVQKIAGGSYFFEICFRHHTDSRKDQDAKQDYKYIKGFGTGTTGWQTFNPIKVTIDPLGNIKRI

SEQ ID NO: 18397 - protein, 1284 aa, unidentified
  REGION 1..1284: note = Cas Enzyme sequence
MPVRKVRFLKGSLESPRNQHKLAKYKEKYGADNLLIKGNKVTSIAKVPLKEYFAGEIDERDGQLKFKSNESLLFWQRPLRSQKNLLDNCRFENNRPVLMANGQYRMKNGKVVLRSKKPCPLSHPEFELFRAYQFINNIRYGKGQKLTTEQRQLVLELMNSKDGNFNFEEIPKALKLTYEKFNYDNDQKIAGNTTIKKLNALFPDEVWSRNYEAIWHCFYFYDDNEQLFAKLKKDFQLKVNDPDKISKIRLKDGYSNVSLKAIRNINPFLAKGHLYADAVVLGGVKNAFGQRWENFEMYRDEIEQAVCQILREDNKEGEAIEKIKDWLASPVNSYGFAKADPAFSQLYHHSQEISEQEQQAFVPELENLRNPIVQQALQEMRRLVNSLLKKYREIEPGFLFDRIHVEMGRDLKNNKTKRQELTRNIRDNEKKNDDARKRLEEFGLRPTRDNLLRYLLYDEIQTHVSGPVLCPYTGKVISMADLIGGGNTVQIEHMIPYSVSLDDSFGNKTLCEANFNRMKGEKTPYEFYLVNPDYKLWGINKYKDLEDGWKEISERAFKVLPYRKAKRFTLKKKIEKADFIERQLNDTRYISRKAVELLLAICRDVRMLPGQVTAELRHLWGINNILNPVLGIENFKAEVRGNERLPYYVLTDEDSRVLAIQRKTNDRPASEAEQLVLTGAVDKGTFSSKYLRMKIDAPNLKDGEYWAVVNVSEPHSFQAVYAEKPIGDEQHLVFKGRIEKQFFTNDTIGKRIKAEGKEEGAYWASFSIKGQEFKLAEGKGKLKTTGSTIALFGEIRNGQFSCHIYQCETNLPDGKYWALLELDFEQVDYVRTVNPKPEATERQLMSYATVDEDAYMAADPDPGYRRKVNEPEGRYYCLFDIESVEQTLYPMENEAPVPEKGQRLTEATVWVDKATGEIKYDPKKNRDDHRHHAIDAITVALTEQGFLQRLSTYHAQEENEKRGIDSTEKFPEPWPGFTDDVKKAAEGMFISYKQNNKVLTKISKTVAKNGEAHRSVGFAARGQLHKETVFGRRKAPGQAEHSFHIRKDITGLKDKKQINKVVDDTIRKHILNHLRDNCGVDISKPNFTVPKDAFFKDGQYRLFLPNRKGGEPVPVKKVRMREIVSNAELLKKDINQYVNPRNNHHIIIFEKEDSTLDKDIVSFLKVVERQLNHQPTYQLPAEGEKLIYTFEANDMFLLGLTDDEYDVYRDEVSELSKHLYRVQKIAGGSYFFEICFRHHTDSRKDQDAKQDYKYIKGFGTGTTGWQTFNPIKVTIDPLGNIKRI

SEQ ID NO: 18398 - protein, 1509 aa, unidentified
  REGION 1..1509: note = Cas Enzyme sequence
MTRIKLGLDIGTNSIGWAILEKEDKKYHFFEKKNDSGDIIPIPTRGSYIFPKGTEANEKSKAATRRGFRGARRRIDRIRLRKIATLKVLARHDLSPNFTEGELNRWKNKKVYPCDNQKFIDWQRTGKKGGDIESEKRKQPYYLRFLAATQGGLMDSQKGRHQLGRAFYHLAQRRGYKSNGDDEQTDDKLEQFKVAILKLIEEHSSCASFYEPFKVFLGTYKSEKKVDSLGKKIIKTLKKEVSFENLTEFIKNEFNKKENLGKVEGGIQELSEKIEESGMPTMGSYFYSIYAKTNEDGIIGRIRGRYTDREKHYLREFNYICDKQDITGELRNQLHDAIFYQRPLKSQKGLVAKCPFETKRKRIAISHPLFEEFRMWESINRIKIKTATDYKLRPLEAFEKKLIIRDFQQKTDFDFEKLAKKLSQEKDYRYIKDKNKLAAEVEFNFPMDKTFSACPTMAQLKKNLGKEDYSSRPLLNSGYKNEKGKYKVSIEDIWHCLFADSFGNKDKTLARKDFAKKHLPPDVDAEAFSKIKLKKGYGSLSKAAIKKILPFLREGYLYSHAVFLANISSVIGRTPLTEERKQIEEAIKKAIDEHKTEKSVNAIVNNYLERFKDNNSSLGDNPNSVWIHMNGIKKEINVWFSEEELADMDETKQLNLEKKCWEKFSVSAKEKRPKEIEFVKSRTIFEFIERSLKEIFPNDDIKIDNLYHPSAMEAYPKTDDKLGNPEISAIKNPVFNKAMHQIKRLVNKLIEEGLVDQDTEVNIELAREINSASYRRALAQYQKDQQTIREWARKKIIGCYNESVRENIIPTGDQITKYILYSEQRGRCLYTNETITPRKFFTEQKYDIEHTIPRSVLNDNSLKNKTLANADFNRNYKKDELPANLDIVFNGNQITPDVILTNRDANLRSYTISNEEVHFDVELDSLRNDLKKYKNVAKVATGDVDAHEDLMMKVHYTQLKLDYLASKYKKFELEEVPSKFTHANLVDTRIITKYARAYLNSYFKRVNVVNGQITDTLRKIWGLQGEYEEKDRSNHIHHCIDAVTVACVEKGTVNRMSEAFHKFERDYYNGNGNAKINLPEPMEDFVSTIKKLQEEIFIYHKQQDRIKPLLEELGNEKPKKLNLRGPLNSQNPYGLIQKNDQKIYVQRTPVSKISGKDIDNIVDEAIKKRLLDLADHKGWQLAIDIDLKEGEDEAAAIQKKKKELAVKIFSSLKKAKANRALIDLGVTMENMTSDFSDVQSLKAKLSETTMQNGLPREKILKYRSKVSVEVDKIIRTTGLNKLLKDSNGVIILPASLNAKQMVLKKIRLKIRNNNLYPLKERRKMDFSQKRNQEYKRDFYFDKEAGSNYEAIIYGNLLPNENGKLKREYRLINHFNIVKNVSMKEPSLPPLFKIHSGDLFLVFDKHIEEINWEDHRDIQNRLFRNVKFDENGILVFARNNYAGGDVDHAAPAKEDNLLDLNGKVLRRSPSTCRAIPTKVDELGRIDIEYSKAFIEKHSKSTSTPLEISTE

SEQ ID NO: 18399 - protein, 1410 aa, unidentified
  REGION 1..1410: note = Cas Enzyme sequence
MANKYLLGLDLGTDSVGWCLTDENYNVVHKGGKSLWGVRLFDEAKDCKERRGHRTQTRRIKRRKDRVLLLQSLFINEIKKIDKDFFQRLELSKYHFEDRNQYFNSVQTLFIDKDFNDKDYYKKYPTIYHLRKALINSKEQMDLRLIYLAIHHAIKYRGNFLSHGQKFDGMDVNELKEAFDSLNECLTLLNKPTIPFTNNSYEEIKKITKENGSISALKEALKDNLKVDDSYINKYLYPMISGGSTKVIDIYELDKEVEEDFEIKKFSFSDAEFDLNFETIQKQVDSEVHTKIIINAKKIYNYIKLDKMLDGNKYLSYVMVKKYNDHQKELKELKKYYKSLSIDKYNKMFRTYNEKIDNYVKYVGSNRINNQGQRFAKAKKEDFYKFLRKDLEIVANKDCGNEYLNRINKLMSEGTFLDKQNSVDNSIFPYQLNLIELETIIDNQSKYYSFFNEKDEDGLTIKEKIISILSFQIPYYVGPLAYNKNNPSFSWCERKIQGVKIYPWNIENIIDYEKTSEKFITRMLNRCSYFNDEFCLPKNSITFSFYNLLSELNKISINGKLITKEEKEEVIKELFMKRDVKKRDLKNYFKSKYNEDVSITTSNDKELEEIKSNLKSYIKFSSIFGEEYVLSNIDLIDKIIGDIVLFTDKKVLEQRLIKLYDIKDKDIRKQILNLNYEGYGRLSKKLLTGIRTPFENIATGEVVELSILQVMFETNQNLMEILNDNRYQFKEFIEEYNNNNNKNYSNVKEYVDTLYVNPTMKRSLIQAYRIIEELEKIIKHPIDEYYIECTRSNTQEKKKTLSRREKLIKIYEEMKKTCKDEFNRLELEEKLQLLKGDRFKDVDFRSDKLYLYFLQLGRCMYSFNPITIADVFNPSMCDIDHIIPQSILKDDSIENRVLVLQQYNKRKSDAFPIPQNILFDNHKAFYKLLKKNDFIGEKKYNNLTRLEELSISEKEQFINRQLVSTNQAVVGLIKLLKEYKHIEDKRIIYSKAENVSEFRKEFDIIKCRDINDYHHAHDAYLNIVVGRAYNAYYGFRGDMTRLKELHNSGYSLNIMRSFRNRKTITRGNEVVFDGENTIQKVRNQIYNRFDIMVTTRQYVGNILMNKVGILPAKDSKGEDGLFPLKNPKDSTKLSNVLTNTSKYGGYTSLSNGYYCLVESKDKKGNKIISIEAMQNIFVGPYDSIDKKVQYLKENKKLIDPKILIPLLRINMVIEEGKCRYCITGKSDNRLLVSNLFQCRFVYDEIKMIKKIVKFKDELLKKKLSLNSEYSRINDLFPINDNLIIVSPSKEKQNAIILSNDELNEVYSIIVNKFNKEIYDCFSVFENSRETFNNEDIINKFKSLNMYEKSFVLLELLKLIKVNRGRLDLSIIGLSSSFGQTRIQKNITKPIKIIHESVTGYYKKVIYDGTK

SEQ ID NO: 18400 - protein, 1408 aa, unidentified
  REGION 1..1408: note = Cas Enzyme sequence
MAEKYLLGLDLGTDSVGWCLTDENYHVIRKSGKSLWGVRLFDEASDASSRRQARAGRRRTLRRKERIRLLQELFAPEMNKVDPGFFQRLELSKYHFEDRKKYFDSEQTLFVDKGFTDKEYYKKFPTIYHLRKHLLESKEKEDLRFIYLAVHHIIKYRGNFLFPGSSFKVMDRESIASYFGRIDDHLRELEKTEIGYNSEAFKEIHKLIDEDASVSGVKERLIDLFNPKDVYVQKVIIPLIAGATVSIKALYELEDDEGIDIKKISFKDADADTKIENLIQGIDNENYNEILLSCKALYDAFLIGRLLKKDSHLSVAMVRRYEEHKNDLKVLKDYIREISHPLYDRIFRTYDEKLNNYPHYIGSNRVNNKGERFARCRKDDFYKFLRNELNLKANVLTGNEYLDEINKKMSDGTFLDRQNSSENGVFPMQMNMEELEIILERQSEFYPFLKEKDKDVLECKEKIVSIIKYHIPFFVGPLAYNASNPSFSWIVRKKEKIFPWNFERVVDYEKSAEAFIKRMVNRCTYLPDEFCLPKNSIIFSFYSLLSEINKISLNGHLVTAEQKKELIRDLFLKKTVTKHSLKNYFKSKYGQDVLITTSNEKELEEIHTNLKSYQTFCNIFGEDYVRSHISQIDDIIRDITLFSDKKILKNRFKREYGIEDKEILRKLSTLTYQGYGRLSKKLLTGITAPIADLNTGEVIEKNILQIMMDTNQNLMEILNNSEYPFRQMIEEEQQQERKDETIEEYVSRLYVSPGMKRPLIQAYRIIEELKTIIRHPIDSYYIECTRSNENKKERKDSRKAKLLQLYRKAMEICKKETEKSICSIRELKEKQNQIEMKEESEFRSDKLYLYYLQMGRCMYTNQSLSIEDVYNSAMCDVDHIIPQAILKDDSIENRVLVLKSANAYKSDRFPIPSNELFVGHRSFYKMLKECGFMGEKKYHNLLRSDELSSQELEQFVNRQLVYTNQAVSALVQMIRHFEHVAETDVVYSKAENVSHFRKQYDLLKSREANDFHHAHDAFLNIVVGRSLVAYYGFRMTGDKAKQYRSQNKTLNINKILSSRVIKKGDQIVWNGEETIAHVKKQIETRFDILMTTRQYVGHHLFEKVSLIPASKSKKDGLYPIKNPSDPSDIQNALKDTSKYGGYNNLANGYYCLVESEDKKGEKIVTIEAMQNIYVSPSASVDKKLKYLEEVKKLQKPKILHPLLRINFVLCDGKSKYCITGKTGDRLLIKNLNPMIIDKTSYRTIRKIEKLLNIVTKNKMDLSDPDKNGLSEKFPVCENQIIISPASNQDTKAIVLKEQEIDDLYQLLLQKMSAPIYENFSQFESLHQTLTSTEKMNQYAQLSLYQKIFMMKEFLHLFQCNRVLSDLRLMDLSKNSGALLISKVLKNQLIIQESVTGFYSKIIFDGKKR

SEQ ID NO: 18401 - protein, 1364 aa, unidentified
  REGION 1..1364: note = Cas Enzyme sequence
MAKILGLDLGTNSIGWAVVEKERDSEFKLIDKGVRIFQEGVKIEKGNEGSKAAERTAFRSARRLKYRRKLRKIEVLKILSTDGFCPSLTNKELSDWRYKKIYPQNPAFFSWQVTDDATQKNPYHYRALAIEQKFDLSKEEDRFILGRAFYHIAQRRGFLSNRQEGTKESDGAVKKSISEINKLKGDKTLGQYFSEKYKKGEKIRDVYTHREEHYLDEFNRICEFQGLNSEFVAKLKKAIFYQRPLKSQKGLVGKCVFEPNKPRCSVSRPEFEEYRMLCFVNNIKIKTPGDDHLRFLREDEIKKIIPPFYRKSKDYFDFEDLAKQLAPKQQYKYFKSRDIYPEDWLFNYSMKTTVSGCPVSARFRDLFGDNFMDLKLPYKREKDGKKSVIDIHDVWHVLFSYDSEEKLKEFAQKRLHLPEDQIKDFLKISLKKEYASLSLKAINKILPFLKAGLLYSHAVFLANMEEAIPGVIWKKEENRTIIKEEIESIIANHKDEKQISEIVNGIIKNSRVDESVWSDEASELFKKDLFKKIKAYFGERTYNSFTEEKKNQIETDAFELLKKQMKKNAGKGEFISIQRIDEKVKSFLEDNFEVEGKSLDKIYHPSAIDVYKPPVRKEDGKLYLGSPMVSSIRNPMAMRALHQLRKVVNELIKSDVIDSETRIHIEMARGLMNANERKAYQNWQRDRENQRKEYEQKIKEHLSSEKEPSETDILKYQLWEEQNHKCIYTGREIALSEFLGPNPSFDIEHTIPRSVSLDNSQENKTLCENEFNRKTKRNQIPHELANHLEIIARIEHWKEKCEELDKQIDKTDFLVKRNSDNKDLKDNFIRKRHELRFQRDYWQNKYQRFTMKDVPEGFKNSQLVDTGIITKYSRLYLNTLFDKVYTVKGSTVADFRKLWGLQDEYEKKARINHIHHCIDAITIACITKENYEKLAQFYHEFEDMKIEGITQLPRVDQPWKTFVVDVKAIENEILISHYTPDVLPKQTKKKLRTRGIIKYSFKKYLPKDFKEKQEGKDYFKIVENGIEIFKIPVYQKGDTTRGSLHQQTFYGAVEKTEVNKKGEPEKVIKYVVRKPLDLLDENGVKNIVDDRVREIVSNAKKQEKELLKQIENLLKQRRNAEENEEAEIDANVAGLKKQVAELFFLPNKNGDPVPIKKVSVYQLMVTNPLPGFKKHRDLSFKEYKQQYNVANDGNYAMAVYEGIDQKENFKRSIIMVNNFDAGKFFNGKLEESPFPDKHPRTGLFLKYLLKTGTLVMFWEKSPEELRSKTLDKVQRLYKISKMNKDGRITFKYHQEARNDENLRLDYEKEFGVKAPKSLTNGESFIDFVKPFPKLLLSPPNFNFIVENYDFKISSTGEIKWLNGD

SEQ ID NO: 18402 - protein, 1381 aa, unidentified
  REGION 1..1381: note = Cas Enzyme sequence
MSRILGLDMGTNSIGWAVRDTQAGTGLEQIIHKGSVIFDKGVGELKGKEFSLAAERTKHRSARRRSQRKRWRKIDLLSILIEHGMCPLSVDELARWKDPKRKATRKYPDSQEFKTWLRLDFDNNGVPDYANPYALRAEALIRRLSLQEIGRLAYHMNQRRGYLSNRSDKAQDAFDTEPDEEETSSRPVTSRRLGKIAGAIKELEDRLDGHTIGQKLHEAIKAGDRARRRTDEGTNISRLTLQAEFLKIAEFQLLPTQLTERIRRTIFDQRPLRSQKATVGHCVYEKDKSRCPISHPEYELYRMWQVLNNIKYSDDDRKTWHSLNPVERITIQKKFFRKSNPTFEFADIRKLFLRQHPHRIFNYNDAQTIAGCPTLAGLISIVGEERVWQMRKAALARLHWEAVEKRASPIAYPSKQLDLFDLWHWLFAMDNDKDQEIIRRKVQFSLGLTDREASQFVAIPLKPGYGNLSLKAIRKINHWLEQGERYDTAVFLANVPHLIGNSIWELTKTSLMSAVRQAIECIGQEKASIDIANRLISQYNNLPYHHRFAKIEGYTLDEDDHKDINTALIGYFGEARWQEFPESLQYNYYERLQNLYSNALKNIGNGDLPYIKPPRLDENIKHAIYRITGLDPASHLLDKLYHPSDIESFAPAVIEVDNSSGRPTGRKLLNTPATNSIRNPMAMRTLYELRRLINYLIRKDIIDEHTQVMVEMARELNDANRRKAIERFQNERKEENVRFEQELKKIFQEQGRTLPADLSAYVERYRLREEQPKRVCMYTGRTISDADLFDENTTDIEHTLPRSLTFDDRMENKSIAYKSYNNTVKNKLFPSQLPNYATDTPEFTAIEPRLLNWESLVAEFEAKTEMAKRRSRLAATKEAKDKAIQDRHYYAMHHRYWMSKLERFTLTQVTQGFKNSQLVDTQLISKYGVLYLKTVFFNVRATKGLITDKIKRIWGAQGIGENKDRSNHAHHTIDAIIQTLLYKERNKPDIYNLLAEAYKEAQEHRWKEPRLSNPWGLEPAAFYNAMQRLAADTIVYHADRDNVLKQTKKKVRLKGKIEYRKNDDGSFLQDKQGEKIPFYQTGWGLRASLHKDTFYGAIKPPGKEVVQYRTSFQFRGSSVEDIRKNIPKIVDARLRKLAEEASATNIQKLGYFEIPPSEERKKRDAAAQPTKVFKVKIFADDLKNPIKLKRHAEATREHKAWYYVQTDGNYLVALYDNGREKDFELVNTFDLAGLAGERQGLYPLYKEKIFRGKTFRIPLSRRNGKDVVLRQGTKVLLYEESANEIYADPSPGNLTDRLFKVQGLSIQRIGGKYDYATIHLIHHLEAQPTSRLKVQDGEYKWGDGKKYRKMNHNQLRALIEGVDFHLTHVGTIIFINNVADE

SEQ ID NO: 18403 - protein, 1129 aa, unidentified
  REGION 1..1129: note = Cas Enzyme sequence
MKNYRIGVDVGDRSVGLAAIEFDDAGFPIQKLALVTFRHDGGLDPTDNPKSRKETRGEARRRMRMTRRRKQRLCDLDKVLENLGYTVPEGPEPETYEAWTSRALLASIKLASADELNEHLVRAVRHMARHRGWANPWWSLDQLERASQEPSETFEIILARARELFGEKVPANPTLGMLGALAANNEVLLRPRAEKKKKTGYVRGTPLLAAQVRQIDQVAELRRICEVQDIEEQYETLRNAIFAHKVAYVPTERVGKDPLAPSKNRTIRASLEFQEFRILDSVANLRVRTDSRAKRELTEGEYDAAVEFLMGYTAKEQPSWADVAEEIGVPGNRLIAPVLEDVQQKTAPFDRSSAAFEKAMSKKTEARQWWESNDDDQLRSLFIMFLADATNDTEEAAAVAGLPELYMSWPAEEREALSNIDFEKGRVAYSHETLSKLSEYMHEYRVGLHEARKAVFGVDDTWRPPLAKLEEPTSQPTVDRVLTILRRFVLDCERQWGRPQAITVEHARIGLMGPVQRQKILNEQKKNRGENERIRNELRESGVENPNRAEVRRHLIVQEQECQCLYCGTMITTTTSELDHIVPRAGGGSSRRENLAAVCRYCNGKKNRKLFYEWAGPVKMQETIDRVRQLRAFKDSKKAKMFKNQIRRLKQTEADEPIDERSLASTSYAAVAVRERLEQHFNEGLTLDDKSRVVLDVYAGAVTRESRRAGGIDERILLRGERDKNRFDVRHHAVDAAVMTLLNRSVALTLEQRSQLRRAFYEQGLDKLDRDQLKPEEDWRDFIGLYPASKEKFLEWKKTATVLGDVLAEAIEEDSIAVVSPLRLRPQNGSVHKETIAAVKKQTLGSSWSADAVKRIVDPEIYLAMKDALGKLKELPEDSARSLELSDGRYIEADDEVLFFPENAASILTPRGVAEIGGSIHHARLYSWLTKKGDLKVNVLRVYGAEFPWLMRESGSSDVLRMPIHPGSQSFRDVQEETIEMIEGGFAKEIAWITQNDELEFDPVEYINLPGRSDKLTRFLIYMPETRWRVDGFPESRNLRIRPLMLSQEDLPSEIKKHKEEKQLSDEEKLLVEALEKGLIITSSKLLGLKSIKVIRRNNLGFPRWRGNGNLPTSFEVRSSALRALGVEG

SEQ ID NO: 18404 - protein, 1132 aa, unidentified
  REGION 1..1132: note = Cas Enzyme sequence
MKNYRIGVDVGDRSVGLAAIEFDDAGFPIQKLALVTFRHDGGLDPTENKSPKSRKETRGVARRTMRMNRRRKQRLRDLDKVLENLGYAVPEGPEPETYEAWTSRALLASIKLTSADELNEHLVRAVRHMARHRGWANPWWSLDQLEKASQEPSETFEIILARARELFGEKVPANPTLGMLGALAANNEVLMRPRRNYNAKEANNPKKAGKYLADYGTQPLMAAKVRQEDQLAELRRICEVQGIEDQYEALREAVFTHVRPYVPKDRVGKDPLNPSEIRASRASLEFQEFRILDAVANLRVRTDSRAKRELCEGEYDAAVDFLMSYTGKEQPSWADVAEEIGVPGNRLIAPVLEDVQQKTAPFDRSSAAFEKAMSKKTEARKWWESNDDDQLRSLFIMFLADATDDTAEAAVEAGLYELFESWPEEEREALSNIAFEAGRAGYSATTLSKLSEYMHEHRVGLHEARKAVFGVDDTWRPPLAKLEEQTGQPTVDRVLTILRRFVLDCERQWGPPQAITVEHARTGLMGPAQRQDILREQKKNREENERIRNELRESGVENPKRVDVRRHLVIQEQECQCLYCGTMITTTTSELDHIVPRAGGGSSRRENLAAVCRYCNAMKSNTPFYRWASPEKLKETIDRVRQLKAFKDPKKAKMLKNQIRRLKQTEADDPIDERSLASTSYAAVAVRERLEQHFNEGLAPDDNSRVTLDVYAGAVTRESRRAGGIDERILLRGEHDKNRFDVRHHAIDAAVMTLLNRSVALTLEQRHQLKRESMETKRDNGWSDFTGLAPASQEKFLEWRKAATVLGDLLAEAIEDDSIAVVSPLRLRPQNGAVHKDTIAAVKKQTLGSAWPADAVKRIVDPEIYLAMKDALGKLKELPEDSARSLELSDGRFVEADDEVLFFPKNAASILTPRGVAEIGESIHHARLYGWLTKKGELKVGMLRVYGAEFPWLIRESGSRNVLSMPIHPGSQSFRGMQDAVRKVVESGEAVEFAWITQNDELEFDPADYIAHGGKDELRQFLEFMPECRWRVDGFYDVGRLRIRPALLSREQFPLDIQRSLDEKKPLTVEQQVIVKSLEKGLAISLGNLMGLETMRVIRRNNLGFPRWRGNGNLPTSFEVRSSALRALGLEG

SEQ ID NO: 18405 - protein, 1131 aa, unidentified
  REGION 1..1131: note = Cas Enzyme sequence
MKNYRIGVDVGDRSVGLAAIEFDDAGFPIQKLALVTFRHDGGLDPTENKSPKSRKETRGVARRTMRMNRRRKQRLRDLDKVLENLGYAVPEGPEPETYEAWTSRALLASIKLASADELNEHLVRAVRHMARHRGWANPWWSLDQLEKASQEPSETFEIILARARELFGEKVPANPTLGMLGALAANNEVLMRPRRNYNAKEANNPKKAGKYLADYGTQPLMAAKVRQEDQLAELRRICEVQGIEDQYEALREAVFTHVRPYVPKDRVGKDPLNPSEIRASRASLEFQEFRILDAVANLRVRTDSRAKRELSEGEYDAAVDFLMSYTGKEQPSWADVAEEIGVPGNRLIAPVLEDVQQKTAPFDRSSAAFEKAMKAKTEARKWWESNDDDQLRSLFIMFLADATDDTAEAAVEAGLYELFESWPEEEREALSNIAFEAGRAGYSATTLSKLSEYMHEHRVGLHEARKAVFGVDDTWRPPLAKLEEQTGQPTVDRVLTILRRFVLDCERQWGRPQAITVEHARTGLMGPAQRQDILREQKKNREENERIRNELRESGVENPKREDVRRHLVIQEQECQCLYCGTMITTTTSELDHIVPRAGGGSSRRENLAAVCRYCNAMKSNTPFYRWASPEKLKETIDRVRQLKAFKDPKKAKMLKNQIRRLKQTEADDPIDERSLASTSYAAVAVRERLEQHFNEGLAPDDKSRVALDVYAGAVTRESRRAGGIDERILLRGEHDKNRFDVRHHAVDAAVMTLLNRSVALTLEQRHQLKREFNETKRENGWRDFTGLYPASQEKFLEWRKAATVLGDLLAEAIEDDSIAVVSPLRLRPQNGAVHKDTIAAVKKQTLGSAWSADAVKHIVDPEIYLAMKDTLGKLKELPEDSARSFELSDGRYIEADDEVLFFPKNAASILTPRGVAEIGESIHHARLYGWLTKKGELKVGMLRVYGAEFPWLMRESGSRNVLSMPIHPGSQSFRGMQDGVRKVVESGEAVEFAWITQNDELEFDPADYIAHGGKDGLRQFLEFMPESRWRVDGLTTNYQLLLRPAMLSREQLPSDLQEKMVAKTLTEDETLLLKALERGLSIAVNSVLPLESLKVIRRNNLGFPRWRGNGNLPTSFEVRSSALRALGVEG

SEQ ID NO: 18406 - protein, 1131 aa, unidentified
  REGION 1..1131: note = Cas Enzyme sequence
MKNYRIGVDVGDRSVGLAAIEFDDAGFPIQKLALVTFRHDGGLDPTKNKTPMSRKETRGIARRTMRMNRRRKQRLRDLDMVLTNLGYSVPEGPEPETYEAWTSRALLASIKLASADELNEHLVRAVRHMARHRGWANPWWSLDQLEKASQEPSETFEIILARARELFGEKVPANPTLGMLGALAANNEVLMRPRRNYNAKEANNPKKAGKYLADYGTQPLMAAKVRQEDQLAELRRICEVQGIEDQYEALREAVFTHVRPYVPKDRVGKDPLNPSEIRASRASLEFQEFRILDAVANLRVRTDSRAKRELSEGEYDAAVDFLMSYTGKEQPSWADVAEEIGVPGNRLIAPVLEDVQQKTAPFDRSSAAFEKAMKAKTEARKWWESNDDDQLRSLFIMFLADATDDTAQAAIEAGLYELFESWPEEEREALSNIAFEAGRAGYSATTLSKLSEYMHEHRVGLHEARKAVFGVDDTWRPPLAKLEEQTGQPTVDRVLTILRRFVLDCERQWGRPQAITVEHARTGLMGPAQRQDILREQKKNREENERIRNELRESGVENPKRVDVRRHLVIQEQECQCLYCGTMITTTTSELDHIVPRAGGGSSRRENLAAVCSYCNGQKNNTPFYRWASPERFKETIDRVRQLKAFKDPKKAKMFKNQIRRLKQTEADDPIDERSLASTSYAAVAVRERLEQHFNEGLAPDDKSRVVLDVYAGSVTRESRRAGGIDERILLRGEHDKNRFDVRHHAIDAAVMTLLNRSVALTLEQRHQLKRESAETKRDNGWRDFAGLYPASQKKFLEWRKAATVLGDLLAEAIEDDSIAVVSPLRLRPQNGSVHLETISAVKKQTLGSAWPSDAVKRIVDPEIYLAMKEALGKLKELPEDSARSLELPDGRFVEADDEVLFFPENAASILTPRGVAEIGESIHHARLYGWLTKKGELKVGMLRVYGAEFPWLMRESGSRDVLRMPIHPGSQSFRGMQDGVRKMVESGEAVEFGWITQNDELEFEPADYITHIRKNKLGQFLELMPEKRWRVDGFNDAGRLKIRPALLSWEQLPDEIQDKMNAGTLNEDEKNLFKIVKEGTLVSVGDFFQLETSKVIRRNNLGFPRWRGNGSLPTSFEVRFSALRALGVEG

SEQ ID NO: 18407 - protein, 1420 aa, unidentified
  REGION 1..1420: note = Cas Enzyme sequence
MGFLPKHYDEMIDFENHPGKFLPETEPKIAWSKNDEGEYEFIFKKSFEEMMADFKANQPELLTDGKKVPYDWTIYYLRKKALTQKIEKEELAWILLNFNQKRGYYQLRGEEEDEENPNKSIEYHALKVTHVEADEAEKNKSDIWYTIYLENGWIYRRSSKIPLFDWIGVTKEFIVTTELNDDGTVKIDKEGKEKRSFRIPSEDDWTLLKKKTETDIDKSKKTVGTYIYDTLLKKPDQKIRGKLIRTIERKYYKKELKKILTKQKEFHPELKDRNLYRSCVVELYPNNKAQQNNIRNKDFTYLFIEDIIFYQRPLKSKKSLISNCKFEYRTYKDKEGNIRKAPLKCVPKSHPLYQEFRLWKFVQDLRIYEREKKINGKLYIDYDVTNEFIKTKEDLVNLFDWLNKRSGIKQNTLLSSYFKVKKTNKTDKQLPYRWNYVEDKEYPCNETRFSIINRLEKINDLPDNFLTNRKEFELWHLLYSVIDKNELEKALKKFAAKNNLPISEFVDAFVKFPPFERDYGSYSEKALKKLLPLMRMGKYWNYEAIDLNTRQRIEKLLTGEVDETIHDKVREKTSHLTDEKQFKGLPEWLAAYVVYGRHSEMSEYTKWNTYHDLNNYLQDFKQHSLRNPIVEQVIMETLRVVRDCWEKYGNIDEIHVELGREIKNPAEKRKKITKTITQNENTNLRIKALLIELANDGVENARPYSPTQEEILKIYEEGVLNSTIDIPNDIEKIVRKATPTKQELNRYKLWLEQKYRSPYTGEIIPLAKLFTPAYEIEHIIPQSLYFDDSLSNKVICESEVNKLKGNQLAYEFIKTHHGEKVELNFGKTVEIMSKEAYEKFVNENYRNNFFKRKKLLMDDIPDEFIERQINDTRYITKVVKSLLSNIVREEDEQEPTSKNVIVTTGQITNTLKRDWGLNDIWNEIIYPRFERLNELTNSILFGQWVNENGKRFFRTQVPLDLQKGFSKKRIDHRHHAMDALVIACTTRNHVNYLNNESAKSSNRETRYDLRNKLCKKVKTDDKGNYIWQFIKPWETFTQDAKIELENIVVSFKQNLRVINKTTNYYQRYVNGKKVIDKQTKGDHWAIRKSLHKDTVAGQVNLRFKKKVSLSVAIDQPENIVDKQLKREIKNLQKEKFDKKQILKYFGNLNYRWQGKEIKQPEIYYFSNDKVEMTASRVNLDTSFGTKKIESITDTGIQKILKNHLSKFDENVNGTIIEHPELAFSPEGIEEMNKNIRELNDGKPHKPIIKIRTYETKGNKFNVGTKGNKKLKFVEADKGTNLFFAVYIDDDGKRNFETIPLNIIIERLKQGYEAVPEKNEKGHRLLFHLSPNDLVYLPTEEDIINGNVSIPLDNNRIYKMVSCTGNVADFIPFYVANPIVKTTELGSNNKAQRAWTGEMIKEICIPLEVDRLGNIVKIKTT

SEQ ID NO: 18408 - protein, 946 aa, unidentified
  REGION 1..946: note = Cas Enzyme sequence
MTHTLAIDFGVRNIGLALVAHGDDRQPANRILYAATVVVDAKWLNQAVAGRVAARGIRRTRKTHRRRLQRLGQALKGLPEAEHLVRFCRRRGYSYDPPEEDDGGQSFHLPRGRFFDALTDEIERTIPPEHRQRALKLCRKHLNAGRHREAELRPARFENRNRVKCRWAGCTRNVPRAGNDFRSRLQQALYVWLKPVFDQTENAARLRRSVDHWIGELDGLARWWAKCERLDADACKQERKAVTKRRGRVYKNLLARIDREVAEDAAERFRELWKKTYRGNLNDIVTGKQGGRCTYCRKHSDQFVDEFLAGRRIPHREETTERDLISRKQQIIFGRLWRLVEARLLPLAGGTIDRVVVERVAFDVLQGRRKARQELPEAQAAEMYWYGPQRGFTSRLEMLKAEFDGKCAYCSAEAAAEVEHLLPRAEFPLNSYFNLLPACRECNRKKGSRPASAARMQVTPEAVASYRKYVDRLRVPHLFHTIKKGMLKLLSRGGDLAVAERQLGLIANNLVGVTNTQRGPRPLARYLATKLEDTTGLRPSVDFTAGRHTALYRDVLLPAFDKPAAKEAGELTNHAIDAIVLGCRLPSPTVLESQKWFQTPSGIRAWRRKVREAGPELADNVPRVEGPEPIPHFENDLGGGYLALDLSAFNWNQKRKSGHRLDPIGLTNSDEPIDREPAAKVLDKLQQAKSREGQIARIAHPALRKALQVDPGQAAAVFVRWLQQTAVAGLKGAPMSRHPSDRQREQVIRQFAETPVEAFLAKEATADLPGIIGVRCLKASSAKVFDVVRCDASGQVFQHYKSDPRYRRFYIGYKATKAGPNRAKPIIYCVNQLYRVWERVGARNLELDFPADSPLRGRPLGSIENEKAFLARWQAAFDQLCQEQGIAERFAVHQGAVIEKTDGSHLQVRNFDNGKPWMKADTFRHISRVYRSPLQFAAEHRVESPG

SEQ ID NO: 18409 - protein, 1166 aa, unidentified
  REGION 1..1166: note = Cas Enzyme sequence
MIFNFLRGSKAMREIKYRLGLDMGATSIGWAVINSDTEELVNFGVRIFDDGREDKSKASLCVKRRNARGMRRLVNRRHIKIQELLKMLINIGLFPEDEKERKSLKNENPYYLRKKALDEVLTEYELGRVLLQLAKRKGFKSNRKDDKKEGGKLKKGYEELLEAMKTENARTYGEFLYNRWKKSPEKSIRLKNMFDETSGKFLGGLFPFREVYQKEFEVIWESQKPYFSDALTDENKVKIKDLIFFQRPLKEADEGLCQFEENEKRIAKAHPLFQEFRIWQNVLNTRFDGDVLQRDELQKLVDLLQNPVAGKSNADGIMTYENIKKFLGLDKEGVFNYTKKSSSDADFEKGMLVDTTQKAINESQYIKPFWDKLSDEQKGRVINLFAKPSRYIDFPKRLSAEQEDNMIADYLIKNFGFSREAADELLYDIVLEDGYGSLSEKAIGKILPYMKEGQLYSDACLSAGYHHSDKDYISLDKLPYYGEILTQSCIGRKNSPTCAEERLGRINNATVHVALNQVRHLVNEIIGCYGKPDDIAIEYARDLNASMEERSKMSKKRDGNEKENKRILEEMKEKIGDYHYSKDDIQKYKIWERLAKNPVDRKCPFSGTPIGIEDLLNGQKFQIEHLLPFSRTFDNSLDNKVIATVEANRYKSDRTPFEAFGESKDGYNWKEIKRRANKLSAEQKWRFDKDAMQRFEENHGPVARSLNDTRYMTRLLQDYLMPIVREDGKKNVQSVAGALTAMVRKSWGLDIYKDKEVFDENLVPDSEKKDSDDESKGYRLFHNHHAIDAIVIASITRGEINKAHRELTRLPDEIYHELADDFKKLRDDTVPDEDKKAIKKKIKDFRLEREGAIIATYFKMPQGLKRDEIIDRVDKINISHKPNLKNIKDKNSTVGQLHEDTAYGFKGFVDDKSLKARFVTKGKDGKKEMIKDITDYIPMFYDKADKNAYYDAYKQWFIIDGKAKSLDIKGTFFAKTDLQKQERDAILRLRTAAEKAFKWFIGGNNFCAEIYQINPDNKICGRLTKDRGEWKSEIISNYNATVRNRRGENISYWRYKYPNAKRIMSLRRNDMVLATFTREQAFEEDFPKGLQYYVREKFNKNPDMEKLDILLRVKKMASNGQISLTPHDIAKEEGDTKSFGAVASSLQKYNVRKVHVTFMGRIENAE

SEQ ID NO: 18410 - protein, 1092 aa, unidentified
  REGION 1..1092: note = Cas Enzyme sequence
MKYIIGLDIGIGSVGWAVVRNDDDCKRLEDLGVRIFESGEIIESNKNIRKSQRRRKYRGMRRRIRRRNHRKERLKNYLENIEFVSRAELSEFFAKNNHDIIDIRVRALDEKVTPVELTAALLHIAKRRGYKAFYELSDENNNAKDKKAKEEEKDIYKALTNTADVIKNGGYRSIAEAIMKDSEHFSDKISGRYKYRNIKEKDEKGKKESSGKISENDILFPTEMFEDEVRKILGKQKEFYPQLTDESIDKIFDIIFSRRDFEDGPGNADDENRPYKGFVDSIGNCPYYKNEKRGHRYTVIGDLFALANKLSQYKYVEKNTGEVVKLPRDLMRNIVSQSLQSGSITKTKINELAKELNIVILNTKTAKNENIADCIKYLKAVKPIFESYGFDWDKLISEEYTDQNSLLNRVGDTISFNITPKRRIDALNKIDELKGKDELIKKLSKQNFSGTAKVSDKYMIDAINAFFDGTLVGEFQANVQQDEFSVSIKTEKLLKLKPFDNNSEYAQNPVVFRAINETRKVVNAIVQKYGAPNAMNIEIASELNKSFDTRQKISTQQNKNEKERKNAIKQISLITGLDEREIRPQYIERYLLGELQGWRCMYSNEEITNKKEAILNKGKQYEIDHIVPFSRILDDTLNNKALVLARENQKKGARTPLMYLSAEKEKEFKQRVNKLFKDNKITEKKYRYFMLESLVGEDAEKILGDWKTRNLNDTRYIAKFLVKYFNDNLYFAREKGDDKRPVVYAVKGAITSSLRRQWLNKETWGRYDKGELKKITYFDHAVDAIVIANCLPAYVIIAAENHKLRDIYYSAGKIKTEEYRKSLDNCVDTLMKYYGMSPAVSRELLEKVKETPSLLKNIRFEVEYRVRDYELMKYFFNYDTKVGEDTLDQIFRNDLYKIYDHQFADSIEMPIVSIKPERKYSGQMVKDNFLKKRVANSENKYVKTIDKNNDAVLDNSYYYCVEVYRTRSGNIDLQGIKYTDLVNKNKKLYLKPCYKYPENYYKYIMYLFKGDYLRIKGPKSTRLGFYKAVNNINQNSIKITRYNSKYTRAFREESTAISADAEIEKIYVDILGKKGKVLTKHGEPLSLLPEKN

SEQ ID NO: 18411 - protein, 1092 aa, unidentified
  REGION 1..1092: note = Cas Enzyme sequence
MKYIIGLDIGIGSVGWAVVRNDDDCKRLEDFGVRIFESGEIIESNKNIRKSQRRRKYRGMRRRIRRRNHRKERLKNYLENIEFVSRAELSEFFAKNNHDIIDIRVRALDEKVTPVELTAALLHIAKRRGYKAFYELSDENNNAKDKKAKEEEKDIYKALTNTADVIKNGGYRSIAEAIMKDSEHFSDKISGRYKYRNIKEKDEKGKKKSDSKISENDILFPTEMFEDEVRKILGKQKEFYPQLTDESIDKIFDIIFSRRDFEDGPGNTDDENRPYKGFVDSIGNCPYYKNEKRGHRYTVIGDLFALANKLSQYKYVEKNTGEVVKLPRDLMRNIVNQSLQSGSITKTKINELAKEFNIVILNTKTAKNENIADCIKYLKAVKPIFESYGFDWDKLISEEYTDQNSLLNRVGDTISFNITPKRRIDALNKIDELKGKDELIKKLSKQNFSGTAKVSDKYMIDAINAFFDGTLVGKFQANIQQDEFSVSIKTEKLLKLKPFDNNSEYAQNPVVFRAINETRKVVNAIVQKYGAPNAMNIEIASELNKSFDTRQKISTQQNKNEKERKNAIKQISLITGLDEREIRPQYIERYLLGELQGWRCMYSNEEITNKKEAILNKGKQYEIDHIVPFSRILDDTLNNKALVLARENQKKGARTPLMYLSAEKEKEFKQRVNKLFKGNKITEKKYRYFMLESLVGEDAEKILGDWKTRNLNDTRYIAKFLVKYFNDNLYFAREKGDDKRPVVYAVKGAITSSLRRQWLNKETWGRYDKGELKKITYFDHAVDAIVIANCLPAYVIIAAENHKLRDIYYSAGKIKTEEYRKSLDNCVDTLMKYYGMSPAVSRKLLEKVKETPSLLKNIRFEVEYRVRDYELMKYFFNYDTKVGEDTLDQIFRNDLYKIYDHQFADSIEMPIVSIKPERKYSGQMVKDNFLKKRVANSENKYVKTIDKNNDAVLDNSYYYCVEVYRTRSGNIDLQGIKYTDLVNKNKKLYLKPCYKYPENYYKYIMYLFKGDYLRIKGPKSTRLGFYKAVNNINQNSIKITRYNSKYTKAFREESTTISADAEIEKIYVDILGKKGKVLTKHGEPLSLLPEKN

SEQ ID NO: 18412 - protein, 1090 aa, unidentified
  REGION 1..1090: note = Cas Enzyme sequence
  REGION 235..238: note = misc_feature - Xaa can be any naturally occurring amino acid
MKYIIGLDIGIGSVGWAVVRNDDDCKRLEDFGVRIFESGEIIESNKNIRKSQRRRKYRGMRRRIRRRNHRKERLKNYLENIEFVSRAELSEFFAKNNHDIIDIRVRALDEKVTPVELTAALLHIAKRRGYKAFYELSDENNNAKDKKAKEEEKDIYKALTNTADVIKNGGYRTIAEAIMKDSEHFSDKISGRYKYRNIKEKDEKGKKESGGKISENDILFPTEMFEDEVRKILGXXXXPQLTDESIDKIFDIIFSRRDFEDGPGNTDDENRPYKGFVDSIGNCPYYKNEKRGHRYTVIGDLFALANKLSQYKYVEKNTGEVVKLPRDLMRNIVNQSLQSGSITKTKINELAKELNIVILNTKTAKNENIADCIKYLKAVKPIFESYGFDWDKLISEEYTDQNSLLNRVGDTISFNITPKRRIDALNKIDELKGKDELIKKLSEQNFSGTAKVSDKYMIDAINAFFDGTLVGEFQANVQQDEFSVSIKTEKLLKLKPFDNNSEYAQNPVVFRAINETRKVVNAIVQKYGAPNAMNIEIASELNKSFDTRQKISTQQNKNEKERKNAIKQISLITGLDEREIRPQYIERYLLGELQGWRCMYSNEEITNKKEAILNKGKQYEIDHIVPFSRILDDTLNNKALVLARENQKKGARTPLMYLSAEKEKEFKQRVNKLFKGNKITEKKYRYFMLESLVGEDAEKILGDWKTRNLNDTRYIAKFLVKYFNDNLYFAREKGDDKRPVVYAVKGAITSSLRRQWLNKETWGRYDKGELKKITYFDHAVDAIVIANCLPAYVIIAAENHKLRDIYYSAGKIKTEEYRKSLDNCVDTLMKYYGMSPAVSRKLLEKVKETPSLLKNIRFEVEYRVRDYELMKYFFNYDTKVGEDTLDQIFRNDLYKIYDHQFADSIEMPIVSIKPERKYSGQMVKDNFLKKRVANSENKYVKTIDKNNDAVLDNSYYYCVEVYRTRSGNIDLQGIKYTDLVNKNKKLYLKPCYKYPENYYKYIMYLFKGDYLRIKGPKSTRLGFYKAVNNINQNSIKITRYNSKYTRAFREESTTISADAEIEKIYVDILGKKGKVLTKHGEPLSLLPEKN

SEQ ID NO: 18413 - protein, 1092 aa, unidentified
  REGION 1..1092: note = Cas Enzyme sequence
MKYIIGLDIGIGSVGWAVVRNDDDCKRLEDFGVRIFESGEIIESNKNIRNSQRRRKYRGMRRRIRRRNHRKERLKNYLENIGFVSRAELSEFFAKNNHDIIDIRVRALDEMVTPVELTAALLHIAKRRGYKAFYELSDENNNAKDKKAKEEEKDIYKALTNTADVIKNGGYRSIAEAIMKDSEHFSDKNSGRYKYRNIKEKDEKGKKESSSKISENDILFPTEMFEDEVRKILGKQKEFYPQLTDESIDKIFDIIFSRRDFEDGPGNTDDENRPYKGFVDSIGNCPYYKNEKRGHRYTVIGDLFALANKLSQYKYVEKNTGEVVKLPRDLMRNIVNQSLQSGSITKTKINELAKEFNIVILNTKTAKNENIADCIKYLKAVKPIFESYGFNWDKLISEEYTDQNSLLNRVGDTISFNITPKRRIDALNKIDELKGKDELIKKLSKQNFSGTAKVSDKYMIDAINAFFDGTLVGEFQANVQQDEFSVSIKTEKLLKLKPFDNNSEYAQNPVVFRAINETRKVVNAIVQKYGAPNAMNIEIASELNKSFDTRQKISTQQNKNEKERKNAIKQISLITGLDEREIRPQYIERYLLGELQGWRCMYSNEEITNKKEAILNKGKQYEIDHIVPFSRILDDTLNNKALVLARENQKKGARTPLMYLSAEKEKEFKQRVNKLFKGNKITEKKYRYFMLESLVGEDAEKILGDWKTRNLNDTRYIAKFLVKYFNDNLYFAREKGDDKRPVVYAVKGAITSSLRRQWLNKETWGRYDKGELKKITYFDHAVDAIVIANCLPAYVIIAAENHKLRDIYYSAGKIKTEEYRKSLDNCVDTLMKYYGMSPAVSRKLLEKVKETPSLLKNIRFEVEYRVRDYELMKYFFNYDTKVGEDTLDQIFRNDLYKIYDHQFADSIEMPIVSIKPERKYSGQMVKDNFLKKRVANSENKYVKTIDKNNDAVLDNSYYYCVEVYRTRSGNIDLQGIKYTDLVNKNKKLYLKPCYKYPENYYKYIMYLFKGDYLRIKGPKSTRLGFYKAVNNINQNSIKITRYNSKYTRAFREESTTISADAEIEKIYVDILGKKGKVLTKHGEPLSLLPEKN

SEQ ID NO: 18414 - protein, 1166 aa, unidentified
  REGION 1..1166: note = Cas Enzyme sequence
LLSTFHNTQYESLCKKKNDKIIKENGMSERERIVLGLDIGISSIGWALMRLDEEPYLYRTNEGEESTKYRIHGGEIVDAGVRMFQPPHDRQKKSLALIRGGARRSRKTLRRKRQRMRHIVSLANKHGLLSGISCEQAAKLMQPAKGDNPKESSPWILRAEALERVLSGEELFRVMYHIAKHRGFSFLSQADEDEGEDAGKVKAGLKNTRDKLAAGNYETVGQMFAEQLKSDAKVRNGENDYSKAIHRSLLKEEIEVIFKRQRELGSMLASEKLCTEYLGELGGEKGIDYNKLVKMMNKCEFTGVPCAPREGYLNERFRLLNRLNTLELSNKRPLTEQEREKIIALAYENKKVTFTQIRKALKLPATVRFNLCSYAEHNPEFSKYLTCKVKNGEPQFEEGIHDIKTIAIKSLDPDTGKVQPGKYGKYYKMHINKVCRSRAAKYGRSNVKDIKMSYNEIRTVLINALGGEEAKALEKMRFNNISNSYAKAAEEFEAELTKKMPAGEERRLKALGQYIAQFEKDVFVELKGYHKIKDCIVARLGEDRWQEASASQEELEIIAEALVYRKTDQTRLKYLENKGIDKDIAEAVISINMKEVANFSGVALKLIGAEMEDGTLANDAIKKLSERDSRFAEKESEKQRILKPYDGDFKKNPVVMRTFSQVRKVVNAIVRKYGGAYPIDQICVEMGTDLACGKKMAGKISQGQKKYRDQKEAAAELCREHGLSPEQGQNLLRFRLAMEQGFRCPYSGNHIDASRIDDYEIDHIIPISRSFDDSLNNKILCERWANQEKKNRLPFEYFVDNADAFFQKKADGKSKIGSWDEFEVNTKHLRSMPWAKRKKLLTRKFTEEDKDKFISRNLNDTRYAARETANYLRKHFDFSPARRQDINEKSRIQMRAGRVTAMLRYHWGLEKDRNANDLHHALDAIVLACSTQGHVYLASMISKDYETKGKAILGRLKNADFEPWDGFRNDVLNKLDRIFVSRMPRRKVTGSANSDNPESVKSVSQKGRLAPINNGLCDMGTMVRADFYKSPEGKLYAVPLYPQDFAANKPLPNKYVDQGGVPYETWPELTEDFEFQYSLYKDEPVKINGTNYYISFIEGTRSYLAVNNVSGTVFENDKKFKQMSYKGTDMTKYSIDVLGNLKEIKKEKRVGNAFEKRSEKQDRAVL

SEQ ID NO: 18415 - protein, 909 aa, unidentified
  REGION 1..909: note = Cas Enzyme sequence
GNSVRFKPVMEKSKILYSFYPSREMYETEFIAIMDKQKKYYKELNWERVYKIIFLQRPLKPSERGSCQFYTEEKRGYGAFVSAHRFRILQDINNLKYYNDENIEEEISSELKQKLFDALNTQKSLAFSKIRKTLGKDNTGSFNLEDSKRENLKGNETSFVLRKPEYFGSIWDDLTVQKQDEIIEQLMIEDDEKVIYDFLATFSLTTEQIKNISGYNFPAGTTMLSSKFMIDCSEVMLKEWIGYSDAVKKMGLSKKEARQIQRSLPYYGKILTGQVSGAKGEDYEGNDEEKYGRIANPTVHIALNQLRKLVNALVRRFGKPTEIIMEVNRELKSSRTKKEEEMKKQAKNQKDNERIRNEIKELGYLQVGSEDIKKYKLWEELAPEGIARRCPYCGKTISAKQLMSGAVEIDHILPYSRTLLNSRDNLIVAHRECNQAKRNRSPFEAFGNNTGGFDWNQIMDITAKLPYRKRRKFFPDAMTSFNEEEGGFLDRQLTDTAYLSKAGEKYLSVVCKSNAIWVSPGKLTALLRGFWGFNTLLNRGQETWYKNRSDHRHHALDSLVIGLCDRNIIAEAARINNNMSYREIHAPPCPIDRKVIEEHLKSIVVSYKPDHGIEGKLYAETAMAKHSYLEQINPTELGENEINRIVPKSIKEDIALLVEKEGFRKAKSLIQKKYKFLRVFRDKWVSRTPLESIKDISRIADLVIRDRIQALLNSKSGKVGQKLEDVLAQFSKKNGIYSVRYFPKDQVPVSIKDNANKAYMPDDFYRVDIWRLPEQKGKTKYEGVFVSRPVAMQGHEYNEETGFLQKPHPAAKLIMSLCKNDVVQLSNKTTQEFCRIAGYATTRNKIDIRPIYASDTIAAWKKNTNTNLTSAFWPSDIEGQNFKSINVLFNEFDVKKIKITIDGKLNCRS

SEQ ID NO: 18416 - protein, 1085 aa, unidentified
  REGION 1..1085: note = Cas Enzyme sequence
MWRLSLDMGTNSIGWSALEIENPENVKLLDMGVRIFPDGREPQKGTPLNEARRNARQMRRQRDRKIRRKKAMLNFLINNKLMPKEREEQQTIAQLDPYTLRNAALERKLKPFELGRIMMQFSVRRGFKSGRKEQQTENTAEREGMLGGIQALETELQGLTLGQWLCKQRENGNSVRFKAKMEKTKVIYSFYPSREMYETEFTAIKNKQEKYYKEINWDRLHWLIFFQRPLKRPERGRCQFYTEEERGYRAFPSAHRFRILQEINNLRYYNEENIEEIIPSELKLKLFEALNTQKSLTFNQIRKKLGENYTGSFNIEDSKRDKLKGNETSVDFRKPELFGLAWDKLDFKKQDEIIEKLMIEDDESVIYDFLKPFVLSEKQIKKISGYNLPVGTTMLSSHFMIDCSEIMLKEWLLYSEAVKKMGLHHSKKEKQDIQRSLPYYGKILTGLVSGAKGENYKGNDEECYGRIANPTVHIALNQLRKLVNALIRRFGNPDQIIMEVARELKLSKTRKDELFKEQSKNQKENERIEKELKDLGLLKISSEDKKKYKLWEELAVEGIARLCPYCGKTISAKQLISGNVEIEHILPYSRTLLNSRDNLTVAHRACNQAKKNQSPFEAFGNSPKGFDWNRIIELTKKLPIKKQRKFYPDAMVKFNEDEGGFIKRQITDTAYLSTASKDYLSAICDSNAIWVSSGRLTAMLRGLWGFNTLLNKGHDTWYKNRSDHRHHALDAIVIGLCHRHLITEAARINSGRGYSEIDAPPCPVKRNDIEEKLKSIVVSYKQDHGKEGKLYAETALAKHSYVEQIVPEDLGEKEINRIVPKKIQADIALLVQKEGFRKAKTLIQKKYKHLNVFRDKWVTRAPFESLSERDIPNIADPVIRDQVQKFIRSHPVKAEQKLQDVLNRFSEKTGIYSLRYFPKDQVPVSINSCNNKAYMPGDYYRVDIWRIPQSKGKCKYDGVFVSRPEAMQQQLLHGDNMVSLQKPHPAAKLIISLCKNDIVALSNETEQELCKIAGFSTTNNGIDIRPIYASDTIAAWKKNTNINLCSDFWPSNIEGQYFKSINALFNEYKIKQVKITVDGRPIYRS

SEQ ID NO: 18417 - protein, 1099 aa, unidentified
  REGION 1..1099: note = Cas Enzyme sequence
MIFVLRGSFLFKEDLMWRLALDMGTSSIGWTALDIENPENIKILGMGVRIFPDGREPKTGTPLNEARRNARQMRRQRDRKIRRKRAMLSFLVNNGLMPKEREEQQVVARFDPYTLRAAALERKLKPSELGRIMMQFSVRRGFKSGRKEQQAENTAEREGMLGGIQFLETELQGLTLGQWLCKQREAGNPVRFKPTMEKTKIIYSFYPSREMYETEFAAIRKKQEKYYKEINWDRIYWLIFFQRPLKRPERGRCQFYTEEERGYRAFPSAHRFRILQEINNLRYYNEENKEEILPPELRLKLFEALNSQKSLSFDRVRKILGEDHTGSFNLEDSKRDKLKGNETSVDFRKSELFGTLWDELDIQKQDEIIEKLMIEDDENAISDFLKPFGLTKEQIQKISGYHLPVGTTMLSSRFMIDCSELMLKEWLPYSEAVKKMGLHHSKKEKQDIRHSLPYYGKILTGLVSGAKGEGYKGNDEECYGRIANPTVHIALNQLRKLVNALIRRFGNPDQIIMEVARELKLSKTRKDELFREQTKNQKDNERIKKELTDLGLLQISSEDIKKYKLWEELATDGIARLCPYCGKTISAKQLVSGAVEIEHILPYSRTLLNSRDNLTVAHRECNHAKKNQSPFEAFGNSPKGFNWDRIMELAAKLPFNKRRKFYPDAMVRFHEDEGGFIDRQITDTAYLSKASKDYLSAICDSNAIWVSPGRLTAMLRGCWGFNTLLNRGHDTWFKNRSDHRHHALDALVIGLCNRHLIAEAARINSGRGYSEINVPPCLIKRNDIEERLKSIIVSYKQDHGKEGKLYAETALAKHSYVEQINPEDLEEKEINRIVPKKIQDNIVLLVQKEGFRKAKALIQKKYKHLNVFRDKWVTRAPLESLSERDIPNIADPIIREHIQKFIKSHPVQTGQKLQDVLVRFSKKTGIYSLRYFPKDQIPVSIDSCNNKAYMPGDYYRVDIWQIPQSEGKYKYEGVFVSRPEAMRQQLHGDDTVSLRKPHPAAKLIMRLCKNDNIALSNETEQELCRIAGFSTTQNKIDIRPLYASDTIATWKKNTNINLCSDFWPSGIEGQYYKSINVLFNEYEIELVKITVDGRPVYRS

SEQ ID NO: 18418 - protein, 1140 aa, unidentified
  REGION 1..1140: note = Cas Enzyme sequence
MAGDNKMQWRLGLDVGTNSIGWVVLKLSNKALKPNGVGDMGVRIFPDGREPSQKDRVGDSLAVGRRQSRGMRRNRDRRQKRLRRCAKAMVRMGLLPKKESERKVVFQDVDPYQARYLAATENVDKKTLARALMHLCKRRGFLSNRKTDSCNGDKEKKEGSKAKTGDKDKKLTERMRVFERYLHERDITLGQYLCERLSCRIVEENGLETDQRVRFNGNDVWETIDDEERAVYPKRQMYVDEFQAIRKKQRNRHLNDRQWNELLDIICFQRPLLKQEVGICTFERGEERASKHLPVSHRFRIIQEVNNLSFTENGTTRILAQQQRNQLIALLEEQETTTFSAAKTKLGLSRSGYFNLEGSVGDKKRGELNGNKTACKMRKVFANHDHDWDALDSKTQNDYVQLLFDVETDGEFKQAVQNNGRALPTALIEDMLAVSFTSSYGRLSHVAMEKLIKPMSAEDDADEDSAGMLYWQAAHHVYGGHTDRDFDSGKLLDKLPYYGQVLPDAMTPVRKNGIVSPQEKEHGRIPNPTVHVALNQIKRVVNELIDIHGKPDEIHIELAREIKNSAKKCQEITQAINANTKENERRKKLIAAARGIDEDDVTGIEVIKCKLWEELANSDRAGDAGSLARVDVYTGRNISLVECLSDEVEIEHILPYKMTRDDSMANKTITFREVNRAKGKRVPYRYAIEDGEDAAQEMIERAARLPRNKRWRFHEDALDHYEKMITNKLTPAEKEKFDADREGGFIDRQLVDTQYISKTAARYLATLVGRDNVVPVNGRMTAILRRQWKLEESKAKGTDQERDDHRHHAIDALVVAMTNRAMIKSITAYTKKKQDLRGESKARLYVPQLDGKIRSQMQDIYDDINVSYKPDHRLNGKFYEETAYGFLPNDAPERVEGYNAVVRRKLTALKAASKRKKSEVEAIRNPQVRNAIIEALDTAQVKSKGKWEDKLAFLAKEGVLICGYRRYIRRVKILINVSTLEAIPSAPYKGYPPAERAFCDIWRIPVKKTKSNPDGFRYKGRFVTYAQAKHFENPKKPDRVFDAELFEELRRLRLIHPAAKHMMRLFKNDMVMVEDDKGDKYLMRVASFNTTRNKLVLQPHFQSKAGQEEKTIPDLMTPQQKEGKLTKMKKVLITPAGRLI

SEQ ID NO: 18419 - protein, 1102 aa, unidentified
  REGION 1..1102: note = Cas Enzyme sequence
MKYRLGLDLGTNSIGWAVYSLDYENEPQKLEDMGVRIFPDGRDPKTKEPLAVSRRIARGQRKLIYRRKLRRKATFRLLQEQGLFPKTKDETQKLKTLNPYELRVKALDEKLEPAELARVLFNLSVRRGFKSNRKDTSNEETAASSNSEKLSQKDMSDMLSNAIKEANCRTLGEFLWKNQEKNHGIRFVPGRMSYYPLRKMYEDEFFAIRAVQEPFFKSIDWEGIYNSIFFQRSLKAQERGRCQYMPEKERTFKALPCAQKLRILQEIRNLNYQNEEGKTLPISEEQEDILLSLLDSKEKVTFDAFRKALKLNSACTFNLEKNRDFLLGNATAVKMRHKNRFGDLWDSLSLEDEDLIIEKLITADEDSEILALLEKYNLTEEQKDSILKLQLQTGTTMLCKEVSEKLVHKMESDSAYTYTAAVESLGYKYADQPVEKFDELPYYGKVLIGSTMGVNPTADESKPEQKYGKISNPTVHVALNQTRVVVNALIKQYGKPAQIAIELSRDLKASREAKDAIQKKQNENKKRNEITNINIRDANPNIQYPNRNDRLKYRLWEELGAEGLPRKCLYCGKTISGAELFSKNIEIEHILPFSRTLLDAESNLTVAHSSCNAFKKERSPYEAFGSNPKGFNWEEILMRANQLKNPAKRRRFAIDAMESFEKDSGFIARQLTDNAYLSKMAMKYLKSVCDDIWSVNGGMTKLLRDKWEIDSILKRKIGDTEIVHFGLKDEQIGEYKKNRYDHRHHALDASVIALIDRSIVKEISTLNARSQKNRIEVPPMAVPRLELQEKVKNIVVSFKPDHGAEGKLSKETLLGKIKREELLEISKIEESDILLIKSDKVRKDFEEKFTETKDIKQVRKALKDVYPQIKVFKEFFVSRTVISSLKESNIEDIVDDKIRNKLQDFVALHKGEKFEELLERFSEQTGIKKVRCINRVQTPIVINGDVPRYLAPEDYFAAIIWQIPPKKEGAKPTFEAQYIRRTEVGKDNRPKAAVIEAWKKEHHSAAKNLGILHKNDYLEFSDNGKWYKCRVAGLQAAANRLDIRPLCAVTDCKDWLISTNENQLERYWKPQKGQNFISVNVLFGEKQARFITVNPIGRVFRK

SEQ ID NO: 18420 - protein, 1099 aa, unidentified
  REGION 1..1099: note = Cas Enzyme sequence
VAPPLFGAIKLLVNNQTAISEGAKRAGTSSVVKTKRSHSVARGGFALATRLGLDIGTNSIGWCLYDGDRIRDIGVRIFSDGRDRKSGASLAVDRRNARAMRRRRDRYVRRRSALLAALVDTGLMPSDAQDAKALAGFDPYALRTAALDSALSPYELGRALFHLNQRRGFKSNRKTERKTGDDKEGGKIAGGAKALDVAMGDRTYGQFLNGRPVKRVRLRGEGEGYDFYPERRHLEAEFEAIWSAQARHHPALLTESLRDRLHRIIFFQRPLKSGKVGGCTFFNEEPRLAKAHPLFQERRLYEEVTQLEITKAGAPSRKLTLDQRDMIVLKLKSAKTASFSGLSRLLKLTDGESFNKASENRTGLAGDEIFASFGHRKCFGSRWVHFDAGTQWSIIEQVAEEEDPVRLHDWLVATHGVTSGQAEVIGRVRLPEGHGRLGETASRLILAELRKGVVTYNEAVEAALGKSHSDLRTGEVLDQLPYYGELLSREIPPGTLDPNDEEEVRWGKITNPTVHIGLNQLRRLLNAIIKVHGRPDHIIVELARELKLNEKERAEHNRRIGANTRAAAARSRKLRLTEQRDSGANRALLKLWEDLNPDNPLDRCCPFCGRHIGQHALFTDETEIEHIIPYSRSFDDSAANKVIAHRSCNRDKGNRTPWEAWGHTERWAPIAEQVARLHTSKQWRFAPDAMERFDRDGGFIARQLSDTQYLSRMARTYLASLYPDSAGVFVIPGRMTAMLRRLWGLNELLPDHNYVENPHSGAPKNRLDHRHHAIDAAVVGVTTRGLLNAISKAAARADDQNLDAMFDELPKPWDTFRDDLRRALDKIVVSHKADHGRKGVPPKDRDVTAGRLHNDTAYGLTGMASDSGLPIVVHRVPLLSLQPADITDPIRIPDAALQRALARTAEGLSGKDLQKALATFSRSDPVFRGIRHVRVRAALNVIPIRDAAGRAYKAYKGDANARFDVWRMPDGKWISSWKDRGGKSHSGVVSMFDAHQTDRPLHRPHPAAKRVLSLRQNDLVAVEPQDQPRKIMRVIKFSHRGEITLADHQEAGALKARDATSSDIDPFKYFNSSASGLQKAKARQIRIDELGRIFDPGPR

SEQ ID NO: 18421 - protein, 1009 aa, unidentified
  REGION 1..1009: note = Cas Enzyme sequence
MLRELRKHGLLPFDDLAGKALAAEDPYDLRVRALSEEISPYQLGRALFHLNQRRGFKSNRKADRKSADEKDAGKIAPATKLLDAEMKRLGAQTLGQFLVMRDQESGGTKGKRVRMRPDADGYDFYPDRRHILDEFRAIWDVQKAYHPALLSDAAWHDIFRIIEFQRDLKPAVVGLCTFAGMNGVPDDELRLPKAHPLFQQRRLYEEVNQLAVVAAGAASRPLSVQERDTLILKLRDKKKVSFETLGKAIKLKDGERFNKESENRKELAGDEVRAELSGKKLFGTRWPHFSGEEQCEIIDRLLEEENSQTLIGWLKARYGLDDASAEAIGNARLPEGHGRFGLTATKALLEQLRADDVPTYAQAAERAGFHHSDHRTGEDFDELPYYGEVLTREIAPGKDDYGDAEERRFGKITNPTVHIGLRQLGRLVNAIIRAYGKPDFIFVELARELKMNEKEKIAYSKQIKVNTDAARARSDKLGTMAMRDSGRNRLILRLWSDLNPGNVLDRRCPYCGEMISQGMIRNGEVDIDHIIPYSQCFDDSIGNKVLAHGRCNKAKGNDTPWGRWGRDPVRWAKIQDQVSRLHKSKQWRFGPDAIARYQTQEGSFLPRQLTDTQYLTRIAAKYLACLYPVRGERHVFAVHGSMTAMLRRLWGLNDILPDHNWVENEHSNAPKNRLDHRHHAIDAAVVGVMTPALIAEIAKAAARAEDKKLDRLFDGLPMPWARHEGDYRFRDELREKVLATTVSHKADHGRAGKPVKGRDVTTGKLHKETAYGLTGLTSDSGLPIVVHRVPLASLTPADLTDPLRIPDSALQRALYEATEGLSGKDFERAVLEFSRKHPIFKGIRRLRVREGLTVIPIKDKTGRAFKGYMGGANALYTIWQMPDGKWITHWKDRNGNLKSGIISSFDHHQHGYQEERPHPAAKKVMALRQNDMVALEKDGSRKIYRVQKFGQNGQIFLIEHAQAGNMVERNKSGNDPFTFWGPSASALQKVKARQIRIDELGRIFDPGPR

SEQ ID NO: 18422 - protein, 958 aa, unidentified
  REGION 1..958: note = Cas Enzyme sequence
MAERDPYELRAGALDRALTPYELGRALFHLNQRRGFKSNRKAERKAVDDKEGGKIADGAKALDAAMEAADARTYGEFLHGRAAKRVRMRVEGDGYDFYPERRHLEREFDMIWAAQAVHHPLLLTDAVRDRLRRIVFFQRKLKDPEIGGCTFFNAEPRLPKAHPLFQELRLYQEVNHLAITRAGASSRPLRLDERDKIILKLKSVKTASFSSLATLLKLADGESFNKASENRTALIGDEIFAAFSHKKCFGPRWAHFDTGTQWSVVEQVAEEEDPVRLHEWLTTTHGVGPGQAEAIGRVRLPDGHGRLGETASRLILVELKKDVITYDKAVERAIDRSHSDFRTGEILDRLPYYGEILSREIPPGSLDPDDDEERRWGKITNPTVHIGLNQLRKLLNAIIEVHGRPDEMVVELARDLKLNEKEKAKRNREIGENTRAAQARSRLLAGHGQPDTGANRMMVRLWEEANPGNPLDRRCPYCGRMIGPTMLFNGDCDVDHIIPYSVSFDDGAGNKVIACRACNREKGNKTPWERWGQTPKWPLIADQASRLHKSKQWRFAPDALERFERDDGFIARQLTDTQYLSRMARTYLSSLYPEGAGVYVIPGRMTAMLRRLWGLDELLPDHNYVDNPHSNAPKNRLDHRHHTIDAAVVGVTGRRLLQQISRAAARAEDQNLDKLFVDLPTPWGGFRDELRASLDRVVVSHKADHGRKGVPAKGRDVTAARLHNDTAYGFTGEKSDSGLPIVVHRVPLLSLKPADIADPMRLPDAALREALRRATEGLSGKDFERALLTLSKMDEVFRGIRRVRVREGLNVIPVRDAEGRPYKGYKGDANARFDVWRMPDGKWVSGVVSMFDAHRRDYRPERPHPAAKKILSLRQNDLIAIEREGGEREIMRIVKFGVHGQITIAAHQEAGPLKDRDAKPNDLDPFKYSSPTAGGLKKLKARQIRIDELGRIFDPGPR

SEQ ID NO: 18423 - protein, 1041 aa, unidentified
  REGION 1..1041: note = Cas Enzyme sequence
LYEGDAIKDIGVRIFSDGRDPKSGASLAVDRREARAMRRRRDRFIGRRSALLRELIAHGLLPADKTAAKALEVTDPYALRVKALDEPLDPHEIGRALFHLNQRRGFKSNRKANRVAKPGEEGKIASGTKALDAAMQIVGARTLGEFLNGRDVKRARPDSGEEDGSYAFYPDRKHYLAEFEAIWTKQAKLNPTLLSDAAKIAIHRVIFHQRDLKPQVVGKCTFAGWGGVPDDETRLPKAHPLFQQRRLYEEVNQLEIVTAGASSRKLTMDERDTLILKLRDKAKVSFSSLGKAIKLPEGARFNKESENRKELIGDEVRASLGHKDRFAGRWGGFSTEAQCTIIDRLLNEESTEKLLDWLKVSYTLDAETAEAVANVRLPDGHGRFGLTATTNLLEQLKGGQDADGHPLTYAAAADKAGFNHSAFRTGECHDVLPYYGEILAREIAPGKDNYGDALERKWGKITNPTVHIGLNQLRKLVNAIIRQYGRPDYIFVELARELKLNEKQKAEHNRKIKQNTDAAKQRGEKLEALGEHDSGGNRMRLRIWEELNPGNPLDRRCPYSGEIISIEMLMNGTAEVEHIIPYSRCLDDSVANKVMALTTWNRHKGNKTPWEKWGGTPQWDVIQDQVARLHKSKQWRFAPDAMERVERDGGFIARQLTDTQYLSRIAAKYLGALYPEKGERHVYAVTGRMTAMLRRIWRLNELLPDHNYVENPHSNAPKNRLDHRHHAIDAAVVGATTPAMIAEIAKAAGRAEAQALDKLFVDLPEPWNGFRDELRDKLLATTVSHKADHGRKGAAIPGKDVTAGRLHNDTAYGLTGRTNAKGAPIVVVSKPLLSLQPKDLTDPERMPDKDLQARLYSATQGATGKDFETALRKFAQRDGPYKGIRRVRLTEALNVIPIHDKEGKVYKGYLGDANSRFNVWRMPDGKWVASVISTFETHQKGYVEPRPHPAAKKVLSLTQNDLVAIEKEPGVLKIWRVQKFGQNGQIFFIAHNEAGNMPQRDKDGRDPFKFWGPSAGALKKMKARQIRLDELGRIFDPGPRE

SEQ ID NO: 18424 - protein, 937 aa, unidentified
  REGION 1..937: note = Cas Enzyme sequence
GFKSNRKADRVAKPGEEGKIASGTKALDAAMQIVGARTLGEFLNGRDVKRARPDSGEEDGSYAFYPDRKHYLAEFEAIWTKQAKLNPTLLSDAAKIAIHRVIFHQRDLKPQVVGKCTFAGWGGVPDDETRLPKAHPLFQQRRLYEEVNQLEIVTAGASSRKLTMDERDTLILKLRDKAKVSFSSLGKAIKLPEGARFNKESENRKELIGDEVRAPLGHKDRFAGRWGGFSTEVQCTIIDRLLNEESTEKLLDWLKVSYALDTETAEAIANARLPDGHGRFGLTATTKLLEQLKDAQDAEGNPLTYAAAADKAGFHHSDFRTGECHDVLPYYGEILAREIAPGKDDYVDARERQWGKITNPTVHIGLNQLRKLVNAIIRQYGRPDYIFVELARELKLNEKQKAEHNRKIKQNTDAAKQRGEKLEALGERDSGGNRMRLRIWEELNPGNPLDRRCPYSGEIISIEMLMNGTAEVEHIIPYSRCLDDSAANKVMALTKWNRDKGNKTPWEKWGGAPQWDVIQDQVARLHKSKQWRFAPDAMERIERDGGFIARQLTGTQYLSRIAAKYLGALYPEKGERHVYAVTGRMTAMLRRIWGLNELLLDHNYVENPHSNAPKNRLDHRHHAIDAAVVGATTPAMIAEIAKAAGRAEAQELDKLFVDLPEPWNGFRDELRDKLLATTVSHKADHGRKGAAIPGKDVTAGRLHNDTAYGLTGRTNAKGAPIVVVSKPLLSLQPKDLTDPERMPDKDLQARLYSATQGATGKDFETALRKFAQRDGPYKGIRRVRLTEALNVIPIHDKEGKVYKGYLGDANSRFNVWRMPDGKWVASVISTFETHQKGYVEPRPHPAAKKVLSLTQNDLVAIEKEPGVLKIWRVQKFGQNGQIFFIAHNEAGNMPQRDKDGRDPFKFWGPSAGALKKMKARQIRLDELGRIFDPGPRE

SEQ ID NO: 18425 - protein, 1065 aa, unidentified
  REGION 1..1065: note = Cas Enzyme sequence
MATRLGLDIGTNSIGWCLFLLDEHGNPTGVRDIGVRIFSDGREPSKGGNPGASLAVTRRDARAIRRRRDRYLRRRSALLEALIDTGLMPADVQDARALTGCDPYALRTAALYCPLNPHHLGRALFHLNQRRGFKSNRKAERKSGDDKEGGKIAGGAKALDAAMEKAKACTYGEFLFKRANFATYQNAIPATRVRMRTEGDGYDFYPERRHLEAEFDAIWSSQTAHHPVLLTDDIRDRLRRIIFFQRPLKAPKVGGCTFFNEEPRLPKAHPLFQERRLYEEVNQLEITKAGTSSRKLTLDQRDKIILKLKSAKTAGFSALATLIKLTDGESFNKASENRTGLVGDEIAASFSNKKCFGTRWAHFDAGTQWSIIEAVAEEEDPLRLYDWLTATHGVTTEQAESIGRVRLPEGHGRLGETASRRILAELKKDVVTYNAAVETALGKSHSDFRTGEILDELPYYGEILSREIPPGSLDPNDSEELRWGKITNPTVHIGLNQLRRLLNAIIKVHGRPDEIVVELARELKLSEKDKAEHNKRIGANTRAAEARSKKLLESDQRDSGSNRALLKLWEDLNPNNALDRCCPFCGRHISQLALFTDQTEIEHIIPYSRSFDDSAANKVIAHRSCNREKGKKTPWEAWGHTDRWAIISEQVSRLHKSKQWRFAPDAMERFDREGGFIARQLTDTQYLSRMARTYLSSLYPDTAGVYVIPGRMTAMLRRLWGLNELLPDHNYVENPHSGAPKNRLDHRHHAIDAAVVGVTTRGLLNEISKAAGKAEDQYLDRLFVDLPKPWETFREDLRDSLGDVVVSHKADHGRKRMPPKDHDVTAARLHNDTAYGLTGMVSDSGLPIVVHRVPLLSLKPADIADPIRIPDTALQRALWAATEGLSGKDFERALARFSKSDPVFKGIRHVRVREGLNVIPIADKTGRVYKGYKGDANARFDVWRMPDGKWVSSVTSMFDAHRREFEAKRPHPAAKKVLSLRQNDLIAIERDGRAREIMRVVKFAAAGRITIAAHQEAGPLKERDSKSNDIDPFKYSSPTAGGLKKLKVRQIRIDELGRIFDPGPR

SEQ ID NO: 18426 - protein, 1052 aa, unidentified
  REGION 1..1052: note = Cas Enzyme sequence
LYEGDAIKDIGVRIFSDGRDPKSGASLAVDRREARAMRRRRDRFIGRRSALLRELIAHGLLPADKTAAKALEVTDPYALRVKALDEPLDPHEIGRALFHLNQRRGFKSNRKADRVAKPGEEGKIASGTKALDAAMQIVGARTLGEFLNGRDVKRVRPDSGEEAGSYAFYPDRKHYLAEFEAIWTKQAELNPTLLSDAAKTGIHRVIFHQRDLKPQVVGKCTFAGWGGVPDDETRLSKAHPLFQQRRLYEEVNQLEIVTAGASSRKLTMDERDTLILKLRDKAKVSFSSLGKAIKLPEGVRFNKESENRKELIGDEVRASLGHKDRFAGRWGGFSTEAQCTIIDRLLNEESTEKLLDWLNVSYALDVETAEAVANARLPDGHGRFGLTATTKLLEQLKDGQDADGHPLTYAAAADKAGFHHSDFRTGECRDVLPYYGEILAREIAPGKDNYGDALERKWGKITNPTVHIGLNQLRKLVNAIIRQYGRPDYIFVELARELKLNEKQKAEHNRKIKQNTDAAKQRSEKLEALGERDSGGNRMRLRIWEELNPGNPLDRRCPYSGEIISIEMLMNGTAEVEHIIPYSRCLDDSTANKVMALTKWNRDKGNKTPWEKWGGAPQWDVIQEQVARLHKSKQWRFSPNAMERVERDGGFIARQLTDTQYLSRIAAKYLGALYPEKGERHVYAVTGRMTAMLRRIWALNELLPDHNYVENPHSNAPKNRLDHRHHAIDAAVVGATTPAMIAEIAKAAGRAEAQALDKLFVDLPEPWNGFRDELRDKLLATTVSHKADHGRKGAAIPGKDVTAGCLHNATAYGLTGRTNAKGAPIVTVRKPLLSLQPKDLTDPERMPDKDLQARLYSATQGATGKDFETALRKFAQRDGPYKGIRRVRLSEALNVIPIYDKEGRAYKGVKGDGNARFDVWRLPDGKWISKWTDRDGMERSGVVSMFNAHQKGKAELKPHPAAKRVLSLRQNDLVAVERDGGAREILRVVKFSSIGSMQLAPHNEAGALKGRDADLVDPFKYINTSATGLKNMKARQIRIDELGHIHDPGPRG

SEQ ID NO: 18427 - protein, 1087 aa, unidentified
  REGION 1..1087: note = Cas Enzyme sequence
LSIVMIILICVIRRIAGMATSLGLDIGTNSIGWCLYEGDRIKDIGVRIFSDGRDPKSGASLAVDRRDARAMRRRRDRYIARRAALLKALVKFGLMPADTAAAKALEVEDPYVLRVKALDHALTPHELGRALFHLNQRRGFKSNRKADRKSGAGEDGKIASATKALDAAMDAAGARTLGEFLNRRDPDKGEAKRVRMRPNSEGAGDGYDYYPDRKHYEAEFATIWDAQTGHHPQLLSEEVREALHRIIFHQRPLKEQQVGFCTFAGFPGVPEKSERLPKAHPLFQQRRLYEEVNQLRIVAAGASERPLTRDERDALILKLQDKQKVTFTSLGKAIKLAEGERFNKESENRKDLAGDEVRAIMQDKKGFGTRWLHFSPEEQWTILERLLEEESAETLLDWLKSRYALDDAQAEAVANARLPDGYGRFGPEATHLLLEQLKADVVTYAEAAARAGFHHSDHRTGECFDELPYYGEILARDIAPGKEEYANADERRYGKITNPTVHIGLNQLRKLLNAIIRRYGRPDFIFVELARELKLNEKQKAEQNRRIKQNTDAAKRRGEFLTGLGERDSGGNRMRMRIWEELNPANPLDRRCPYCGEIISAEMLMNGSAEIEHIIPYSKCLDDSASNKVIAHTHCNRDKGQKTPWERWGGTSRWDVIQDQVARLHKSKQWRFGPEAMERVERDGGFIARQLTDTQYLSRIAAKYLASLYPEKGERHVYAVTGRMTAMLRRLWGLNELLPDHNYVENPHSNAPKNRLDHRHHAIDAAVVGATTPARIAEIAKAAARAEDQNLDKLLVHLDPPWPGFREELRERLMATTVSHKPDHGRKGTPAKDRDVTSGRLHNDTAYGLTGRTNAKGVPIVVTRKPLLSLQPGDLTDPERMTDHDLQTALYTATQGATGKEFEKALRDFAKRDGPYKGIRRVRLCEPLNVIPVRDKQGRAYKAYKGDANARFDVWRLPDGKWVSKWTDREGHEHSGVVSMFDAHQRGHVEPKPHPAAKRVLSLRQNDLVAVERTEGLREIMRVVKFATRGEITFAADNESGPLKARHEAGDDPFRYFTTSPSGLQKAKARQIRIDELGYIHDPGPRN

SEQ ID NO: 18428 - protein, 1039 aa, unidentified
  REGION 1..1039: note = Cas Enzyme sequence
MIYKPTRLGLDIGTTSIGWCLYELNENNRPVGILRAGVRIFSDGRRPNKGKASLAVDRRLARSARRRRDRYLRRRQKVMRALTEAGLFPPDWRSRRDLEQLDPYALRARGLDEELHPHHLGRALFHLNQRRGFQSNRKTDSKDSDSGLINQGVKSLKQQLGDPDAPSPEEKPRTLGEWLYQRHKKQQSVRVRRTTHVIDGKEKELYDFYPSRAMYEAEFDALWRAQKKYHPALLTDENYARLKDVIFFQRYLKPVQPGRCVFNSWEERVARAMPLAQEFRIYQELNNLKYTVGHDPTQHELTLEQRDLLAYALKTKAKMTFTQIRKALKLTPDCEFNLEQDNREYLKGDETAEILRKKDRFGDKWAALPFDRQSEIVDKLLTEQNEAVMIDWLVRDCGLDAEQAEKTSRAFLPDGHASLGPTAMRDIVEVMKKQVITYAQAARSLGYDHSSFDAHEIKPELEYYGKLMERHVGFGSGNPDDPDEVRYGRVPNPTVHIGLNQLRHLVNKICKKYGPPRQIIVELARELKLNKKQKDKINKEQKFNRERNERYEDLLSKEGFPNTGENRLRLKLWEELNRNDPFNRCCTYSGKRINIKNLFSDQVEIEHILPFSRTLDNSIANKTLSFRDANRNKGNQSPHEAFGHRPDWPDILERAAALPHNKRWRFGPDAMERFENEERDFLDRALTDTQYLSRLTREYLTHVCDQVWVIPGRLTALLRGKWGLNDLLSDHNLKDRTDHRHHAIDAAVVGVTDRSMLNSISRQAGQAEIEDLERLVVDMPVPWPTFRDDLKAALDQVIVSHRPDHNVKGALHNDTAYGLASDPDPKGVREVVHRVPLMSLKSLGKIETIRDRVIREQLLTRLYGLSDKEFSAELARYSKDTGCRRVRVVEKLRVIPIKNKNGIPYKGYKGDSNACYDIYELPNGKWKAEVISTFDANQGNFISPLKRQHPTARKIMRLFKKDMVLLKEKNGWKVMQVIKFSKGALIMAEHHESNVDQRHRNKDDPFKMTEMGAETLQKYGIRKAWLDELGLVGYPKDGA

SEQ ID NO: 18429 - protein, 1085 aa, unidentified
  REGION 1..1085: note = Cas Enzyme sequence
LTLNNIVIKKGFNDKLLKSCWRISKMLGKNYRLGIDMGATSIGWAMILLDDDNEPCGVGKMGVRIFPDGREDKSKEPLSVSRRLSRGARRNRDRYLERMKVLLTILDENNFLPKDDQKRKEIFALNPYKLRTEALDIEISKSEFARALLHLAKRRGFLSNRKTDDESESSVVKDAIANLKQRLDDEGLRTIGEYLYHRLESNEEHNMRPSIRFRYKGTNNEQEEVIFPHRELVKGEFELIWTKQSEYHKELSPSLKEEVYHAIFYQNPLKETIKGKCIFEADEDRVAKAHPLFQEFRYLQDVNNMEIEELDTQRMRPLSEEERQIIISELSNKQKIKFKAIRTKLFKKTEADNYAFNLETENRTEMLGNATEYIFTRKKFPNIAKLWLSLEAEKQYELVELLISNLSDNDLQEKLSKYSIDNETIEQLISLKLPADYANLSLKAIKNIIPHMREGYKYHEACQKAGYQHSGDYDGRIYNEGDLPYYGELLKKSVLPLARDTMDFAADEHGKINNPTVHIALNQLRHLVNTLTKTYGPPKQIVMELAREIKMSQDEKADFVRKQRKNTENNERVATLLAELGVVNNYENRTKYKLWEELSDNPMERRCIYTGNIISNTELFSPKIEIEHILPKSRTYDDSIANKTVSYAYANRYKGERSPHEAFGQSLDKYNWDDIAERASKLPYNKRRRFLKSAMDNYADESEVLARMLNDTRYMSRVAKNYLQYVVGDRNIWVVTGRQTAGFRAKWGLNEILNEDEIDAKNRDDHRHHAIDAFVIGMMSRSMINRFSKSVANSTTRFLENLGDPYQGFNHESFKERVLSIKVSFKPDQINPTKLRQRNQTAGPLLKETAYGYIGKDPKDSSRQLYSERKALSEISIKDIERVLDPIIKQDLNKINAQSTNADTFSKNLADWGKCNNVKKIKLMLSRNPNTMIGIKDKNGKTYKYYESGENLFCDIYCKSPWDENAGWSMEIINSYEAHQKDFVPNWKKEYPMAKLIMRLFKNDVVAITTDGEREYRRIKKMTGNIVYLRKIFIARKQKGFEDIGEQYSANTLKTANARKAGIDIIGRAHDPYLEEHHENTGGKP

SEQ ID NO: 18430 - protein, 1095 aa, unidentified
  REGION 1..1095: note = Cas Enzyme sequence
MKWRLGLDMGTGSIGWAAVRLANKTPTELMDMGVRVFPDGREPAGDGRTGDPLNERRRTARQMRRQRDRRIRRKKTMLRYLIASGYLPAEKASRKTIERLDPYSLRNEAVSRLLRKEELARILMQLTGRRGFKSNRKEQVASQNKETAGMLAGIARLSATLGGKTLGQWMYKELKEKGVLRFRPETIKSKINYSFYPSREMYEKEFEAIRRIQESGHSKLDWDKLYRIIYFQRPLKRPARGTCLFYTDEERGYRALPSAHRFRILQEINNLKYFDEDNRLVDIAEHFKETLYNLLEKQKSLKFDQIRKEFSHIIGEPFTFLFNLEDIKRKELKGNTTSCDFRNEKYFGQQWDFLNWQTQDELVERLIIEDDETKIIELLEKYNLSADQKNNILKWTYPIGTTMLSARFMRECSDIMLNLFIPYHDAVAKMGMHHSDFEKKPIRSSLPYYGEILTSLTTKASGNQQDTEEIRYGRISNPTVHIALNQLRKLVNALIRRYGKPSEIIVEVGRNLKTNAKKKLEDFQAQALNQEKNEQVKEELKKLGFIQPSSKLIKKYRLWEELVPEGTGFARRCPYCGKPISASQLLSEEVEIEHILPYSRTLLDSKDNLTVAHKACNQIKKEHTPYEAFGHSPLGFDWETIKELSEKWPSNKRAKFSPQAMDLFDEKNSGFIQRQLTDNAYIAKATKNYLSIICDRDAIWTTSGRMTAKFRGEWGINTLLNANHDTWFKNRSDHRHHALDAIVIALCDRSIVAETSRINRMLGYGAITVPPCPLRREDIEKKLQSVIVSIKPDRGPEGKLYDETAMGAIRVLTRISPNELTEKDIPNINALKVREYLLRLMQEKKSELGDEAFIEVKKYLQQRYKFFDVLRTKWATTTALQNLSDRDIISIVDSHLREDVLRHVKEKSNGRKLTIVLQEYADKHQIRSVRYFPKGQVPVPISSNHNKAYLPYDFYRVDIWLLPGKTKKYEGVFISRTEYFQQKRINQKAPIRKPHPAAKLMMSLHKNDVVEILSPQINELARIAGYATTKNLIDIRPIAAADSIADWTRNTKPELTTSFWPRDCDGQNFKSINMLFTTYTIKQVNITVEGRLSTR

SEQ ID NO: 18431 - protein, 1095 aa, unidentified; identical to SEQ ID NO: 18430
  REGION 1..1095: note = Cas Enzyme sequence

SEQ ID NO: 18432 - protein, 1386 aa, unidentified
  REGION 1..1386: note = Cas Enzyme sequence
MRHILGLDIGSNSVGSAWIDTESGDVTTGVSVFPAGVDEADDKRGEPKNAKRRMMRRARITLARRAERKRQLRVKLIDCGLLPMSELDFKTLLENTDPWDLRRRGLDEALTPHEFGRVLLHLAQRRGALGLKIDKPEEGEEQSAESVEDGKVKAAITEVRAKMDERRARTFGEFIAMVRDERVMPITSKDSRPLSKRSGPREWCSPVRNKAASYEHCADRKMIRDEFAKLWKVQSDAGSATARLLTDKLRLALDNPEQDNRWRHKGLLFGQRATNWDLGSLGRCSLEPSERCVPHADMYASRYRVIETVNNLKIRETGKRERPLTEKERDSIVAFLSGPLGQETRGKRKGQPKRTVSVTDLRNFMGTSKDGWGRATKTSRFRFNIESDDDRSINTDWFNREIVHGAIGADAWATIPENLKEGFNRAILRHDPDDDDQEDKLRAGVMTWGGLDGSQADALVAVWKGRPRPDAKRLNMSRRAVRNLLTVMDQPWPDKNGLLGYRWPTQIEARKRVAGNAQFRDVTTEEPLDDVTRRRYATGAKGATARDRYYMNKHVLMKDGKEVIDKATGEPLAEPPPAPLVSNPVVRKAIHEVRRHVIEYMLANERKPDAVYIELAREAKMGKKAADRLLFRNRLRNRIRNDIIETHSLHAHTSTQQREAVDRVVLCVQQDGVCPLCGNDAVNTKITPRMAAEGSGCEIAHIIPRASGGHNGHSNIVLSHTRCNREMGRRTPRELWEGGVGFDGGMRWVEGIFGGVKRPKPSEVKNVQGPPLWACYFNARDDQRKIERFKKNVSDDGVQGFTERQAAATTYAARQVMAYLSDALFDGNGLTERATGSGEPQDARRIFASKGMWTNRLRREWGLFFDSHGARSQGLEESEEAERKEKNRGDHHHHAIDAAVIALTSRHVQIQWERREKAGDDEYWRHVKSNGNEASYKDWMENYRRNNRLRPPAPFEHPGVSVDEAIKAFRAEVKRAVFGEDGAKPICHRPVKRKLIGSLHKETLRGPVLDPDGELTGHFTARKSVIELSPKHLRLPRTETQKEAIERLAARRQREKGVNERAAKKWARSIVTSPGYKPAIIDPPPGKTGIVRDRALRVRLRECLEENSVDPESFGKGEIKKLHEAGRITQTSGVPIHSAVLLWTMNDPVIIARGRTAYGTSRLIRADNLAVDSAPSGDPGDADGLAVAQTAQRTRRSLRAYDSQNNHHIEIRENPKGKWSCEVVTAYDTAQRKLAKLRAMKDAGVPKPAVMRKMSKAERRRWRPVIAQIEAEHTLVNRSDNDDGRFVMSLCEGEMLWMKNKATGELDYLVVAEIEKAKKRVIVVPHWDARRATARKNAEGKQIPRSKRDEFAATPSDLKELAPPGEPHARKVYVTPLGIVTLLDRD

SEQ ID NO: 18433 - protein, 1387 aa, unidentified
  REGION 1..1387: note = Cas Enzyme sequence
MMRHILGLDIGSNSVGSAWIDTESGDVTTGVSVFPAGVDEADDKRGEPKNAKRRMMRRARITLARRAERKRQLRVKLIDCGLLPMSELDFKTLLENTDPWDLRRRGLDEALTPHEFGRVLLHLAQRRGALGLKIDKPEEGEEQSAESVEDGKVKAAITEVRAKMDERRARTFGEFIAMVRDERVMPITSKDSRPLSKRSGPREWCSPVRNKAASYEHCADRKMIRDEFAKLWKVQSDAGSATARLLTDKLRLALDNPEQDNRWRHKGLLFGQRATNWDLGSLGRCSLEPSERCVPHADMYASRYRVIETVNNLKIRETGKRERPLTEKERDSIVAFLSGPLGQETRGKRKGQPKRTVSVTDLRNFMGTSKDGWGRATKTSRFRFNIESDDDRSINTDWFNREIVHGAIGADAWATIPENLKEGFNRAILRHDPDDDDQEDKLRAGVMTWGGLDGSQADALVAVWKGRPRPDAKRLNMSRRAVRNLLTVMDQPWPDKNGLLGYRWPTQIEARKRVAGNAQFRDVTTEEPLDDVTRRRYATGAKGATARDRYYMNKHVLMKDGKEVIDKATGEPLAEPPPAPLVSNPVVRKAIHEVRRHVIEYMLANERKPDAVYIELAREAKMGKKAADRLLFRNRLRNRIRNDIIETHSLHAHTSTQQREAVDRVVLCVQQDGVCPLCGNDAVNTKITPRMAAEGSGCEIAHIIPRASGGHNGHSNIVLSHTRCNREMGRRTPRELWEGGVGFDGGMRWVEGIFGGVKRPKPSEVKNVQGPPLWACYFNARDDQRKIERFKKNVSDDGVQGFTERQAAATTYAARQVMAYLSDALFDGNGLTERATGSGEPQDARRIFASKGMWTNRLRREWGLFFDSHGARSQGLEESEEAERKEKNRGDHHHHAIDAAVIALTSRHVQIQWERREKAGDDEYWRHVKSNGNEASYKDWMENYRRNNRLRPPAPFEHPGVSVDEAIKAFRAEVKRAVFGEDGAKPICHRPVKRKLIGSLHKETLRGPVLDPDGELTGHFTARKSVIELSPKHLRLPRTETQKEAIERLAARRQREKGVNERAAKKWARSIVTSPGYKPAIIDPPPGKTGIVRDRALRVRLRECLEENSVDPESFGKGEIKKLHEAGRITQTSGVPIHSAVLLWTMNDPVIIARGRTAYGTSRLIRADNLAVDSAPSGDPGDADGLAVAQTAQRTRRSLRAYDSQNNHHIEIRENPKGKWSCEVVTAYDTAQRKLAKLRAMKDAGVPKPAVMRKMSKAERRRWRPVIAQIEAEHTLVNRSDNDDGRFVMSLCEGEMLWMKNKATGELDYLVVAEIEKAKKRVIVVPHWDARRATARKNAEGKQIPRSKRDEFAATPSDLKELAPPGEPHARKVYVTPLGIVTLLDRD

SEQ ID NO: 18434 - protein, 1127 aa, unidentified
  REGION 1..1127: note = Cas Enzyme sequence
MSDKNQKYRLGLDLGTNSIGWCIYSLDIDNKPETLIDMGVRIFSDGRDPKTKEPLAVERRTARGLRRILHRRKLRRKQMFRLLQEQGLMPNDVSEAVALKSLNPYELRVKALDAKLEPYELGRVLFNLSVRRGFKSNRKEAVQEKEKDSQNDAKSQNEKCEHLAKAIKDSGCRTLGEFLWKHKNTETQQTENDARDIGMRFVPGRSNYYPTRRMYVEEFDAIRKVQEPYYSGVNWDALHEKLFYQRPLRAQERGKCRYMPDKERTFKAMPCSQKIRILQEVYNMDYIDEYGKALPLEDTQTDSLISLLDKKEKLSFKAMKKELGIDESCTFNLERGGREYLQGNAAAVKLRNKNRFGELWDSLSLAEQDAIVEKLITADEDAEIISMLAQYNLTDEQKKKIVATVLPSGTAMLCKEVTEQLVEKMEQNKIPLTVAVQMLGYTYADQSVHEEDTLPYYGAILTGSTMGADPEADESEPELKYGKISNPTVHVALNQTRTVVNTLIKAYGKPQQIVVELSRDLKASREAKARIQKTITMNQKRNERDNKNITEITKIPYPNREDRLKYRLWEELGSDSLSRKCLYCGKTISGSEIFTKDIEIEHILPFGRTLFDGETNKTVAHTNCNRDKGDRSPFEAFGSSPNGYNWHEICARANSLKNPAKRALFAENAMEKFEKDNSFIQRQLTDNAYLSRSALRYLRCICKDVWSVNGSMTKLLRDKWNIDSILKRKIDDPEIAHFELKNDQIGQYKKNRYDHRHHALDASVIALIDRAMVQEISRLNKIRLKNRIEAPQMPVRRSELIEKVKHIAVSFKPDHGRQGKLSKETLLGKIKKIEKVDIDSIQTDDDIASIKDDAIRTRFETKHRELGNMTKVRAALKTEFPKLDVFKTYYVSRTPIVSLTEKNIDSIVDEKIKEKLKTFIKEHTDLSFAEQLQKFSETDWIGKPSADGKPGKKYRIVKVRCIHTDQKPISITSSVVPRYLCTEDYLAAVIWKIPSKKKDTEPEYKATFLRRDEFDVNNKPKKLEKPHDAAKYICMLYKDDYLEFTENGIAYLCRIAGLPASQENKIDIRPIYAASNCKDWIIATNDNMLEPCWRAKEQEKRISVNVLFGKHKAHSVTVNPMGRVFRK

SEQ ID NO: 18435 - protein, 1103 aa, unidentified
  REGION 1..1103: note = Cas Enzyme sequence
MKYRLGLDLGTNSIGWSVYSLDENNKPENLENLGVRIFTDGRNPKSKEPLAVERRTARGTRRLIHRKKVRRRATFRLLQKQGLFPVTKDEAKSIKLLNPYELRIKALDEKLEPFELGRVLFNLSVRRGFKSNRKDGSQEEVKENSKSEKLTQSDKCANLANAIKESGYRTLGEFLWKNQKENNGIRFAPDRMKYYPTRQLYIDEFNLIRQKQEVFYNDIDWDAIFDSIFFQRPLRPQERGKCQYLPENERTFKAMPCAQQIRILQDVYNLSFIADGKSKNLLPEWQEELILLLNSKEKVTFADMRKKLGLDEGITFNLESASREFLQGNSTAVKMRSKNRFGSLWDELTLKEQDDIVEKIITAEEDSEVMEMLNKYNLTQEQKDFITKKTILPSGTTSFCREFTETVIEEILKEKCQLHTAIQNLGYRYAEQTVEKYDTLPYYGKVLTGSTMGIKANYKNEEEQYGKISNPTVHIALNQTRTVVNALIKEYGKPEQIVVEVSRDLKASREAKAKIQQQITQNQKRNEILNKNIRDANPNLLYPNRLDRLKFKLWEELNPDNALDRRCIYCGKQISGADIFNDNTVQIEHILPFSRTLWDSEHNKTVAHTKCNQDKGNKSPFEAFGHNPAGYNWSDILERVSHLKDPQKKKLFAENAMESFDKDSSFISRQLTDNAYLSKMALRYLKAVVEKDTNVWAVTGGMTKLLRDKWDIDSILKRKIGDKEIAHFGLKDEQIGTYKKNRYDHRHHALDACVIALIDRSLVQEISTKNARHEKNRIEVPQMPVLRSELITRTKNIVVSHKPDHGAQGKLSKETLLGKIKCPELLPISEIKTEKDILMIRNDKVRSEFEKSFTETKDIKKTVKELKDIYPQLWIYKEYFVSRESILGLTEKNIDSVIDKSIQEKIKIYVEQHKGEKIEVVMQKFSEETGIKKVRCKNRVQTPIEIKNIDGTDRYLCPEDYFATVIWEIPAKKDGAKPTYEGVFIRRDEVDENNQPKVENKPHPAAKKIGLIHKNDCIEFVDNGVWYKARIAGYAATNNKLDIRPINSVQYCADWLISTSDIMTESCWKHSTGHNWISVNVLFGEKQARFITVNPIGKVFRKK

SEQ ID NO: 18436 - protein, 1103 aa, unidentified
  REGION 1..1103: note = Cas Enzyme sequence
MKYRLGLDLGTNSIGWSVYSLDENNKPENLENLGVRIFTDGRNPKSKEPLAVERRTARGTRRLIHRKKVRRRATFRLLQKQGLFPVTKDEAKSIKLLNPYELRIKALDEKLEPFELGRVLFNLSVRRGFKSNRKDGSQEEVKENSKSEKLTQSDKCANLANAIKESGYRTLGEFLWKNQKENNGIRFAPDRMKYYPTRQLYIDEFNLIRQKQEVFYNDIDWDAIFDSIFFQRPLRPQERGKCQYLPENERTFKAMPCAQQIRILQDVYNLSFIADGKSKNLLPEWQEELILLLNSKEKVTFADMRKKLGLDEGITFNLESASREFLQGNSTAVKMRSKNRFGSLWDELTLKEQDDIVEKIITAEEDSEVMEMLNKYNLTQEQKDFITKKTILPSGTTSFCREFTETVIEEILKEKCQLHTAIQNLGYRYAEQTVEKYDTLPYYGKVLTGSTMGIKANYKNEEEQYGKISNPTVHIALNQTRTVVNALIKEYGKPEQIVVEVSRDLKASREAKAKIQQQITQNQKRNEILNKNIRDANPNLLYPNRLDRLKFKLWEELNPDNALDRRCIYCGKQISGADIFNDNTVQIEHILPFSRTLWDSEHNKTVAHTKCNQDKGNKSPFEAFGHNPAGYNWSDILERVSHLKDPQKKKLFAENAMESFDKDSSFISRQLTDNAYLSKMALRYLKAVVEKDTNVWAVTGGMTKLLRDKWDIDSILKRKIGDKEIAHFGLKDEQIGTYKKNRYDHRHHALDACVIALIDRSLVQEISTKNARHEKNRIEVPQMPVLRSELITRTKNIVVSHKPDHGAQGKLSKETLLGKIKCPELLPISEIKTEKDILMIRNDKVRSEFEKSFTETKDIKKTVKELKDIYPQLWIYKEYFVSRESILGLTEKNIDSVIDKSIQEKIKIYVEQHKGEKIEVVMQKFSEETGIKKVRCKNRVQTPIEIKNIDGTDRYLCPEDYFATVIWEIPAKKDGAKPTYEGVFIRRDEVDENNQPKVENKPHPAAKKIGLIHKNDCIEFVDNGVWYKARIAGYAATNNKLDIRPINSVQYCADWLISTSDIMTESCWKHSTGHNWISVNVLFGEKQARFITVNTKGKVFSNK

SEQ ID NO: 18437 - protein, 1088 aa, unidentified
  REGION 1..1088: note = Cas Enzyme sequence
LGTESIGWSVFSLDDECRVQNLEDFGVRIFHDGCNPKNRESLATERRKARSQRRIIFRRRMRRLKTFRLLQREKLFPETKSECIQLKSMNPYELRIKSLDEKLAPYELGRVLFNLSVRRGFKSNRKADADEKNETKSEKMTQAQKIDSLAQAMKSSGARTLGEFLWKNREENGGTRFAPGRMNYYPLRKFYMDEFDAIQKNQQKFFSSVDWDAIRHEIFYQRPLQPQERGKCIYLPEKDRTFKSMPCSQKMRILQDVYNLNFTKNGKQVNLPDEWRDELIKLLDSEEKVTFDKMRKKFGLDEKITFNLETESRTFLQGNSTAKKLRQEKCFGRKWDEFSLSEQDDIVETLISADENSDVEKMLEKYSLSQSQVENIERLNFQSGTANLCREISEKIVAQMEESHCRIHEAVEKLGFKYADQSVEKFDRLPYYGKILTTSTMGKKSNPRNDEEKFGRIANPTVHIALNQTRKVVNTLIETYGKPRQIVVEVSRDLKAGRIAREDILKRQAQNRKENERLNKEIRDENPQIPFPNKNDRLKQKLWEELGEGTIERRCVYCGKPIGGADIFSSSIQIEHILPFARTLCDSEFNKTVAHEKCNAFKGNRSPYEAFSGNPGGYNWSEIQERASNFKDPKKRRAFTENAMEIFEKESGFLSRQLTDNAYIAKSALKYLKSVVEKDSDVWAVSGGMTALLRKKWDLDSVLKRKIGREEIANLELKDEEIGTYKKNRFDHRHHALDAFVIAQIDRSMVQEISRLNQIYRADSIKVPELPVLREDLIEKTKNITVSFRPDHSSAGKLSEETPLGKIKKVRQIPVAELKKEQIKGIRSDKVRADFEAKFGETKDMKKTISLLKDIYPTISVYEEIFVKREYLSSLNENNIDKIIDEKIKNALKEFIKNHPDEKFEAVLEKFKNETGIKKVRCKNHVQVPIEIVNKDKTKRFLCPADYFAAVVWEIPPKKADGKKTYKATFIRRDQANSAEEKPQSDAKKICRVHKDDYLEFCHEGKWYKCRVAGYDTIHNRLDVKPIFATTSCRDWIISTNKRMLEPCWKPTKEHNCISVNKLFGEMQAHYITVSPIGKVCRKKQKFD

SEQ ID NO: 18438 - protein, 1003 aa, unidentified
  REGION 1..1003: note = Cas Enzyme sequence
LGTESIGWSVFSLDDECRVQNLEDFGVRIFHDGCNPKNRESLATERRKARSQRRIIFRRRMRRLKTFRLLQREKLFPETKSECIQLKSMNPYELRIKSLDEKLAPYELGRVLFNLSVRRGFKSNRKADADEKNETKSEKMTQAQKIDSLAQAMKSSGARTLGEFLWKNREENGGTRFAPGRMNYYPLRKFYMDEFDAIQKNQQKFFSSVDWDAIRHEIFYQRPLQPQERGKCIYLPEKDRTFKSMPCSQKMRILQDVYNLNFTKNGKQVNLPDEWRDELIKLLDSEEKVTFDKMRKKFGLDEKITFNLETESRTFLQGNSTAKKLRQEKCFGRKWDEFSLSEQDDIVETLISADENSDVEKMLEKYSLSQSQVENIERLNFQSGTANLCREISEKIVAQMEESHCRIHEAVEKLGFKYADQSVEKFDRLPYYGKILTTSTMGKKSNPRNDEEKFGRIANPTVHIALNQTRKVVNTLIETYGKPRQIVVEVSRDLKAGRIAREDILKRQAQNRKENERLNKEIRDENPQIPFPNKNDRLKQKLWEELGEGTIERRCVYCGKPIGGADIFSSSIQIEHILPFARTLCDSEFNKTVAHEKCNAFKGNRSPYEAFSGNPGGYNWSEIQERASNFKDPKKRRAFTENAMEIFEKESGFLSRQLTDNAYIAKSALKYLKSVVEKDSDVWAVSGGMTALLRKKWDLDSVLKRKIGREEIANLELKDEEIGTYKKNRFDHRHHALDAFVIAQIDRSMVQEISRLNQIYRADSIKVPELPVLREDLIEKTKNITVSFRPDHSSAGKLSEETPLGKIKKVRQIPVAELKKEQIKGIRSDKVRADFEAKFGETKDMKKTISLLKDIYPTISVYEEIFVKREYLSSLNENNIDKIIDEKIKNALKEFIKNHPDEKFEAVLEKFKNETGIKKVRCKNHVQVPIEIVNKDKTKRFLCPADYFAAVVWEIPPKKADGKKNVQSNVYPARPGEFSRRKTAIRCKKNLQGTQGRLSGILP

SEQ ID NO: 18439 - protein, 1043 aa, unidentified
  REGION 1..1043: note = Cas Enzyme sequence
MGTNSIGWCLIEDDKRIVDIGVRIFSDGRDPKSGASLAVDRRDARAMRRRRDRYLGRRSAFLSTLIAHGLMPADADETRLIAARDPYDLRKRALSEKLSPFEIGRALFHLNQRRGFKSNRKADRKAKPGEEGKIASGSRALIQAMAEAGADTLGQFLAGRDTKRVRLNSENQEYDFYPQRSDIEYEFGRIWDAQANHRPALLTDAAKAALSRILFFQRPLKEQEVGYCTFAGMNGVSADERRLPKAHPLFQQRRLYEDVNQLRVVAAGAADRALTRDERDALILKLQDKKKVSFESLAKVIKLAEGERFNKESENRKELIGDEVRAELADKKRFGTRWLHFGLEEQLRIIDRIQNEEDPATLLGWLESKYGLDEAAAEAVANARLPEGHGRFGETATRRLLDALKADVVTYDKAAEAAGFHHSDHRTGEVLDRLPYYGQLLTREIAPGKAEYGDADERRYGKITNPTVHIGLRQLEKLVNAVIAVHGRPDQIVVELARELKLNEKDKDEHKKRIKRDTDAAIARGEKLALEGFQDTGANRILLRLWEELNPGNPLDRRCPYCANPISIHQLFAEADIDHIIPYSRSLDDSAGNKVVAHRACNRVKGNKTPHERWGHDSDRWDKISAQVARLHKSKQWRFGPEAMERVERDGGFLARQLTDTQYLSRIAGKYLRSLYPRAEDGRVDVIPGRMTAMLRRLWGLNSLLPDHNYVENQHSNAPKNRLDHRHHPIDAAVVAATTLSRMQQIAHAAARAEDKDLDRLFEDLPQPWPGFREELGEKLARVTVSHKPDHGRKGRPAKHRDVTAGRLHNETAYGLTGEVNAKGDPLVVWRVPLSSIQPRDLGDPERISDRALREALYDATRGLSGKEFEKALAAFSKADGPFHGIRRVRLRRPLNVVPVHDASGKAYKGYQGDSNALYNVWAMPDGKWVADIISTFDVHQRSFVEKRPHPAAKKILSLRQNDLLAIERDGGPREIVRVQKYSQNGQIFLIAHQETGNMVERNSNPNDPFKFYGPGANALKAMKARQVRVDPLGRVFDPGPRE

SEQ ID NO: 18440 - protein, 1071 aa, unidentified
  REGION 1..1071: note = Cas Enzyme sequence
MGENYRLGLDLGTNSIGWALLRLDGQGEPCGLLDLGAHIFSNGRTPEKGLPLAANRRVARGMRRRRDRYLQRRRRLQALLSNCGLLPISKDERKALGRQDPYTLRARALDGPLKPYELGRTLFHLNQRRGFKSNRHMGEEDEKQRGEIAERIEKLREQIDPKIPGRRTLGEWLHRHHARGEPVRFRPETATLYPTRSMYEQEFDEIRRAQEQKQTLTPSQWDALRAIIIDQRPLKPVEVGRCTLDPSSPPEPRAHKALPLAQEFRIYQEVNNLRICEPGQRKERPLQENEREIIIEILLSGRDVQFSNLAKKIGIDEKSRINLETEKRKKIDGDATAKELRKKKFFGKRWNQFSSESQNNIVKSLLNKQGSDDELTTTAQHEWGLDREAALKLLHVRLLQGTVHLGETALSRITPELAKGIRYDKAVGRHYQHHSDLSGEGQSRELPYYGEALPRYMMPVRKSDGSSDEQDHGRIGNPTVHIGLNRLRKLVNEIIILYGKPASISIELARDLKNPPEVRRMIEKRQKEDQEKNERRKQEIEDAGGAFTPASKRKIRLWEEQAVGGKKLCIFCGDAISIRQLLSENTEIEHLLPFRRTADDSPANKVVAHIECNRRKGDHSPFEAFGTEASGKYEYSRILNRARNLKDNKAWRFDENAMERYEHGRDFLDRHLNDTRYLSKIAREYLTTICSKGKVDVVTGQLTYMLRGKWGLSTSNLLRDGESSDVRGAKDRTDHRHHAIDALVVALTSRSLVQRVAQCAGRNRATRKTGIDHLFSGLPKPWDGFSHEAIRQRLAKMVVSHRPDHGLAGQLHNKTAYRTIDRIEEGREPFSIDKYQVVTTESLASTKRAPKILSAVRDAGLKEALKELWDSIESTDSEKPTKKWKKFTELAASRGKLEEFGFGGAKHGVRRVRVVEENQTVHPIFHPSSQKGPYKKAVKPDSNAFMDVFKMPNGKWQAVTITRLAANAPDFKKRHNELKPHPAARRIARLFVGDMVAISENGNRHIYRIQQLSGQRVWLSPHNEANAARRNKDRNDPFKLTQKSVNVLRNFSFRKIHVDILGRIRDPGPRS

SEQ ID NO: 18441 - protein, 1071 aa, unidentified; identical to SEQ ID NO: 18440
  REGION 1..1071: note = Cas Enzyme sequence

SEQ ID NO: 18442 - protein, 1059 aa, unidentified
  REGION 1..1059: note = Cas Enzyme sequence
MQYRLGLDVGTNSLGWAAVQLKENEDLLMPGPLLDMGTRIFSDARHPKDKSSNAGQRRGPRSMRRNRARKIMRREFMLRALVKYGLMPGDKTERKALERDDPWMLRAWALDKRLTPYQIGRALFHLQQRRGFKSNRKTDGKDGGKLKDGIEQAEQMMAVSNARTLGELFGKRRLEREQENAKLPKGQRQPQRLSRVRSSGEGAKLTYDFYPQRDMILDEFELIWAAQSTHHPQIMTDGAKAHLYHILSHQRPLKPQKSGKCTFLPEEPRAPKALPTAQYVRILQEVNNLRVGATGEAQRELNLEERAEVIKHLTHNYPKKIPKTAKRTFKSIRSLLSLPESQIFSHETTKRDHLVGDLTAATMMQKDAYGPAWFDLSCAQQDDLISYLIESEQFDDWAHDGEEVQGFGPYAAETFGLSEDHARAVFDTHLKDGHGKLSKAALDRLMPHLEAGLRYDQAKEKEFKNSDLGDGEMHDEGLPYYGEILGRHTAFQKDDPKNTEEKYGKIANPTVHVALNEIGKLINDLIKRYGKPTQIVLELARDLPLSDRGLRELESRQKKNQDANDARRAELAGMGLADTYNNRLKLRLYEEAEKAFGGVIVCVFTGETINKTNLFSDNVEVEHILPLSRTLDDSIANKVLSVRRANREKKNRSPYEAFGESSDGYDWEMIAQYARDLPDNKRWRFDPDAMQKWEERGGGDFLARHLNDTRYIARLGKKYVEALYGGQVQRGQSRQVWVVPGRLTSDLRHFAGLNNLTGLTGGNRKDRTDHRHHAVDALVIALTDQAMIKRAADLAKREDKIAHYEIMQVMAEPLQRYRREAEDRLSKLVVSHKPDHGFQDAMHNETALGLTDAKDTKGQLIVVTRKPLEALGPKDIEKIVDPQLRWLFASATEGLTGKAFTTALSDTGKAQNPPVKRVRIHMPMNEKSLVTIKHGPNGEHVKAYKGDGNYCYDVWMGDKGKWVGEVITTYKAYQMAQGDPKWWQSLKGREGQNLIMRISKGDMLEIDWHGQREIVSVYKFSFGKINMAKHFEANASARVNAVRVTVSPSGKVKRHKHNS

SEQ ID NO: 18443 - protein, 1059 aa, unidentified; identical to SEQ ID NO: 15910
  REGION 1..1059: note = Cas Enzyme sequence

SEQ ID NO: 18444 - protein, 1049 aa, unidentified
  REGION 1..1049: note = Cas Enzyme sequence
MNYRLSIDMGATSLGWCLLTVANNEPNSIACMGVRIFPDGRDAKSREPMAVTRRAARGARRRRDRTQKRQRVLMDFLIKNGFMPDDAKERKKIEKYDPYELRARALDGQVSLYELGRTFFHLSQRRGFKSNRISDRGNDEKGAINTGIENLQEKMSGFRTLGEYLFHSEQKRARPHTEKGKNSYVFYPDRSMYLDEIQQILKKQKQFHSELTEDTCQCLINIIFYQRPLKAPKIGLCTFETQNKESRARLAYSEVQNYRIWQEVNNLDLKRYAEDDPMLTNEDRQKIAKALQNKKDMSFAGIRKLLNFSRDMVFNLESNKRKKLLGNDTQFYLQQEECFGVEWQKLSDDKKNEIIDLLMEEDDEAEIISALTGKYGLTQEQAVKTADIPLKDGYGRLSIKAIRKILPYLQQGEIYSKACELAGYHHSQRETGEIFDRLPYYGEVLEDAVIGGSFDPEDRKTPEKYFGKINNPTVHIALNQLQKLVNEIIATYGHPDSIHVELARDLKCGQKQLKEINLRQAKETKDNERITAELIKLNVKQNYANRMIYKLWEDLSADPAKRCCPFTGKQIAVHKLFSGDFEVEHLLPFSRSYNDSRANKVLACKTANRRKAGRSPFDAFGQSPEWNDILARVENLPEDKKWRFQENAWEIAKGEGEDLIARQLSDTQYMSRISKRYLSKVCDPRRVVGIPGQLTAMLRRKWGLNDLLSDGDLKDRTDHRHHAIDAFVVGCTTRSLLQRISAEARRFYDDSDLYERRLKLVASMPDAFPDFYEQLGQNLDNIVVSYKPDHGNAYKAQKNGKTTGKLHEDTAYGFVKESDKKGKAIYVVRKPIDSFKDQKGVKAIVDDTIRNKLLEATSGMNGVAFIDAVQAYARKNNHRRFRIHVEKSKNAMIGISRAGKEVQHTTPYKYYATGGNYCAEIYCSDKGPKAGKWQCEIISTYDAHKPGVMSEWRKNHPTAKLIMRLQIDDMVAYEDGDETKICRVKKMTGGLVYLRNHKIAKEDGDQFSWAASPNLMQQSNARKVSVDILGRVRDPAGRIAYKKSGVAVA

SEQ ID NO: 18445 - protein, 1189 aa, unidentified
  REGION 1..1189: note = Cas Enzyme sequence
MTKKVLGLDLGVGSIGWCLITLDKDEKPQSILGMGSRIVPLSTDDATEFTQGKAITKNKMRTVARTIRKGTDRYQLRREALKKVLSEHKMLPDESLIKLPLLELWELRARAATPGEQLSLAELGRVLLHINQKRGYKHAKADEAAEAEAESKSKKEKEGYVAQVKGRYQALKEKGQTIGQHFAEELRANQQTAPRGVYYTYRIKEQVYPREAYIEEYDQIMKEQRTFYPELLTDALIGRIRDRIIFYQRPLKSCKQLVSTCEFEKKERVVQVKRINKEGVEELVQRTITIGPKVAPKSSPIFQVCKVWESIQNIRLYYPDGTERVLEQEEKQKLFDYLQKNDKLSLTALRKELKIKPKDKLWCDKLLEKGIAGNTTAAILRKAFKGYEQYEDLLRFDLVRRDSHEADEDGVIRPIIDESYQNEPLYKLWHILYSIEDRADMYRALVGQLGIKREDLDNGLMDALYKIDFVKQGYGNKSAKFICKLLPHLQEGKMYSEAAEAAGVRHSDSMTAQERDERSLLDEIPLLQKNALRQPVVEKLLNQMINLVNALKREHGEIDEVRVELARELKMSREEREETTKSNNAREKENKAIAERIVEYGLTPTKSRIQKYRLWQESAESCIYCGKHVDLVQFLRGEGIEVEHIIPKSILFDDSMSNKVCACRSCNEKKGNRFAMEYIQSKGWEQDYIKRVDSLFHDKDKKISYSKRQRLLMLPKDLPEDFIERHLRLSQYISREAQGILRKGIRLVSASEGGVTAKLRQLWGYDNILRDLNLERYRSMGETEVVTVEHRDGERTDERIKDWSKRKDHRHHAIDALVVACTRQSYIQRLNRVNAEADREEMDAFIKQQQEHKLSKKEKLSLLEHWLIRQPHFTTGEVTKHVEGILVSLRPGKRTISRGRNIYKRSGKTDVQRGGLIPRGALSEETVYGVICVDGENKVVCRYPLQSLKPKDVGYIVDEVLREKVRERITQHGEKEAFAKPLYLDEAQTQEVRSIRCFTGKDLSKLIPLRYNAESEAVGFVAPGSNHHLALYRDVDGRLVESVVTFWQAVARIRYGLSAIVTHPREVMEQAFSIPDLPEEVLEALPISRLRLMEVLRINDMFLIGMKDGKIQAAIEGEDYPTLSRHLYRVQKLSSMYYVFRYHLETEVKDEKNTSGEIPKFYRITSFSAYQKLNPRKVKIDLLGRISLA

SEQ ID NO: 18446 - protein, 1091 aa, unidentified
  REGION 1..1091: note = Cas Enzyme sequence
MRWRAGFDLGTNSLGWAAVELDKDDRPIRLIAAGSRIFSDGRDPKSGASLAVDRRAARAMRRRRDRFKQRQDGLIKHLTHVGLFPTGKAERAALAGLDPCALRAHALREPLPLHHIGRALFAIDQRRGFKSNRKTDRGKNEEDGKIKQGVNRLYDAMRDAGAETLGEFLHQRRISAKDQNSIPSVRTRLRPETGEDAKGDGYDFYPDRHMLEDEFRLIWERQAPHHPHVLTPDNEKLFHEVIFYQRPLKQPKIGTCTFVSGEERLPKAHPLFQRRRLLEEINALKIVHAGETAKSLTLEQRDALYLKLKDKRTVTFESLRKLLKLDEDARFNKESENRKELKGDEVAAELGAKTRFGKGWPNLPADRQWQIIARIRNQESDEDEAALIAWLKEEFGLTEEEARATAGARLPEGYGRFGETATTKLIEALRAEVIVYSEAVAKAGLGHHSDFRTGEYYRNDKGEIELPYYGAALERHIMPGTGDENDPQELRIGRLTNPTVHIGLNQLRRVVNTLIRRLGPPEQIAIELARDLKLDEERKREINTRNRLNREAAEKRSRKLTEELHQPDKGSNRALLKLWEELNLENVLDRRCIYTGKQISITMLFSGEVEVDHILPFSQTLDDSNGNKLLCMREANREKRKRSPHEAFGHRDDWEEIAARAARLPKDKRWRFEPDAMSRFDAQGGFLARQLIDTQYLSRLAREYLSTLYPGTGEGSSHVWVSPGRLTEMLRRSWGLNSLLPDHNFAGAAEQPKNRRDHRHHAIDAIVIAVTDRHLLQKIAREAGSHGYEAANRVTSDLSTPWESFNDEVREIVRSIVVSHRPDHGTASKNALTKGQDKTAGRLHNDTAYGLTGEKDAKGNNLVVHRVPFDSLKKPADIENIRADDLKVALRAWTANLEGKAFEARLRKFHELGPLPFRGIRRFRVIEPLSVITVNDKNGRPYKGYKGDSNYRYDIWELKDGKWEAEVVSMFDAHQPGWTSSVRANNPTARKMLSLHQNDVLAIERGSRGRELMRVVKFGQSGQITLAEVQEAGDLKRRDAVSNDLDPFKYFAPTPGGLKKIKARQVRIDELGRILDPGPRDRPGSSPGPKA

SEQ ID NO: 18447 - protein, 1090 aa, unidentified
  REGION 1..1090: note = Cas Enzyme sequence
MDWRLGLDLGANSLGWAALRLDRAGDPIGILAMGSRIFSDGRDPKSGASLAVDRRAARAMRRRRDRFKQRQAALLKYLIRDGLFPADQADRQRLADEDPYALRARALDEELSLFEIGRALFHLNQRRGFQSNRKADRGQDDEAGKIAVGVDRLNQQMEEQGARTLGEFLHQRRRAATDANHIPSVRTRLRPETGEGAKGDGYDFYPSRALIAEEFEEIWAAQAPHYPDTLTQQVHDRLYEIIFHQRPLRAPQVGQCTLVAGETRLPKAHPLFQKRRLLEEINALMIVRPGEIAQRLTPEERDTLYLKLKDKRTVSFATLRKTLKLDSAARFNKESENRTELKGDEVAAELGAKTRLGTRWQHLSGDQQWEVVHRLMALESQADEAAFRDWISQTYDLLPEQAAAVLGARLPQGHGRFGPTATTTLIDSLLHDRTEDGRVVVYSEAVQRSGLGHHSDLRHDRDDEDVTELPYYGVALERHIMPGTAEPTDPEEMRIGRLTNPTVHIGLNQLRHVVNRLIRAYGPPKEIAIELARELKLSEDEKKKRNSENRDNRLAAEGRSKKLEEIRQRDTGANRALLKLWEELNPGNVLDRRCIYTGEQISIDMLFSDRVEVDHILPFAQTLDDSNGNKLLCLREANREKRRRSPYEAWGHTDRWPDIAERASRLPKPKRWRFEPDAMQRFATEDGFLARHLVDTQYLGRLAREYLSWLYPGRGEGSGHVWVSPGRLTEMVRRKLGLNDLLPDHNFGGGADQPKNRLDHRHHAIDALVVAIVDRGMLQAIARASGQDGSEGRERIHIPAPWDGFRDDLRVAVNGIIVSHRPDHGTVAKAGLARGRDQTAGRLHNDTAYGLTGETDAKGNSIVVRRIPLSAIKKPADIARVRDPLLRNALAEFTKGLDGKAFEARIGRFHELGPLLYRGIRRVRVVETLTVIPIRDAEGRAYKGYKGDSNYRYDVWEMPDGKWRCQVVSMFDAHQSTEQARPHPAARKILSLQRNDILAIERTEGDRELVRVVKFSEKQFAVAPPHEGGSLKTRDGNADDPFRYLYPSPNTLKGWRARQVRIDELGRVLDPGFPARKSVRRTRPRAAPVD

SEQ ID NO: 18448 - protein, 1090 aa, unidentified; identical to SEQ ID NO: 18447
  REGION 1..1090: note = Cas Enzyme sequence

SEQ ID NO: 18449 - protein, 1109 aa, unidentified
  REGION 1..1109: note = Cas Enzyme sequence
MGTIFSFDLGSTSCGWCVLGLDGRGAPSSIIAAGVRIFSDGREPKSGTSLAEGRRMARGMARRRDRYKRRRKAVLRTLAEFGLMPDTDAARKALVAETNDRAADQVATHVYALRARALEEKLPLFHIGRALFHLNQRRGFKSNRKTDKRSNEKGAIELGIDQLRTRMAEAKAPTLGAFLAMRRAKGEWVRVRSGATTPGDQQEPDASRGNKTIYDFYPERRLLEEEFDAIWETQRPHYPEILTEERRRHLHRVMFFQRPLKPQTPGKCSFNPNEERLPKAHPLFQAFRLHKEVNELELVQPDQTHRKLDIEQRDRLIGQLRTQRSATYASLRKTLKLPGAKVRFNKESESRLKMAGDEVAAALADKACFGQRWFALPLDVQWAVVRQLREEEDPDVLIDWLMTEHGLTRDAARATANAALPDGYGRLGETALRTMLGYMQEAVIPEADAARLAGYDHALARVGEGYDLLPKYQEILDRRIPPGSGNPNDPYDVEMGRITNPTVHIGLNQLQLLVNGLIRRFGKPDRIAIELARDLNQSDEQKKKINQDIAKNTRDAEKRSQKLRDIGQRDNGHNRMLLKLWEELNPDKPEDRCCIYTGRPINIKMLFSNAVDIDHILPWSLTLDDGQTNRILCLREANRQKGNKAPADVADWQSRYDEILERANRLPEPKRWRFARDAMAQFEKKRDFLDRQLTDTQYLARLAHDYLGALYDDEEPDADGELFRRNHVIVVTGRMTEMLRRAWHLNDILNDHNYGETAKGKNRKDHRHHAIDAAVIGVTTRSMLQKIARAAGEGEEVGSEDALRKIPVPWDGFREELRDRIGAVVVSHKPDHGTLPGPAGARGQTAGRLHMDTAYGITREIDAKGNTVVVRRKMLTTLTEKDVDSIRDEELKARIFAATDGKTGKDFTAALVAFARNDRKFAGIRRVRVTEGLAVIPIRPRDDLEGKPYKGYKGGANYRYDVWELKNGKWEVEVVSMFDAHQRNWQSPFLAAKAPDGKQLNHNARKVMSLQQNDMVAYELTQGQRIIARVRKFGQNKQIWFDAHNEAGKLDERHNDKADPFRDFSKLPGGLKDIKLRQIRVDETGRVFDPGPQDRESRKARKAAIRGSA

SEQ ID NO: 18450 - protein, 1103 aa, unidentified
  REGION 1..1103: note = Cas Enzyme sequence
MMAEQKKPVWRLGADLGANSLGWAAIELSAAVNGKPLSILAAGSRIFSDGRDPKSGASLAVDRRDARAMRRRRDRFQQRQKALIKYLIADGLFPADEAARKAMAAIDPYAVRARALDEALSLPELGRALFHLNQRRGFKSNRKADRKADDDAGKIAIGIDRTRDAIAEDEAAAGAEPGSWTFGKWLHERRTKGQSVRTRLRPESGEAAKGDGYDFYPGRALMEEEFDAIWAAQAPHHPDVLTNDVHDRLHEIIFYQRPLKAPQVGMCTLIPGDRRLPKAHPLFQRRRLLEELNALMIVRPGEVAQRLTREERDILFLKLKDKNKVSFASLRKALKLDPDARFNKESENRTDLKGDEVAAVMGSKTRFGNRWVHLSVEAQWDVLARLDDVESEAEDAAFRAWLSETYALTPEEARAVANAPLPPGYGRFGETATCKLIEALRDGKKDGRVLVYSEAVTDAGLGHHSDRRTGEVFEDAKGRPQLPYYGVALERHIMPGTGDPSDPEEMRVGRLTNPTVHIGLNQLRRIVNSLIRAYGPPAEIAIELARELKLTDDDKKRINRENNENRLNAQRRSEKLLAIGQADTGANRALLKLWEELNPANVLDRRCIYSGQQISIDMLFSAAVEVDHILPFSATLDDSNGNKIVCLREANREKRKRSPYEAWGHNARWDEIAARAAQLPRNKRWRFEPDAMDKFSDEGGFQARHLVDTQYLARLSREYLATLYPEKGEGSGHIWVSPGRLTDMVRRKLGLNDLLPDHNFGGGADQAKNRLDHRHHAIDAVVVAIVDRGMLNAIARASGQEGAEGRERIIIPEPWDGFRDALRETVNRITVSHRTDHGTASKAGLPKGKDATAGRLHNDTAYGLTGETDAKGNSIVVRRVPLSSFKKLADLDRIRDADLRAALYRHLDGREGKAFEQAIAAFPDLEWHPFRGVRRVRVTEPLTVIPIKDRNGRIYKGYKGDSNYRYDVWELPDGKWVAEVVSTFDAHQQGWASLVRFHNPTARKVLSLHQGDVLAMERQGENRKLMIVTQFWQNGQIRLVEHNEAGKLEERNKSQDDPYKNYTPTCGGLKKIKARQVRIDELGRVLDPGFPARTARRKTRKQA

SEQ ID NO: 18451 - protein, 1107 aa, unidentified
  REGION 1..1107: note = Cas Enzyme sequence
MKRALRWRLGVDLGANSLGWAAILLNEAGEPAGFLAAGSRIFSDGRDPKSGASLAVDRRDARSMSRRRDRFKQRQRALIKYLVRDGLFPADEAERKALAALDPIELRARALDEALPLAHLGRALFHLNQRRGFKSNRKADRKDDAESGKIAIGIERLRDAMQEAGARTYGEWLHLRRKSAVNANAIPSVRTRMRPESGEGAKGDGYDFYPARALLEEEFDAIWEAQSPHHPDVLTAEVHDRLFEIIFHQRPLKAPKIGKCMLVDGEDRLPKMHPLFQRRRLLEEVNALMIVRPGEKARRLTPEERDLLVLKLKDRAKVGFDSLRKVLKADSDSRFNKESENRTHLAGDEVAAIMGAKTRFGTRWAHLPAEEQWDVIQRLNAVESDADHRAFLDWLAATYGLEEEQARAVANAHLPQGYGRFGLTATTRLIEALTSGRTPEGRTEKAAPIEPGRVIVYSEAVEHAGLGHHSDRRTGEVFEDKQGRPQLPYYGVALERHIMPGTGNASDPEEMRIGRLTNPTVHIGLNQLRRVVNRLIRAYGPPAEIAIELARELKLNDEQKKDLNRKNAENRAAAERRGKKLEELGQPNTGANRALLKLWEELDENAIGRQCVYSGQVISAAMLFDGRAEVDHILPFSATLDDSNANKIICVREANRDKGNRSPCDAWGHLDRWPEVAARAARLPKNKRWRFEPDAMERFREEGGFLARHLVDTQYLGRLAHEYLAALYPDRGEGSRPIWVSPGRLTEMARRKLGLNDLLPDHNFGGGADQPKNRLDHRHHAIDAAVVAIIDRSMLQRIARASGMEGADGREKIEIPPPWAGFRDDLRKVVNAIVVSHRADHGTVSKAGLDKGKDQTAGRLHNDTAYGLTGEVDDKGNSIVVRRTPLSGLKKLEHIEQIRDTDLKAALYRQVEGLEGKAFEKAIAEFPKLHWHPYGGIRRVRRVEPLSVIPIRDREGRAYKGYKGDSNYRYDVWELPDGKWVSEVVSMYDAHQPGWTSKVRASCPTARKVLSLHQNDLAAATPPDGERLLLRVVKFGQEGRLYLAPPEEGGSLKGRDADKNDPFRYISLFPAKQKAWRLRKIRIDELGRVLDPGFPARTTRRKTRKAA

SEQ ID NO: 18452 - protein, 1094 aa, unidentified
  REGION 1..1094: note = Cas Enzyme sequence
MPWRLGIDLGTASLGWAALQLDTQGKPDAILAAGSRIFGTSTGAGRDSKSGESLAVARRDARAMRRRRDRLQQRQRALMKYLVVDGLFPADPAARKALEMLDPFALRARALDEALPLPHLGRAIWHLNQRRGFKSNRKTDRPDDDSGKIALGVGRLRDQMAKDEARAEADSGSWTFGKWLYERRKPTEGHPEGLSVRTRLRPEDGAEAKGMGYDFYPDRALIEEEFEAIWTAQAPHHPDALTPEVHDRLFEIVFHQRPLKAPVIGTCTFGNGGTRLAKAHPLFQRRRLLEEVNALKIVRAGEVAQRLTPEQRDLLVLKLKDKAEVSFEALRKTLRLDEDARFNKESENRTRLKGDEVAAVMGAKTRFGNRWVHLSPDEQSMVVARLEAAESDADVAAFRGWIADTYGLARERTKAIAAARLPQGHGRFGETVTRGLIDALTHERDPEGRVIVYSEAVERLGLHHSDFRTGEIHDTLPYYGAVLDRHVMPGTGNPEHPDDQRIGRLTNPTVHIGLNQLRRTINRLIARFGPPAEIAVELARELKLTDDEKKRRNRENNENRQAAEMRSAKLREIGRLDSGANRALLKLWEELNPGNVLDRRCIYTGEQISIERLFSGEVEIDHILPFTATLDDSNGNKLVCLREANRFKRKRSPWEAWGGTAQWPEIAERASRLPRGKRWRFEPDAMGRFSAEGGFLARQLVDTQYLSRLARDYLSALYPDTGEGSGKVWVSPGRLTEMVRRKLGLNDLLPDHNYAGGADQPKNRLDHRHHAIDAIVIAIVDRGMLNAIARASGLEGQEGRERIHIPAPWPGFRDAVAETVRAITVSHRPDHGTAGHGTGSTAGRLHNDTAYGLTGETDAKGNSIVVRRKPLGSLKPVDIPAVRDPDLRAALHRATEGLTDKAFERALTDFTRLGPLPFRGIRRVRLTEPLSVIPIRDREGRIYKGYKGDSNYRYDVWELPDGTWTADVVSMFDAHQPGDRPRPHPAAKRVLSLHQDDVIAIEPDGGERRLMRVVKFGQNGQVTLAAPHEAGDLKRRDATSNDDDPFKYTAPTPGGLKKARVRKVGVDEIGRVRDPGFPARTARRATRPRPLAAE

SEQ ID NO: 18453 - protein, 1001 aa, unidentified
  REGION 1..1001: note = Cas Enzyme sequence
DEVLSLHELGRALFHLNQRRGFKSNRKADRKADDDPGKIADGIENLKSKIREAEAEAGAEPESWTFGKWLHDRRVHAPDQNNIPRVRTRLGPQGEDAKDGYDFYPSRFLLEQEFTAIWETQAQHHPDVLTHDVYKRLFEIVFHQRPLKAPQIGMCTLIAGDRRLPKAHPLFQRRRLLEELNAQMIVRPGEVAQRLTREERDKLFLKLKDRNKVSFESLRKALKLDPDARFNKESENRTELKGDEVAAVMGSKTRFGNRWVHLSIEEQWAVIERLGDVESDAQDDAFRSWLAERYELTPEKTRAVTNAPLPQGYGRFGETATRRLIDALRDGEKDSRVLVYSEAVTAAGLGHHSDRRTGEVFEDKDGRPQLPYYGVALERHIMPGTGDPSDSDEMRVGRLTNPTVHIGLNQLRRIVNRLIRAYGPPAEIAIELARELKLTDDDKKRINKENNSNRLDAEKRSEKLLAIGKPDTGANRALLKLWEELNPANVLDRRCIYSGVQISIDMLFSAAVEVDHILPFTATLDDSNGNKIVCTREANREKRKRSPYEAWGHSARWEEIAARAAQLPRNKRWRFEPDAMEKFKDDGGFLARHLVDTQYLARLSREYLATLYPDKGEGTGHIWVSPGRLTEMVRRKLGLNDLLPDHNFGGGADQAKNRLDHRHHAIDAVVVAIVDRGMLNSIARASGEEGAEGRERIKIDPPWTGFRDDLRTAVNAITVSHRTDHGTASKAGLPKGKDATAGRLHNDTAYGFTGETDAKGNSIVVRRVPLLSFKKLADLDRVRDPDLKAALYQHLDGLEGKAFEKAIGEFRRREWHPYGGIRRVRVTEPLSVIPIRDRNGHIYKGYKGDSNYRYDVWELPGGKWVTSWNDIDGVALSSVVSTFDAHQSDVQPRPHPAARKVLSLHQNDLVAIERDGEERKLMRVVKFGQNGQITLAEPQQAGDLKRRDAASNDDDPFKYFSPTCGGLKKAKARQVRIDELGRVLDPGFPARSKQRKTRKPS

SEQ ID NO: 18454 - protein, 1107 aa, unidentified
  REGION 1..1107: note = Cas Enzyme sequence
MVGKAVKHWRLGADLGANSLGWAAIELDAPVNGKPTGILAAGSRIFSDGRDPKSGASLAVNRRDARAMRRRRDRFQQRQRALIKYLVADGLFPADEAARKAMAAIDPYAVRARALDEKLTLPELGRAFFHLNQRRGFKSNRKADRKADDDAGKIAVGVDRTRAAIADAEQEAGAEPGSWTYGKWLHERRAHATDSNAIPGVRTRLRPETGEGAKGDGYDFYPGRALMEEEFDAIWEAQAPHYPDVLTNEVYDRLHEIIFYQRPLKAPQVGMCTLIAGDPRLPKAHPLFQRRRLLEELNALMIVRPGEIAQRLTREERDTLFLKLKDKGKVSFATLRKTLRLDPDARFNKESENRTDLKGDEVAAVMGAKARFGSRWAHLSLDEQWDVIARLDAVQSEAEDAAFRAWLVETYTLAREQARAVADAPLPPGYGRFGEAATRRLIDALRDGEKDGRVLVYSEAVTLAGLGHHSDRRTGEIFEDAQGRPQLPYYGVALERHIMPGTGNPSDTDEMRVGRLTNPTVHIGLNQLRRVVNRLIRAYGPPAEIAIELARELKLTDEDKKRIAKENNDNRLAAERRSEKLLSIGKPDTGANRALLKLWEELSPDVASRRCIYTGTQISIDMLFSAAVEVDHILPFTATLDDSNGNKIVCLREANREKRKRSPYEAWGHTARWEEIAARAAHLPKNKRWRFEPDAMEKFRNESGFLSRHLVDTQYLARLAHEYLGTLYPDKGEGSRPIWVSPGRLTEMVRRKLGLNDLLPDHNFGGGADQAKNRLDHRHHAIDAVVVAIVDRGMLNRIARESGREGAEGRERIIIPAPWEGFRDDLRAAVNAIVVSHRADHGTVSKAGLPKGRDTTAGRLHNDTAYGFTGETDAKGNSIVVRRVPLSSFKKLSDLDRIRDADLKAALYRHLDGLEGKAFEKAMADFPDLEWHAFPGIRRARVTEALTVIPIRDRNGHIYKGYKGDSNYRYDVWELPGGKWEADVVSTFDAHQPGWTSPVRDRHPTARKVLSLQQNDVVAATSPDQERLLLRVVKFGQDGRLYLAEPQEGGALKARDADKGDPFSYFSFFPAKQKAWSFRKVRIDELGRVLDPGFPARTARRKTRRKD

SEQ ID NO: 18455 - protein, 1090 aa, unidentified
  REGION 1..1090: note = Cas Enzyme sequence
VQSKTSFAFDIGTNSIGWCVFELDRLNDPVGILASGARIFSDGREPKSGTSLAEGRRLARGMARRRDRYKRRRKAVIRTLIEYGLMPDDPAARRALVAETNDKRSGQVASDVYALRARALDEKLPLHHIGRALFHLNQRRGFKSNRKTDKRDNDQGKIAEGISRLKAEIGNAGARTFGEYLHRRRLAGRWVRVRPSRMPGKDDKPEDGYGFYPERSLLRDEFDAIWMAQAVHYPDMLTQERRQHLETVIFYQRPLKPVQVGHCSFNPAEKRLPRAHPLFQEFRLYKEVNELAIVDRAQHAEKLTIEQRDALVTQLKAQREASFSALRKTARAPTGTRFNKETESRSKMKGDEVAAELSAKTRFGQPWFSLPLDERWAIVDMLRTIEDPLELTAWLEQNYTLLPERIDAILAARLPEGYGRLGETALTEMLAELKADVIPEAEAAKRVGYDHALLTRGGGHDELPKYQEVIARRIPPGTEAPDDPYDVRKGRITNPTVHIGLNQLRRVLNALICRYGKPEQIAIELARELKLNEEQKREKNIEIARNTRAAEQRSAKLVDLGVPDTGYNRVLLKLWEELDLRAPENRVCIYCGEAIGIGTLFSSAVDIDHILPWSKTLDDSQANRIVCHVACNRQKANHAPADVPQWQTRYDDILERASRLPLNKRWRFGRDATKKFADEETFLARQLTDTQYLSRLAHEYMAALYPDEEPDAWGELTRKNHVRVITGRMTEMLRRQWGLNSILADHNQKNRNDHRHHAIDAAVVGVTTRALLQRIATAAGSREALALEETIGRIDPPWSTFREDLGAAIDRIVVSHKPDHGTLPRPGKMGQTVGQLHNDTAYGLTDEIDERGNPIVVRRKPFLSLTDKDIPNIRDVELRTRLRAATSGNKDFATALLTFKQNDLKFSGIRHVRVTEGLKVIPIRDAAGHAYKGYKGDANYRYDVWEMPDGKWIAKVVTLFDAHQSGFDWSSLRPHPAARRVLFLQQGDMVAYDHPRDGETIGIVVKFGQNGQITLVPHTASGDLKRRDALPNTEEEAIARNIRDRNGDPVFDPFKYFAPTAGGLKKINLRKLHVDEIGIVRHLKRRGGEG

SEQ ID NO: 18456 - protein, 1132 aa, unidentified
  REGION 1..1132: note = Cas Enzyme sequence
LLPKGIGAQKLLKYLFSFDLGTNSIGWWVYELDPTGEPSASKDGGVRIFSDGREPKSGNSLAEGRRVARGMARRRDRYKRRRKAVLRTLSEYGLMPADPKARAALVAETGDAKEGQQASDVYTLRARALDTRLPLHHIGRALFHLQQRRGFKSNRKADRKANDNDKGAIALGADRLIFEMREDGARTLGEFLAKRRGHDPSARGNVRVRIDVDSGDQTTDDGKPAKPGYNFYPQRAMLEHEFNCIWDAQAAHWPDVLTDARKAHLFRVMFYQRPLKAPIVGRCSFNPSEQRLAKAHPLFQAFRLYKEVNELEIVMPDQSHRKLTLDERNALIAKLRSVKSAGFPALRRTLKLSERGARFNKEGEARDKLLGDEIYSALADKTIFGGRWAKLSVERQWEIVEKLREEADPFALHQWLVEHAGLSDDEAVKAADVKLPEGYGRLGPTALNAMLEELKAEVITEAEAAKRAGYDHALARVGDAVDVLPRYQDILERRIPPGTNDPDDDYDIRKGRITNPTVHIALNQLRAVTNRLIARYGKPERIHIELARELNQSEEQKREATSRNAKNRREAERRSKCIEDMNEGFRNQGSRSRIDDNGHNRQLLKLWEELNPDCPHDRRCIYSGTVITPTMLFSGAVDIDHILPWSRTLDDSQANRLLCTREANREKRNYAPSEVPQWADRYDDILARAQRLPQPKRWRFAHDAMARLEKDRDFLDRQLTDTQYLARLAHDYLGALYPDEEPDGDGVVKRRNHVVVVTGRMTEMLRRRWGLNGILPDHNFADPTKAKNRKDHRHHAVDAAVIGTISRSLLKRIADAAREGEAQGAEDAIRAIQPPWPSFRDDLKAVVDRIIVSHKPDHGTLPKPGDRGRTAGQLHNDTAYGLAKDDDGNPIAVHRKPFLSLEPKDLPSIRDPQLREWLEANTKGLSGKDFTARLMKLRKDGDNRRARRKKPGRYSGSPFQRIRRVRVVERLALIPIHDATGRAYKGYKGDANFRYDVWEMPDGKWQADVVTMFDAHRPDIDWQARRPHPAARKVLSLKQNDMVAYEQPGVGFAVGRVVKFNTAGQIYFAGHLEAGALKARDADPDDPFKYFSKSANGLRDVKARQIRVDEAGRMSDPGPRDRSSRGRKAPPG

SEQ ID NO: 18457 - protein, 1029 aa, unidentified
  REGION 1..1029: note = Cas Enzyme sequence
MSRRRDRYKRRRKAVLRTLIEFGLLPDSTSARKALMAETNDRRAGEIAADVYTLRARALDERLPLAHVGRALFHLNQRRGFKSNRKTDRAANDQGKIAAGISKLGTAIDAAGARTLGEFLHKEKLAGRWVRVRPHRMPSKIEGKEEDGYGFYPERSFLQKEFDAIWNAQAHYYPDILTDERREHLATVIFHQRPLKRPKVGKCSFHSDEFRLPRAHPLFQEFRLYKEVNELALIYPDQHSEKLTREQRDLLVHMLRTTRKTRFSAMRAKILKKQGGIRLNKESDSRLDMKGDEVWAELADKKRFGARWNSFSHGQQWEIVDKLRETEDPLALAAWLGDTFGLEPEKVDAISSARLPEGYGRLGATALSEIVEELKADVIPEAEAAKRAGYDHVMLGRGDEVDELPRYQEILARRIPPGTDEPSDPYDVRKGRITNPTVHTGLNQLRRVVNALMKRYGKPEQIAVELARELKLNDEQKQEINREIAKNTRAAERRSEKLQELGQPDNGYNRLLLKLWEELDPVEPLNRKCIYTGKPISIGILFSSEVDVDHILPWSQTLDDSQANRILCLREANRAKGNHAPADVPQWQGHYDAILERAARLPQNKRWRFGRDAMKKFKDDEGFLARQLTDTQYLSRLAHEYLGALYPDEEPDAHGELRRRNHVRVIPGRMTEMLRRHWGLNSIISDHNGKNRSDHRHHAIDAAVVGVTTRSLLQRIATIAGGREALALEETIGGIEPPWPGFRDDLKVMMDRITVSHKPDHGTLPKRGEPGRTAGQLHNDTAYGFVYDIVDGDRVQRFEKGVPVVVRRKNFLTLSEKDIPTIRDPLLREALGEATYGLSGKDLTAALEKFRKRDDYKHIRHVRVTETLSVIPISDLDGIAYKAYKGDANHRYDVWELPNGKWVEEIVSVFEAHQTDWTSKVHTDNPAARKVLSLHQNDMVAYEHPSDGYTIGRVVKFSSGMVAFAGSREGGALKARDADKLDPFRYFYKAAGAMKSVRMREVRVDEIGRVFDPGPQDRDSRKQRSNGIN

SEQ ID NO: 18458 - protein, 1020 aa, unidentified
  REGION 1..1020: note = Cas Enzyme sequence
LVADGLFPADVAERKALEREDPFALRARALDEALPLPLLGRAIWHLNQRRGFKSNRKTDKPDEDAGKIAIGIGRLREKIAEDEAACDAEPGSWTFGKWLHERRQPTEDHPDGRSVRTRLRPEDGADAKGTGYDFYPDRALLEEEFDAIWTVQAPHRLGVLTREVHDRLYEIVFHQRPLKAPVVGTCTFGSGETRLAKAHPLFQRRRLLEEVNALKIVRAGEIAERLTPEQRDLLVLKLKDKNEVSFESLRKTLRLDPDARFNKESENRTKLKGDEVAAVMGAKTRFGTRWQHLSPDEQWTVVSKLEAAQSDEDVAAFRAWIVDTYLFTQEQAKAVSAARLPQGHGRFGETATRGLIEALTFERDSQGRVVVYSEAVTALGSGRHHSDFRTGEIHDSLPYYGTVLERHLLPGTGNASDPDEKRIGRLTNPTVHIGLNQLRRTVNRLIERFGPPAEIAVELARELKLTDEEKKKRNRENNENRLAAEMRSRKLLEIGQPDTGANRALLKLWEELDGNALGRQCIYTGQVISPTMLFSGEVEVDHILPFQATLDDSNGNKLVCIREANRLKRKRSPFETWGHTDQWEDIAARAARLPRGKRSRFEPDAMERHKEDGGFLARQLVDTQYLSRLAREYLSSLYPGSGEGSSKVWVSPGRLTEMVRRKLGLNDLLPDHNFAGGADQPKNRLDHRHHAIDAIVIAIVDRGMLNAIARASGLEGQEGRERIKIPAPWEGFRDAVSETVRAITVSHRADHGTAGHGNSSTAGRLHNDTAYGLTGATDAKGNTIVVRRKPLGSIKPADIPTIRDPDLRAELHKWIDGLDGKALDQALAAFSGTGPLQFRGVRRVRVTEPLSVIPIRDREGRIYKGYKGGSNYRYDVWEMPDGKWITTWKDCEGVIRSSVVSMFDAHQPGELARPHPAAKYVLSLMQGDMIAIERQVGVREIMLVTQFWQNGQVRLVAHNEAGKLDDRNKSPDDPYKNFSPTCGGLKKLRARKVGIDEIGRVRDPGFPARTRRRPTRPKAA

SEQ ID NO: 18459 - protein, 1082 aa, unidentified
  REGION 1..1082: note = Cas Enzyme sequence
MTNLFAFDMGTNSIGWAVLGLDTQGQPIRILDAGVRVFSDGREPKSGTSLAEGRRNARGMSRRRDRYKARRKAVLRTLSEYGLMPADPAARRALVAETNDKTFGQVANDVYALRARALGEKLPPHHIGRALFHLNQRRGFKSNRKTDRRDNEQGMIAAGIAELEARLDGRTLGQYLHDMRGTDPRERGAIRVRPHMARNDKGREVAAYGFYPQRAMLEKEFDAIWAAQAAFYPDLLTEERRKHLFRVIFYQRPLKAPEPGKCSFNPTEQRLPKAHPLFQRFRLLKEVNELRIVTETHSQGSPLTREQRDILLTLLRDRKESSFKSLLGKIAKGQPDARFNKASDSRDKMKGDELAATMSDKTRFGQAWFSMAEAEQWRIIEKLRDTDDPLELNAWLETEYGLPPERRDAVAAARLPQGYGRLGETALRTMLDYMQAEVISEAQAAKEAGYDHALARKGAGLDELPNYQEVLARRIPPGSGEPDHPYDIRMGRITNPTVHIALNQLRRVVNALIRKYGKPAEIAIELARDLKLSDDQKREVNATIARNTREAERRAARLADEGIDNTGHNRALLRFWEDLAQDPLDRVCVYCGGAIGAASLFNGSVDIDHILPWSRTLDDSRANRILVHRECNRLKRNFAPFEVPEWRERYQDILVRAAKLPANKRWRFAPDAMQRYEGEKDFLARQLSDTQYLARMAHEYLAALYPDEEPDEWGVFARRNHVRIVPGRLTEMLRRVWGLNSVISDHNRKNRNDHRHHAIDAIVVGLTTRAMLNRISHEAARGIDVGSDDALRRFKLPWPGFHDEVRAIVGRLLVSHRPDHGTLPGKDGQGSTAGQLHNDTAYGLTGETRKDLPVVVRRRPFLSLEPKDIEAVRDDRLRDHLQTETSGLAGNAFAEALRRIQESDKYYKGIRRVRVTEALNVIPIRDARGRAYKAYKGDANFRYDVWELPNGKWVHEVVSMFEAHDRAWASKVHADNPAARRVLSLKQNDMVAYNHPESGLTYGRVVKFGQNGQIALAAHHEAGALKSRAADPEDPFKYFFKSAGAARDVALRQVRMDEIGQIFDPGPQDRESRLARKAAGRR

SEQ ID NO: 18460 - protein, 1023 aa, unidentified
  REGION 1..1023: note = Cas Enzyme sequence
MITLGIDLGTNSLGWCLIETKGEPGSHGEGRIIDIGTRIFSSSEMAGRDAKSKESLAVARRQARTMRRQRDRRLRRKGRLLRQLIEFGLLPQDEPERKRLLRETGDGKGADLAHSVYALRARALDEALPAHQLGRVLFQLNQRRGFKSNRKADGKDNEAGKIAVGVSRLHQAMDADGARTYGEFLHQRRLAGKSIRTRLRPEQAAETNPDADAKGDGYDFYPDRAELENEFDRIMAAQAAHHPELLTEERISALRETILFQRNLLPPKVGKCSYNPDEIRLPKAHPLFQEFRLYKEVNELALLDEHQVSHKLAPEQRDALVLKLRGAKTASFASLRKVLKLGPEYRFNKETETRTKLDGDAVAAALSAKECFGPVWSTYSLDRRREIVRKLRDEADPETLRAWLRDDCGLDEMRVEAVMKVRLPEGYGRLGETALAHLLDALKHDMDENGRVITEAAAARKIYGRTNSEDDPNREALGVLPKYQEVLTRHVPPGDGSPADRPDDKDPSYDRHMGRITNPTVHIALNQLRRVVNALIRKHGRPDRIAIELGRELKLTDRQREEVNRVINKNTRDAERRSEELKKLRQADTGYNRLRLKLWEELNPGQPLNRVCIYTGEPIGVHDIFSAEVDIDHILPYSKTLDDGLANKILCKTRANRVKRNRAPADVGEWEAIYDDILARAGNLPKNKRWRFGRDAMDRFSENEGFAARQLTDMQYMSRMALSYLAALYPAEEADIDGVLRRHSRIRALPGRMTEMLRRVWNLNDILHDHNFTDPTKPKNRKDHRHHAIDAFVIACTSRALIQRIASASEEIEAQGSEKVLAGVPEPWAGFREELRDRVLDSVVSHKTDHGTVSRTGYANGMGQTAARLHNDTAYGLTQELDDNGNPLVVRRMMLDAFESQKDLMAIRDEDLRDALWEATRDLSGKAFKQALRDFSRAPRLNGAANPFRGCAVSGCWNRCTSSRSATGTAGLIRLTRAIPIIVTMSGNWRMADGWPRSCRHSMPIGRIGGRGSGRRTRRPRKC

SEQ ID NO: 18461 - protein, 1399 aa, unidentified
  REGION 1..1399: note = Cas Enzyme sequence
MENKTKTVLGLDLGTNSIGWALVKEDIENNSNSNIIDCGVRVIPLTSEEIDNFEKGKSITTNKDRTQKRHARRNLHRFKLRRKVLIETLKKAGIIDEQAVLTEDGKGTTHELIRIRAQAADQQIKLDEFARVLLAINKKRGYKSSRKTKSAEEGEAIDSMDIAKILYEKNLTPGEYVLNLLEKGKNFIPDFYPSDLQEEFNRIWEKQKEYYPEILTDELKKEVINKSGRQTWTILKKPFNIVGIKRTGKKHEQRLENYQWRVEALKNKLDLEQLAIVLQEINTQLNRTSGYLGEISDRSKQLYLNKITVGQYLYNQIKENPHNRLKNQVFYRQDYLDEFNKIWDTQSKFYPDILSPELKKEIRDIIIFYQRPLKSQKGLISICELEGREAEIKVDGKTKKKVIGPRVIPKSSPLFQEFKIWQRLNDIIVKNPVTKEEYYLSEEHKNIIFEEVNLKGKISDKELLKLLGLKSKDWEVNFKTIEGNSTNAELLKAYQEIINTAGYDNQELKKMDAGKAVPFLEELFESLGINKHIVKFSTDLPDNEIEKQPHYQLWHLLYSYEGDNSKSGNESLYKHLKEKFGIEKEYAQPFIKINFKSDYGNLSAKAIKKILPHLKDGKDYSEAAQLAGYNHSHSFTKKENLERELVDKLEILPKNSLRNPVVEKILNQMINVVNAIIDEYGKPDEIRIELARELKKSAKERQKTTEYITKSTKEHEQIKKILEKMPPFNQGVRITRNDIIKYKLWKELEPNKYHTLYSNQYIPLEKLFSKEIDVEHIIPKALLYDDSFSNKTLEYRNVNLEKGDRTAYDYMIDKYGENSEEFKRYITVIEELYKDGKISKGKFNKLLMKQSEIPDDFIERDLRNTQYIAKKAKELLLKLVRTVVPTSGTVTDKLRQDWGLVDIMKELNWDKYNQLGLTDYEETKDGKRIKIIKDWSKRNDQRHHAMDAITIAFTTHNHIQYLNNLNTIYNLHEQEEVQHDKSNLYGIKEKITELVEDKNGNKKRKFKKPMPNLRSEAKKHLENILVSYKAKNKVVTQNKNYIKVSANNPRKNKIKRKGKHYLVQDTLTPRGQLHNETIYGKIKQPLKKPVKLSKKFTAKQAELIINKEIKQTVLNHLAKYNNKHEIAFESKTLKKDPVIFNNKPLKEVHCFEEFYTIRKDISPDLKIDKVIDEKAKKILETRLKEYNGNAKEAFANLDKNPIWLNKEKGIAIKKVTIKGINNAEVLHTKKDHFGKEILDENNHPVPADFVNTGNNHHVAIYRDKDGNLHEKVVSFFEAVERANQGMPIIDKDYKKGLGWELLFTLKQNEMFVFPNPETGFNPSEIDLLNPNNKSLISPNLFRVQKIGSSDYWFRHHLETNIKNNIKGITYFRITNKNTLQNIKKVRINHTGKIVAVGEY

SEQ ID NO: 18462 - protein, 1023 aa, unidentified
  REGION 1..1023: note = Cas Enzyme sequence
MRRNRDRRLQRIRAFADKLVEFGLVEQHGVAGRHEYKVGIIDLGIDPYEARSNAATTQVSKEQLARALFHLCKRRGFLSNRKADGEDKESSERKSAMNGLAEILQKRELTLGQYLKKRIDAGLHVRFRGEEFDDSENSAIYPKRSMYADEFAAIRKVQGNRFFPDEQWDELFDIFAFQRPLLPKEPGACSFEHGRDGREKHPRASRHLPITNSFRILQEVNNLRYQSTDGEMELDADQRQVLCEALEHQKEMKFSKIRTLLKLKKTSKFNLESDRRKGLKGNATACDMRSLFVAHDMVWDDLDTDIQNDVVQTILDADDLTDFIVANRKNEWLLPPELVRELSQKYYPSSHGHISRRCMEKLLPLMESGMQYWEAAREIYGDHTDYSQFATGEVLEELPYYGEVLRGTTTPVRVTPTTPEDEKTYGKIANPTVHVALNQLRKLINALVKRYGSPYEIHLELARELKTAGKSYQELLKGLADNTKKNEMRRKMFEECFPGQTPSGLDMVKMRLWEELAEDDGDGGSPAMARMDVYTGRTIGFRQLFSDEIEVEHILPYGRTYDNSIANRTVTFREVNRRKGGDKLPYDFANVDTEIDAEDMLARAQRLPRAKRWRFQPDAAEIYERILTKNMTASERKQYDADSSGAFIDRQLVDTQYISRIAARYLVPVVGAPSRVIPVNGHVTNLIRNKWHINAVKAKGKENERQDHRHHAEDALIVALADRGLIKRIADETRIQQKGRKDYRAKLRFPERPAWVTDERIKEVADRINVSFRQDHSREAKLYQETAYGLLPEGDRWWKKGYNAVMRRSITSLKESEINQIRDDAVRKAVVDFLYRPEVQSIKKWEDRLALLARTKLQIGSAVKKVQIRRVRIVIKNQSVRQIPSAPYKGYVPDSIAFCDIWHAPKYNKKGKANGKWGYVGAFVNYADAIRFEGEEDSLHEKYKPHPAAKKIMRLFKNDMVMLSDSLGVESPFRVAGYATTANKIDIQLHTESAGKQNFKAIPVLMEKMFMRKVHVDVDGRFS

SEQ ID NO: 18463 - protein, 1140 aa, unidentified
  REGION 1..1140: note = Cas Enzyme sequence
MGRLVMSKILGLDIGTNSVGSAWVDTDTKTITLGVSVFPAGVEESQTERGAPRNQKRRQARSQRRTVQRRARRKKRMRRFLLERGWMPSDPAGQKTWLELNPWTLRREGLHRKLTALEFGRVLLHMAQRRGALGVEAGEDDKEEGKIKESITALREAMGDSRAETYGAFMADLFDAETALITGTRAQTIRKPIRNRSDATGNPVYRFCPDRDLIREEFDKLWKAQRSHGGELAAQLTDDLRRQLDEPSSNRGSWRHQGILFGQRQTYWDAGTLGHCSLEPTDLGCPLPDMYAQEFRVLETVNNIRITPLGGWTRRLDPEERGKVIAALRRQKTGSIATVRKALGLNKPQSRDRFMLSLEGDPKRKLNTDWFYREIVRGVFGQEAWAALTQATRESVNRAILKFDPHDSNHRQRLAAGCHDWWNLDAQQTERFLRAWAGRPRVEQRLKLSRRAIRNLLPYLRRGLNPMEAQKEFAEDPASGASDLQRLRYAPGGGFPPRSLRRFLEKHPDSLPPAPMLTNPVVRKAIHEVRRHIQAHIRKAGCKPDRVVVELAREARLPGVVRNRQLADNRKREAERKAVADQHGLNQLTRTQRERAIDRVLLCRQQKNLCAYSTPDATITERIAAEGKNVEIDHIIPRSRGGHNGLTNKVLCFTAANRGKGDQTPAEWLDAESFAELERRLRHWQKDQPVKWKNLHRHAPIIEDFTSSQLTDTAYASREVARWLSDALYGNRQDGRRRVFCTRGSYTALLRGDWGLSRAKNRADHRHHALDALVVALTPNHLQDLARAMRVVERARAEGNPPPRRQPVPPPWGDRNSFRAQVIDQADKLVVAHRPERRRLAGPLHKDTLYGPIAGHPTQFTQRIPLGKLKAKHLRVPEGWEDLRVRLQQAASPAAKRELRRAMLQLRDVPPGKSGVVRDRWFREELRAALRALGLDPDRLTPAQSKRLAAEQGLSLPSGVPVRRLTLLKTFRNVVRMPSRGQAKPSRARPERVYDSQSNHHVEIREDAEGKWRCQVVTTFQAAQRVRPPKCSGREPLPAVDRSDNEHGRFVMSLCIGETVYMKHPQTGQPGFFTVYKLDERSLHFTPHYDAGRDRATDNAPAREKVELSVSQLKRLNAPPHATPKKVWVGPLGDTKFLDR

SEQ ID NO: 18464 - protein, 1048 aa, unidentified
  REGION 1..1048: note = Cas Enzyme sequence
MRILGLDIGTTSIGWAVLDDSGKSGTIIASGVRIFPEGVDRDQQGGEQSKTQARRESRGARRQIARRARRKRFLIRYLQSVGLLPTDETELEEVIGMNPYPLRAKALDEQLSAYEIGRVLIHLNQRRGFLSNRKTDKAKPSETKGMLAEISALAGRIDETGCRTLGEYLHRIGTGEIESVEDEPKGIRNRHTRRDMYEHEFETVFETQQAFHPELLTDDVHDRIHRRIFFQRKMYWPKSVVGRCELEIEKGLKKGRIRRCDKAERCAQRFRILQEVNNLKFTDRSTGEERWLCAEERVIVSNALAKSKEVKFDAIRKKLGFTDSVRFNFENDDGTGRKKLQGHITDASLAGKNVLGKEYWKLDDHIKDRIVRIIISDDSEEKAIEKLLSKCNLNREQAERALGAHLPDGYANLCKFAIKKLLPHLEDGKFYMGNDASDSALHAAGYLRPDEQVIDQQSLLPESPDLPNPIVRQALVEVRKTVNAIIREHCKDRTENDERPFDRIHVELARETKNSFEKRKEIRIENVKRRKLREAAGDEIAGAGDRVTRSKINKYLLWQEQNRTCVYSGKSISLKQMLSDATDVDHILPRWRSLDDSMANKVVVFRNENASKGDKTPYEWLADSDPEKYDEVCFRAWKLGNYKYRRFTQKELELDKFVARQLVDTQYISRCVTQYLQCLGAKMVMPRGSMTAELRRRWELNNILSDSGEKTRADHRHHAVDAITIALITQARIQHFAESRGDGQFCPWEDLRQQAEQSVMGIKVSHRVLRRLSGALHEDTFYGPTQKFSSNDPEQCIPPGSLDHCVNRRHAKDWTEDSGTFVRRKVVAEIKNAKHLAKVRDKGIREILADHLRNLDVDPLGKSAYPKGCFEGDHAPTMPSGVPIKRVRLLENKSTLRQVSDRRDFHYTQPGNNHHITYRETTDKKGNPTWIGEVTTMWDAAVRGRTKVNGKSLPLVDQSDTEAGKFVMSLSIGELFEIDDPKGELGRMLCVVRKIDQTGRLHYKQHTDARKSGDLTPLNLYVSPKQIHEKDARKVTVTPVGQIRWAND

SEQ ID NO: 18465 - protein, 1165 aa, unidentified
  REGION 1..1165: note = Cas Enzyme sequence
MKVLGLDIGSSSVGSAWVDTEAEEVCLGVGVFPAGVEERDTGRGAPKNHARREKRSQRRGLARRSERKRLLRSTLQEWGWMPRDRADIDVWMQVNPWHLRRAGLERELSPAEFGRTLLHMIQRRGASWFDEDSPDEDRMDEKKADPKKQPMKAANEALADQLAGKTFGQFMADLMDERAAEFQPIRNRNDIEGNPRYEFFPDRQMLRDEFEKLWDAQKALAGELSAQLTDDRKRRLSSPAGEGVWKTKGLLWGQRKTYWDAGTLGRCDLEPTDRVCPRCDMHAQEFLVLQDVSVIRLTPEGEHPRRLTDEERRKVIAALEGQKTATAKTVRTALGLNRKGVKEFVTINIEQDATKKLNTNWFARGIVAAIGPNAWISMSPEDRETVNRAVCKFDPREAADVSKLSLGCRKWWGLSDEQTNAFIAAWKTKPRSENRINLSRKAVLNLLPHLRQGFSVTEARQLFAEDGGHDAPMEQRERYALGRPRANHATRHFLAKHPDQLPLAPKLANPVVRKAIHEVRRHVAEYMRKFGCKPDRVVVELAREARLSAKAANRIVADNRRRRDERNAIAGDEELKGVFQDATQRDAARAVERVLLCRAQKGICAYSSLDGNEGRHVTERQAAEGTGLEVDHVIPRSRGGGNGRANKVLCYAATNRGKANQTPKEWLGEDMFAEFARRFRHWKDSPNKEDRKRWDNIHKDVFGMDEYVQSQLVDTAYASRQVTEWLEQALYGETATDGAKRHVFSTNGRYTSLLRRHWGLFYNRDGSPPEGKSRSDHIHHALDAVVIACSGPERVQQIAAAWARVDQQRSEGVYAGDFSIAPPWGTPDAFRAQVIDLARRQIVSHRPERRKIAGPFHKETMYGPILDADGKLTSEFTSRIAVSKLTPNHLRVPAHWDTLADKLRQAETKAERNEIRRQMLSLEDEKPGKSGIVRDRWHRHEIRQALCAAGLDPDQFKDRQLKDALRAAGLVVSGRPVKKVTLRKVFNYVAVAPRRGPDFATGETVVDPNPQSARVYEAQSNHHVEIRRNPKGKWVGKVVTTYDAARRLHPPRSSGLDSRPAVDRNDDATGRFIMSLSVGEMVHMSHPGTGEEGYFSVFKIDNASTPVVHFTPHWDGGKSKEDETFRQREDIHRSPAQLQACEVDGNPPRKVFINPLGAVQVLVGD

SEQ ID NO: 18466 - protein, 1344 aa, unidentified
  REGION 1..1344: note = Cas Enzyme sequence
VQPAKPVRHRLSLDIGSNSVGSAWLDLGAPKDRSPLVVGTSIFPAGVDESDDKRGEPKNAKRRMVRRTRITLARRAQRKRELRLKLIEVGLLPPTADEFKVLLETTDPWDLRRRGLSEALTAHELGRVLLHLAQRRGALGLKLADPEAGDDDGGDDGKVKAAIGEVRARMLAARARTFGAFIALERDKRVHAIITPDNRRPDARLGSREYRDPVRNKGGNYEHCADRAMIRAEFAELWKEQVKRAPWAKKILTGALRAALDDESGDTSWKHKGLLFGQRRQSWDLGTLGRCVLEPSERCAPHADMHASRYRVVETVNNIKVIDKVTGERALTVEEREKIIALLRGPLGVHEKGKFAGQPKRSCSVTDIRVALGLGRGGKDKWPKLNTERDEDREINTDWFNRAVVHGAIGEAAWAQMPEKLREGFNRAILRHQPDDDGDDAKLKSAVMSWGRLDEARADALVAAWRTRPKLEQRLSMSRKAVRNLLTVMDRRGEGGQAQPWKDDPAGPAHRWITQIEARKIIAEDAEFLDVSSGQPMDTHARRRYATGAKGLSARDRHYLKKHPTDLPPAPTLSNPVVRKAIHEVRRHIVEYARVFGCFPDEVYVELAREARMGAKDADRALFRNRLRDRIRKDIVDDRAFNLQNRSFSQQRAAVDRVVLAVQQGQRCPLCGKGGLTPLKAANGDGCELAHILPRSRGGHNGHGNMALSHTGCNRDMKNRTPRELWAATLKGGFEEGMRIAESIYGEVQRPKPSEVRKSQGDALWACYFDWREDARKLNQFAKDIKDEGGMTNRQEAATKYAARQVMAYLADALYGGEGLPERGGTRKIFATDGLWTSRLRREWGLFFDPHDARAKGLSEADGHAAKEKNRGDHRHHAIDAVVIGLCTAEVRNAWDARERAAEQAGINTFDDEQMDAYRRNNPLPIPAPFKSRDDLREHVKLAVFGDAKDRSGFAKPIAHRPVKRKLIGALHEETLLGPVLDGKGNLTGNYTAKKSVLALDPNHLRLPRPETQKEALERLTDARMASTSAEVTKKEAKAWAESMFKARGYRPVLVDPAPGKSGIVRDVALRRTIRACLEQARINPDDFTANQIKRLVTDDQGKLVGLRQRSGVPIKSFVLLRTMSEPVVIARKAPDYATGNMVTDPDPASQRAYVGGNNHHIEYRAIVDKKGKASWTGTIVSAFDAAQRKLACLRQLKASKVPKPAHFVKLSAAEKARFTPLLRAAQAEHPIVDRRDIDDLGGAFIMSLAEGEMVRMKHKETGEPGYFVVAKLDKPATVVLVPHWDARAAGERKDANEKKVPDSARDQFSATAEDLRTLACEGDAHAVKVRVSVLGKVTVLDRD

SEQ ID NO: 18467 - protein, 1349 aa, unidentified
  REGION 1..1349: note = Cas Enzyme sequence
VTTILGLDIGSNSVGSAWVDTEKRIIRAGVSVFPCGVEEKEDGRGAPKNQKRREKRSLRRSLARKSSRKRKLRALLKKHGLFPTEPHQVNALMTTDAWELRAEGLSRELTAFEFGRVLLHICQRRGALGLKLLDVDEDDTGKNDAKADEDGKVKEAIDATRKAMQLHNSATFGELMATLARRRRSPVMGADGKPKLNGSGVPITFSHKIRNELANFEFHADRQMLRDEFKRLWETQILFNSALSRILTDDLKRQLDNPTGDEIWRHRGLLFGQRRTYWKTGTLGRCKLEPTDECVPIADRHASFYRVIETVNNIRIRGPQDHDFRPLTSNERQKVIDRLRSQKSGTVAAVRDALGIGTKSLKKAGIPQDAYALNLERDEDRDINTDWFYRAIIVEGIGEKIWDAWDENKREGLNRAILRFDPSEEIDKQKFAAVAEKLGLDSEKQERLLAQWLTRPKLEKRLKLSRRAVLNLLPYMDKQDTNSRWPTQIEARLSFANDPNAADRTSNQSITSKQRERYSLGANILNKRDRHYLKKHPEMVLPPAPMLTNPVVRKAIHEVRRHVIAHIRAAGRKPDRVVIEFARETTKTAKQSDQILARNRFREKYRRGIRDDVIRPAFGAMYDSLSTNQLRASEDRVILCEQQRKHCAYSDNTITPIQAALGNGLEVDHILPYSRCGDNSLNNRVLCYRDSNRNKLNQTPREWWGAEFDENIRRLRFMDGIDKTKIHPYFSKRDYANKWKNLSAENVPSEWKGNQLSDTAYAAREVQAYLQHALWPDEPSFLAGDIRRRVFVTKGTYTAQLRRDWQLYRNRLSDTDNRVTRDLLAAKDRGDHREHAIDAVAIALTDGSRIQALAAILTNQQQAWIRAKNQGIKTEVIKRKPLDPPWGNIRSFRHQVLSLIYDDFDDNQEDRGSSSTNRAIVVSHRPVGRKLVGKFHEDSLFGAVPHDRKLYTGSIRVTDLKPNHLRMPVPEKEEDAISRLSERYLKSNTASNPRDAKRIAKEFVASKAYIPRLVDPPPEKSGLIRDIGLRKQVRAAIEDRLQRFGIDRTADTFTSADLKKILNPIDPATGRPHFISLTMKSGVPIKRIVLLRTMNDPVIVSRRRWNEQFEKWEIDDSPKASRAYVGGNNHHIEIRTNDKGQWSGEIVSMHEAARRARVQKTDPVDRSNDPDRGGAFVLSLAEGETVFMRHKQTGVPGYFVVVKLVKPATVEFKQHWDARRATGERNEQGEPIEDSARASIAVSAAQLARLAAPGEATPIKVVVNPLGELHTVEPLASREDRLADIDPRVMLIAQEALAARRSKNELNEGRRRRKHGSWSWMRAKLKREKLTHLAAQLSAAVRLLDKEKS

SEQ ID NO: 18468 - protein, 1080 aa, unidentified
  REGION 1..1080: note = Cas Enzyme sequence
MEDYLLALDLGTSSIGYVAFGLNRKMEPDSIKDLGMRIFSDGRNSKTKEPLAVARRSARGMRRNRDRGQNRVRRLVAELIEFGLLPQNDSERTKIFQKLNPYECRSKCAVSQVNAYELGRALFHLGRRRGFKSNRLSGDSEESDFKQKIAKLKVELGNLTLGQYLFTKVEKNNAIRLKNRELHLQNKMDKQKSNPTNQKAVRFKDDVEFYADRAMYEQEFDLIREVQGDAFLTDPQWFAIRETVFWQYPLKPVPKGRCRFFVDQFRANISLPMAHEFRILQEINNLRYESDGLEFKLDTRQKNFLYQLLANVKTVRFKSLVKKKDENKSPYFPSDARFNLDVGSRNGMLIGNDVLVDLRKPENLGILADTLGGQELNDIVDFLIEPTASDENGSWVLDDAAIRRWLKKRLANIEETQIENLINLKFKRGTVAVSRKFIEKINPIMLSTGKEYWEAVQDVEEATGISFHHSNFETGEVLNRLPYYGEIMPESVWGERPETDKAKQPDERDDDAYNFGKIANPTVHVALNQLRKVVNNIIEKLGIPPARIHIELTRDLKNSKEARQKWDKLSATNKKRNDTIREILSTEFKIDRPGREDIQKYKLWEELGAQGARQSVFSGKTIAASHLFDKSVEIEHIVPFSECYDDGMNNKTLAFSSENRDKADRTPYAAFGNTEKYDEIMRRALKCFGQTSKYERFKEGAFEKFYGGERGNMIARQLNDTKYLSRKAAQYLACLCTSNNVVTVNGQMTAVLRDVWQLNHFKDRSTGHYRDDHRHHIVDAFVVGLTSRSLIKKLNTKTSTSKHHKATLYHFLKDRAPEIPELKRELLHRLEDVVASYKPDHTMHGSMYNETAYGITTEAGVQWCITRKAVSVLSYDEVFRLQSADHRADLITFLTNGLLVDNKKDLKEILRTDKNFTEKKDEFSKVTGIKKVRLKIPNDSVKPIHSAPFKGYSINSYAYCDVWMVPTRRKSTDTEWQYKYQGVFVPYAEVRSFVNVPKRPVGTDGRVHPAAKRLMRLFKNDNIQLKSNSDSSTTVLRVVGFSASQNKLDVAANLSAQNTGHNYVSTNVLFSQNTISKMRS

SEQ ID NO: 18469 - protein, 1104 aa, unidentified
  REGION 1..1104: note = Cas Enzyme sequence
MQDAVSVPLYRLGLDVGATSIGWCMLPLTQKGEPQAIMAMGVRIFSDGRDAQSSEPLAVERRTARGMRRNRDRTLSRQQHLMQVLTDIGLMPAERDQRKALLDETGALENNPYAIRARALDEAVPLHHLGRALFHLGQRRGFQSNRRADGKSKDDDKSLMKGAFSKLANAMIETKARTYGAFLYQRLKAGDGVRIRPVKKNNKNDYAFYPQRSDYQHELTMLWQAQQRHYPALLTEENHAKVFDAIFYQRPLMKPDVGYCQFEEGEKRAPKAYPVFQQFRILEDVNHLMINTVTGEKLPLSQKQRDEILKLLNKKKDVTFDTLRKNKTLGFSQNTTFNLETEERTKLKGNTTASRLSGNDAFGEQWFAFSDTQQAEIVTNLLEEDNEDTLIAWLQQHHNLSWDTAEHVSKIALEAGYGRLSLKAMKEILPHLEYGMTYDKAVAQVYPHHSDFRPTDLLDELPYYGKAMPKRVMPAPKATDPHEKRYGKINNPTVHIGLNQIRKLINELIQCYGRPTQIVVELARELKENQEQANLSAKRRKENQKLNEEAEREIARLGYIPNHRNREKYKLWITQAKDATQRQCPFTGQQIRLEDVFREDSPFEIEHLLPFSRSYNDSLANKVLACRTANREKTNQSSYEAFGGHATHYADIMERVKLLPYEKRWRFQPDAWDIARGKGEDVIARLLNDTKYLSRVTKEYLSHICQDVYVVTGGMTALLRGKWGLNDWLGDKDQTKERKDHRHHAVDAFVIACISRGMMQRISAAAKYAESQFSHRLVDQMPPPFEGFQWDEGKHTVEQIVVSHKPDHGNARRAINPPQGQRPYTTGKLHEETAYGLVNPKNADGDIELVTRVPLASLESLKHIREIRDGAIRTRLLDYMQDVPVDAKGKPAKTDIPQWQDKLQQFGDIHNIRRVRIVIAKTPNTVIGMATQEEKERATAENRPPLPYKYYPTGGNDCAEIYCPDRGKKAGQWQVEIISSFDAHQKGFVPLWKRQRENATTKLVMRLKKNDMVAYEEHGETVIVRVKKLNIDGRMFFEKHSVAKAIKEPNATSAKQLQLKNARKIHVDILGRVHDPLAQTHVNRVQIDVDDGYVRSARGDGDGA

SEQ ID NO: 18470 - protein, 1070 aa, unidentified
  REGION 1..1070: note = Cas Enzyme sequence
MGVRIFSDGRDAQSSEPLAVERRTARGMRRNRDRTLSRQQHLMQVLTDIGLMPAERDQRKALLDETGALENNPYAIRARALDEAVPLHHLGRALFHLGQRRGFQSNRRADGKSKDDDKSLMKGAFSKLANAMIETKARTYGAFLYQRLKAGDGVRIRPVKKNNKNDYAFYPQRSDYQHELTMLWQAQQRHYPALLTEENHAKVFDAIFYQRPLMKPDVGYCQFEEGEKRAPKAYPVFQQFRILEDVNHLMINTVTGEKLPLSQKQRDEILKLLNKKKDVTFDTLRKNKTLGFSQNTTFNLETEERTKLKGNTTASRLSGNDAFGEQWFAFSDTQQAEIVTNLLEEDNEDTLIAWLQQHHNLSWDTAEHVSKIALEAGYGRLSLKAMKEILPHLEYGMTYDKAVAEVYPHHSDFRPTDLLDELPYYGKAMPKRVMPAPKATDPHEKRYGKINNPTVHIGLNQIRKLINELIQCYGRPTQIVVELARELKENQEQANLSAKRRKENQKLNEEAEREIGRLGYIPNHRNREKYKLWITQAKDATQRQCPFTGQQIRLEDVFREDSPFEIEHLLPFSRSYNDSLANKVLACRTANREKTNQSSYEAFGGHATHYADIMERVKLLPYEKRWRFQPDAWDIARGKGEDVIARLLNDTKYLSRLTKEYLSHICQDVYVVTGGMTALLRGKWGLNDWLGDKDQTKERKDHRHHAVDAFVIACISRGMMQRISAAAKYAESQFSHRLVDQMPPPFEGFQWDEGKHTVEQIVVSHKPDHGNARRAISPPQGQRPYTTGKLHKETAYGLIECEGKKVFVTRKKVGDFKNADDIQKVVDKARRQQFLDFMQKATSWPEGLDSFIQKTGMKRLRIKTDKKIDSMVGIREKGNKNEKIYKYYEGDNIYTEIYQSSFGKMAKKWQAETVSMFDVHQRGFIQKWKSKEKRENSTAKLIMRLHKQDLIAITLSDQAIKGFKLEDKLKKNERLVCRVRKMSGGKISIIPHYIAHDTVTIKENGKTKETREFHTWKISPEQLRNHNARKIHVDILGRVHDPMAQTHVNRVPIDVDDGDVRSARGDGDRA

SEQ ID NO: 18471 - protein, 1104 aa, unidentified
  REGION 1..1104: note = Cas Enzyme sequence
MQDAVSVPLYRLGLDVGATSIGWCMLPLTQKGEPQAIMAMGVRIFSDGRDAQSSEPLAVERRTARGMRRNRDRTLSRQQHLMQVLTDIGLMPAERDQRKALLDETGALENNPYAIRARALDEAVPLHHLGRVLFHLGQRRGFQSNRRADGKSKDDDKSLMKGAFSKLANAMIETKARTYGAFLYQRLKAGDGVRIRPVKKNNKNDYAFYPQRSDYQHELTMLWQAQQRHYPALLTEENHAKVFDAIFYQRPLMKPDVGYCQFEEGEKRAPKAYPVFQQFRILEDVNHLMINTLTGEKLPLSQKQRDEILKLLNKKKDVTFDTLRKNKTLGFSQNTTFNLETEERTKLKGNTTASRLSGNDAFGEQWFAFSDTQQAEIVTNLLEEDNEDTLIAWLQQHHNLSWDTAEHVSKIALEAGYGRLSLKAMKEILPHLEYGMTYDKAVAQVHPHHSDFRPTDLLDELPYYGKAMRKRVMPAPKATDPHEKRYGKINNPTVHIGLNQIRKLINELIQCYGRPTQIVVELARELKENQEQANLSAKRRRENQKLNEEAEREIARLGYIPNHRNREKYKLWVTQAKDATQRQCPFTGQQIRLEDVFREDSPFEIEHLLPFSRSYNDSLANKVLACRTANREKTNQSSYEAFGGHATHYADIMERVKLLPYEKRWRFQPDAWDIARGKGEDVIARLLNDTKYLSRLTKEYLSHICQDVYVVTGGMTALLRGKWGLNDWLGDKDQTKERKDHRHHAVDAFVIACISRGMMQRISAAAKYAESQFSHRLVDQMPPPFEGFQWDEGKHTVEQIVVSHKPDHGNARRAINPPQGQRPYTTGKLHEETAYGLVNPKNADGDIELVTRVPLASLESLKHIREIRDGAIRTRLLDYMQDVPVDAKGKPAKTDIPQWQDKLQQFGDIHNIRRVRIVIAKTPNTVIGMATQEEKERATAENRPPLPYKYYPTGGNDCAEIYCPDRGKKAGQWQVEIISSFDAHQKGFVPLWKRQRENATTKLVMRLKKNDMVAYEEHGETVIVRVKKLNIDGRMFFEKHSVAKAIKEPNATSAKQLQLKNARKIHVDILGRVHDPLAQTHVNRVQIDVDDGYVRSARGDGDGA

SEQ ID NO: 18472 - protein, 1094 aa, unidentified
  REGION 1..1094: note = Cas Enzyme sequence
MQDAVSVPLYRLGLDVGATSIGWCMLPLTQKGEPQAIMAMGVRIFSDGRDAQSSEPLAVERRTARGMRRNRDRTLSRQQHLMQVLTDIGLMPAERDQRKALLDETGDLENNPYAIRARALDEAVPLHHLGRALFHLGQRRGFQSNRRADGKSKDDDKSLMKGAFNKLANAMIETKARTYGAFLYQRLKAGDGVRIRPVKKNNKNDYAFYPQRSDYQHELTMLWQAQQRHYPALLTEENHAKVFDAMFYQRPLMKPDVGYCQFEEGEKRAPKAYPVFQQFRILEDVNHLMINTLTGEKLPLSQKQRDEILKLLNKKKDVTFDTLRKNKTLGFSQNTTFNLETEERTKLKGNTTASRLSGNDAFGEQWFAFSDTQQAEIVTNLLEEDNEDTLIAWLQQHHNLSWDTAEHVSKIALEAGYGRLSLKAMKEILPHLEYGMTYDKAVAQVYPHHSDFRPTDLLDELPYYGKAMPKRVMPAPKATDPHEKRYGKINNPTVHIGLNQIRKLINELIQCYGRPTQIVVELARELKENQEQANLSAKRRRENQKLNEEAEREIGRLGYIPNHRNREKYKLWITQAKDATQRQCPFTGQQIRLEDVFREDSPFEIEHLLPFSRSYNDSLANKVLACRTANREKTNQSSYEAFGGHATHYADIMERVKLLPYEKRWRFQPDAWDIARGKGEDVIARLLNDTKYLSRVTKEYLSHICQDVYVVTGGMTALLRGKWGLNDWLGDKDQTKERKDHRHHAVDAFVIACISRGMMQRISAAAKYAESQFSHRLVDQMPPPFEGFQWDEGKHTVEQIVVSHKPDHGNARRAINPPQGQRPYTTGKLHEETAYGLVNPKNADGDIELVTRVPLASLESLKHIREIRDGAIRTRLLDYMQDVPVDAKGKPAKTDIPQWQDKLQQFGDIHNIRRVRIVIAKTPNTVIGMATQEEKERATAENRPPLPYKYYPTGGNDCAEIYCPDRGKKAGQWQVEIISTFDVHQKDFVPQWKRQRENATAKLVMRLKKNDMVAYEEHGETVIVRVKKLNIDGRMFFEKHSVAKAIKEPNATSAKQLQLKNARKIHVDILGRVHDPLAQTHVNRVQIDVDDGDV

SEQ ID NO: 18473 - protein, 1094 aa, unidentified
  REGION 1..1094: note = Cas Enzyme sequence
MQDAVSVPLYRLGLDVGATSIGWCMLPLTQKGEPQAIMAMGVRIFSDGRDAQSSEPLAVERRTARGMRRNRDRTLSRQQHLMQVLTDIGLMPAERDQRKALLDETGALENNPYAIRARALDEAVPLHHLGRALFHLGQRRGFQSNRRADGKSKDDDKSLMKGAFNKLANAMIETKARTYGAFLYQRLKAGDGVRIRPVKKNNKNDYAFYPQRSDYQHELTMLWQAQQRHYPALLTEENHAKVFDAMFYQRPLMKPDVGYCQFEEGEKRAPKAYPVFQQFRILEDVNHLMINTLTGEKLPLSPEQRLGIIALLNKKKDVTFDTLRKNKTLGFSQNTTFNLETEERKGLKGNTTASRLSGKDAFGEPWFALSAAQQGEIVTNLLEEDNEDTLIAWLQQHHNLSWDTAEHVSKIALEAGYGRLSLKAMKEILPHLEYGMTYDKAVAEVYPHHSDFRPTDLLDELPYYGKAMPKRVMPAPKATDPHEKRYGKINNPTVHIGLNQIRKLINELIQCYGRPTQIVVELARELKENQEQANLSAKRRKENQKLNEEAEREIARLGYIPNHRNREKYKLWITQAKDATQRQCPFTGQQIRLEDVFREDSPFEIEHLLPFSRSYNDSLANKVLACRTANREKTNQSSYEAFGGHATHYADIMERVKLLPYEKRWRFQPDAWDIARGKGEDVIARLLNDTKYLSRVTKEYLSHICQDVYVVTGGMTALLRGKWGLNDWLGDKDQTKERKDHRHHAVDAFVIACISRGMMQRISAAAKYAESQFSHRLVDQMPPPFEGFQWDEGKHTVEQIVVSHKPDHGNARRAINPPQGQRPYTTGKLHEETAYGLVNPKNADGDIELVTRVPLASLESLKHIREIRDGAIRTRLLDYMQDVPVDAKGKPAKTDIPQWQDKLQQFGDIHNIRRVRIVIAKTPNTVIGMATQEEKERATAENRPPLPYKYYPTGGNDCAEIYCPDRGKKAGQWQVEIISTFDVHQKDFVPQWKRQRENATAKLVMRLKKNDMVAYEEHGETVIVRVKKLNIDGRMFFEKHSVAKAIKEPNATSAKQLQLKNARKIHVDILGRVHDPLAQTHVNRVQIDVDDGDV

SEQ ID NO: 18474 - protein, 1288 aa, unidentified
  REGION 1..1288: note = Cas Enzyme sequence
MISLGLDIGSNSVGSAWADTDKREVHLAVSVFPAGVDEQESKRGAPKNQARREKRSQRRSLARRSARKRRVRQVLTQAGLLPQDVEELQRLFDTNPWELRRAGLTRTLTPHEFGRVLVHLNQRRGALGIETNPEDPEEGKVKEGIDRLNAEMLARKAETVGQLFADLMDERRAAGKCASNTAVSRRVQQIRRKREGRGEATEFQFHGPVRNRQYRMDERQQLYADRRRVREEFLLLWERQKSFGGPLAELLTDDLKRQLDDPTGNDVWRHQGALFGQRRTFWDTGALGRCVLEPTERCVPLADRHASYFRVVETVNNIRIIQGGHSPRPLTVEERERVMRVLRGPLFRKSKGKLIPKSTASVTDIKQALGINPRDKLVRLNIEADEEREINTDWFHREIVHGAFTEERWNQLDERQKESVNRAVLRFDPDDEQDQKTLREKAGRWWGLEAEAVERFIEAWKTRPKLEKRLNLSRKAILNLLPYMERFDEEHQRWPTQQEARKAYARTLREKYEQTGVDADRIAADRYDTGALGLTARDRYFMKLDKHRIAEGVPELPPAPMLSNPVVRKAIHEVRRHLMAYLRKFHKTPDQIVIELARITKQSERQRNTALARNRNREKIRKAIIAGTENEPGVLVCAFGAEGARRLSLNQQRAAVDRVILAIQQRETCPYCGRNGLTPVVAAKGDDLEVDHIVPYSRCGDDSLNNKVLVHRTCNRGKANLTPREWWGTEFETRIQVAEKLFNGVKPAKGDYFEERDYKRKWENFTREVREADEWKNSQLTDTAYAARQVAAYLADALFNGRGLPERGDGGNEQKIFFTMGRFTAMLRRDWQLFETLKPPQREGRHGELTADEEARIAEKDRGDHRQHAIDAAVIALTDPKIKHHLANWAAYAAEYKEKRGEWPRREPIEPPWGDVPSFRREILSQVYARFDSSEFESGRQDEAGASDLLVVSHRPVKRRLVGAFHEETAYGPVISPLPPHRREKPETLFTNRIQVAGLTPNHLRVPEGWDELSARLEDPALTEGEKKAVRRQLAALTDPPPGKSGIVRDRALRDWIRKCLRANGLNPDGFSKAQMRDFAASGKLVMRSGVPIKSVILLRTNTDPVIISRKRWDPAANRMIVDEDPRSARVYIGGNNHHIEIRERQVTRQGATVTEWTGRVVTTFEAARRVRLEGRPAVDRSDNEDGRFVMSLAEGEMVFMRHPKTGTPGYFVVFKLDKPNTIHFIHHWDARPSMPRKDENGNEIPGSAREDIAVVASKLRFLGVEDGQPPYKVRVAPLRRPKPVMGD

SEQ ID NO: 18475 - protein, 1245 aa, unidentified
  REGION 1..1245: note = Cas Enzyme sequence
MPVILGLDIGSNSVGSAWVNTDEWQIHLGVSVFPAGVDEQENKRGAPKNQARREKRSQRRNIARRAGRKRHLRRLLTQAGLLPDKPANLQALFDTNPWQLRREGLSRPLTPHEFGRVLVHLNQRRGAVGIETDPEDPEEGKVKEGIDRLNALLRERGSQTFGQLMADLMDERRQHDPETGVAWHEPVRNRQYRIDETQQLYADRPRIQQEFSTLWDRQKTLGGPLAAILTDDLRKQLDDKDEDQTWRHRGILFGQRRTYWDTGTLGRCDLEPTERCLPLADMYAQEFRVIETVNNIRIARRGEAERTLTTEERHKVIDALRQQKTGSTATVRKALDIHKKAVKEFYSLNLERDEGREINTDWFYREIVHGVFGEPRWIQMDERGRESVNRAILKFDPDTKEHEPRLRAGAAQWWGLDAEAVDRFIAAWKSRPKLEKRLKLSRRAIRNLLPYMNAFDEENQRWPTQIEAREAFARDPNATDRTTGQPATPSQQERYALGAKPVTSADRRYIRKHEEPIPPAPMLSNPVVRKAIHEVRRHLIAWWRRFGRAPDRIVIEYVRSATQPEKVRNETLARNRRREGIRKRIIEQFDLATLSRNQQSRAVERVLLCRQQGGICAYTGDPISEKTAAEGRDVETDHIVPKSRSQDNGLNNKVLVTREANRGKGNQTLSEWMSPQQFAAMEQRLQHLDKGQGADDYFSKKDCGRKWENLHREAPTTENFLNSQFTDTAYAAKQVGQWLREVLYDGERDGQRHVLTTKGSYTSILRNDWGLSESDLDRQWHEITEPDENEGDNQSRRARKEKNKNRADHLHHAIDAVCIAFAPDELQQLAWSAQKQEIARAQLGYWPRRKALPPPWPPLPDNPTDEQFQEAVATFRQQVLAAAQQVTVSHRPVKRKITGRFHEETAYGPVAGRLPRHRTEDASTLFTNRIQATALTPNHLRVPAGWDDLSAQLDNHQSTLTEKRTIRKQLAGMPDPSPAKSGIVRDRALRDRIRKCLRAHGVNPDSFGKDDIKSLVCNGKLTMAAGIPIKSVILLRTNNDPVMIPRKRWDHLSDQIVHDTDPRTARVYIGGNNHHIEIRQNIKTGKWTGRVVTTFEAAKRNAARLRALKQAGVPTPEKWRELPHGERMRLKPVIAEINRRFPIIDRSDSETERFVMSLSEGELIYARRKDRPAEATDAVGYFVVCKLDKPARIHFAPHWDARRASEQDRWDVAPTGFKECQIEPGHPPVKVRVGPLGQITILQKD

SEQ ID NO: 18476 - protein, 1058 aa, unidentified
  REGION 1..1058: note = Cas Enzyme sequence
MGNTLGLDLGPNSIGWALIEENTEGVGRLIDAGVRVFPEGVDNFDTSKEVSRNQDRRMARGMRRQILRRKRRRRILRSALAEVGLFPRDREAQQRLLDLDPYVLRCRAIHEQLEPYEIGRVLLHLNQRRGFLSNRKKDRGDKEVKGMLAEISQLQGEMGDRTLGDYLAELRQDPHTRVRGRHTHRAMLAEEFDRIWQAQAKYYPKLLTDQLRYGRAGRFDPLKPLRPRRLPHDSNWLAEYGIQGIIFFQRPMFWPKSMVGVCELEKGEKRCPKADRAAQRFRMLQEVNNLRYIDPEARSEKALTAEQRALLLDKLGSREKATFDEIRKWLGFLDNIRFNLERGERSSIGGHKTDARIAKVIGKAWYKRSEDEKDRIVRLLINTEFDDVAIARRLVEEFDLTSEQAEALLGVDLPAGYLSVSLKAINKLLPHLERGLRYMADSDPSNSALHAAGYLRRDELQRRLFDKLPPLQFVRTGPLADLPNPIVRATLYELRKVVNAIVREYGKPDEIHVEMARELKLSEAKRRELSAAMRQREQERSRAADYLRQNGVRVTRDAITRFLLWREQGEKCIYSGRSISFEQLFGGEVDIDHILPYSRSLDDSQSNKVVCFRSENHRKGQRTPYEWLGSEDSQAYAALCQRARILPYLKYRKFLLEELQLDDFIQRQLRDTAYISRLAIEYLRMLVGEHQVIGSKGGLTAELRHQWGLDTILSELPDSPAWQEQGSLHPGEKNRADHRHHAIDAIVVALTNRSRLQKLARMREAGGTLVTGEVLPEPWPHFRDTVLQRIRTMNVSHRPRRKVSGRLHEETNYGPVHDRNGQPVHGTYVVRKPVQDLSPNEVDNIRDPAIRRIVAEAFAAAGQTVGRRKRGTGPAAANPVTTKQLLASLMMPSGVPIKRVRLLKTDQTIRPIRLRQAQQAGDPTQITYVKPGRIHHACIFEWEENGKLKRDAEYVTMLEAAQRLQNRQPLVRRQHSQRPDARFIMSLSPGDMVLAELDGREILMVVSTLVSTQKRIHVVPACDARRSSERADRGLTPNSLKARKVTVDPLGRIRWAND

SEQ ID NO: 18477 - protein, 996 aa, unidentified
  REGION 1..996: note = Cas Enzyme sequence
LLTDGLKRQFDDPMEDDSWRHKGVIFGQRRTYWDTGTLGRCDLEPTDQRCPLADMHAQEFRVVETVNNLRIDERGKNPRPLTGDERARVIAALRSQKSASAATIRKALGIDRKAIKEFFSLNIEHDPDREINTDWFYREVVHGAFTEGLWRGMTESQRESVNRAILKFDPDQGQHEHRLRQGAKKWWGLPDAAVDKLVAAWKSRPRLEKRINLSRRAIKNLLPYMNEFDSQSNRWPTQIEARQRFAEDGNAIDRTTGQEPIQQQRDRYALKGHRLTKAERHFLKKHPSLLPPAPMLANPVVRKAIHEVRSHVIAYLRKYGRKPDRIVIELTREAKQTAKVRNQRLSANRKREMEKKKMVEEFKLRNLTLNQQSSAIERVLLCRQQKGVCAYSGLARGEGRAITEKTAAEGTDLEIDHIVPLSRSQDNSLNNKVLCFRDANRNKGNQTPKEWLSPEQYQRLEQRFRHWKKELPRKWENLHRDPEPPDEFVNSQLTDTAYAATQVGSYLANALYGGATEGHRRVFFTKGIYTAMLRRDWQLFQTLKKSTDDPSATDRPDPEQETNLVDKNRGDHRHHAIDAVVVALTGPEIVQEVARLAREREEYHERTGFWPKRTPIDPPTPWANVHEFRQAVLSKIFETFDPNDAHLSGTNDRITTGQPLVVSHRPVKRKVTGYLHKEDLWGAVNEPQGIYRKRYKVSELSPPMLRMPVEETDDQVRQRLFKELKRAGLSDKDARHKARELVEKKKFKRRLIDPPLGKGGLVRDWGIRKTIRECLQNNGLDPNTFTAKQIADLAKTGKLTMPSGVPIKSVITIGPIADPIKIPVQDPYTRQQALNPRTGQPLFRFHFSRNNHHVEILEDIASGKWSGDCVTMFQAAARVRPPKDAHGNRQKPKPAVNRTDRDGKRFVMSLSEGETICALRPDCQDGGPGSTGYFVVAKLDANRIWFAPHYDARNADKQDRWDVTYAKLKECGPEPGRPPYKVAVSPLGEVRPLAND

SEQ ID NO: 18478 - protein, 1091 aa, unidentified
  REGION 1..1091: note = Cas Enzyme sequence
MRIERNGRSEPLSRDQRNAVIQLLSGPLFKEKKDGSREAKKSANLGDVKVALLFARNDPGIKINLGSDEDRPPTDWFQREIVLGAIGEEIWNGPLKAMQEEINRTLLRLDPETTGHEARLRSIATQQWNLPDNCVQRLAATWNERPKLDNRLKLSRRAILNLLRYMEEKYQLDGGIWPSVTNARESFARDPNAIDQLSGKPASKEQRARYALGVRSLTKAGRRYIRKHEAEGSATLPPAPFLPNPVVRRAIHEVRRHVLAWMRKFGKRPDRVSIELSREARLPGNKADEIRALNTRRNRIRTFIQEEVIRPVFKEQFTSLTSRQLRAAENRVLLCLQQRYTCAYSGLLPERPEGVCCYTGKTITPRQAALGDGLQMDHIIPVSKTGPTRSLNSLVLCYSGANAGKGNDTPRQWLGAQFEGLSQRFKWWDGYEPPKLKDKADRGDFFTKKDYTRKWKLLNLAEPPKEPWRASQLTDTSYAARQVRAYLAQALFTKDTPEQLGRRFLHPKGAYTAILRRDWQLFQRVLPRDSRGKLLEAEETRAIARKDRFDHRHHAIDAVTIALMNHERLENLAAYAKCVEEAKAEAEAKGLEKPEKWPEREPLDPPWGTVKQFRREVLSRIFAEFDDADTSGRSEPVLVCHRVVKRKLVGHLHKDTHFGPVANDEKGVLTTDGRLATPYVTLRVSARDIKPDHLRLPRIEAEKEAVNRVYQQLRSERLDTKTARATAKDIVADPSFERLRVQPIPGKSGVISKVSLRIALREKLGEFRPYWEAQEKDDKAHWPEQAKKDFGKRIKELVRTGVLVGPNGFPIHRVKIVRTLEDPILIRRRQRDLESGRLIPDRYPQSIRIYEGQNNHHVEIRESAKGEWVGTVVDMFTAARRVRPVKNADGTRPPVSPVADRSDNGDGRFVMSLAEGETVLLRDPRLARDDFFVVAKIDRDPIRVHLFHHVDARSATGRKDEKGKVIPDSKREVLGSKKSPGLPLGALRKLAPSGYPHPVKVEVGPLGDWHAVDERDDRDRLPVPIDPRVVDVAKKGLQLRVTRPACAAMRHRKKLLGSWSWMVQELDRQGLTKPNKQLSAAIRSIRADKSP

SEQ ID NO: 18479 - protein, 1360 aa, unidentified
  REGION 1..1360: note = Cas Enzyme sequence
MTVTLGFDIGSNSVGSAWIDQQTGEITVGLSVFPAGVDESDEKRGEPKNAKRRMTRRSRITLARRAARKRLLRLKLIEAGLLPPTEEEFKKLLEQTEPWELRRKALTEALTPYEFGRVLLHLSQRRGALGLKIQEIEEEGTTDDQKEDGKVKKAIGEVRAEMRKRNAQTFGEFISMIRAERVTPITTADKRKSNARKGPREFRQAIRNKAGSYEHCADRGMIRDEFLKLWAMQKRLAGPLADLLKDELLTALDNETGNTDWRHRGVLFGQRRQSWDLGTLGRCVLEPTERCAPHADMYASRYLVVETVNNLKIIERGKEPRPITPKERAKIKTFLSGPLGEITSGKFKGQPKRTVSATDLRELFGWGRANKTSHFRFNIEADEDRNINTDWFSREIIHGAITVEKWESMSERIQEGVNRAILKHDPDEEKDAIKLKEGVLRWAGLSDAQADALVAAWRRRPKLDAKRLNMSRKAVRNILVVMDREEPWPDPKRPELMRWLTQIEARKLIAGDTNFKDQTTDKPLADHTRRRYQTGAKGATARDRHYIKKHLLKKDGEVVYGPDGNPLHEPPPAPLISNPVVRKSVHEVRRHLVEYMITFGRKPDEIYIELSREAKMGAVDSDRALFRNRLRNRIRNDIIHEFNLSAASATQQRTAVDRVVLCVQQSGVCPLCGNESVEKKITPRLAASGEGCEVAHIIPKASGGHNGLGNLVLAHTKCNRDMDRRTPRQFWDATVKGGFDEAYRWIDKIYGNVKRPKPSEVKSATADALWSCYFAGGPGRWGLTFDQLKVEQFKKNITDIKDMTARQDAATKYATRQVMSYIADAIFEGEGLPERGGDRRIFATDGMWTSRLRREWGLFLDSHDARVKGLDHDEKHIRQEKNRGDHRHHAFDAIAIALTSPSLQRAWEDREKQADKGGVNTADEEQLENYRRQHPLPMPGPFRDWQSLQGAVRRAVFGSDGQRPVSHRPVKRKMIGALHEETLFGPVIDKLGKLTENYTAKKGILQIDANHLRMPRPEKKEEAIERLTVRKMRETTLDEKAARKWAKGIVASPGYTATTIDPSPGKSGIIRDLGTRKRIRACLKNFEYVKKNKQGEPIGEPKFVDPDSFTDNELKQAVEAGAICHASGVPIRSVVLLRTMSDPVVISRKRQDYVTGKPVPDSDPASRRAYVGGNNHHIEIRVATKKSGAEDWSGEVVTSFEAAQRKLNRLRAIRAAGIPKAADIRKLAPAEREKFNLALQQIELAHPLVDRSDDATKGGKFVMSICEGEMLLMKHKHTGKVGYFVVAKLDKPQSIVVVPHWDARAAGVRKDAEGKPVKDSEREQFAVTPNDLKALAPPGHEHAVKVRVNPLGKVTVLNRD

SEQ ID NO: 18480 - protein, 1045 aa, unidentified
  REGION 1..1045: note = Cas Enzyme sequence
MADEMDARRIPIHGSKADSCQGPIRNRRDSFEFHAERTMIRDEFERIWANQKTFDGPTSRLLTDQLRLRIDDPSGDATWRCKGTIFGQRRTYWDTGTLGRCDLEPTDHCCSIHDMHAQYYRVVETVNNIRIRARGDKDWRSLTAEERDKIFGSLRKHKTGSPKTIRTAIGIDKRRLAKQDLPEDYYELNIERDEDREINTDCFYREIISGVWGPERWAELGESERESVNSALLKFDPDNDNHEQRLRLGAGKWWGLDVEATEKLIKVWRGRGRTDKRLRLSRRAVKNLVPYMERYNDETARWPTQIEARQAFAEDSGNGATLEQRVRYAHTVTERLENLLLRELEGSETACNRLLAIRGARKADRHYLAKHPDLLPPAPMLANPVVRKAIHEVRRHVMAHIRAADRPPDRVMIELARQARQSERVRNATLTRNRNREKVRKQITSDFGLASKSQNQQRRAQDRVILCRQQRNVCAYTGKVITDRQAALGENLEIDHIVPYSRCGDNSMNNRVLCYIEQNRGKGSQTLREWWGEEFDERIRPLAFMQGYKPGKSESNEYFTSKDYARKWENLTRNVRPEDEWKNSQLTDTAYAATQVMAYLRDALFAGDRTRGHGVFETNGRYTAMLRRDWQLLADGEQKDRGDHRHHAIDAAVIALTDPYRLLPELARQAAMDEEYHERTGHWPGRTPVPPPAPWTSVEELRKTLMSTHYSMLVSHRPVKRRIVGAFHEETLFGPVLTNSEQFTNRIGVADIKPVHLRQPRFETDTEMTQRLTKRYLKQGMSEKDAIRKAHGVVRDESLLRKTIDPPPGKSGIVRDRDLRRRLRTSISDRLVELGIERDADSFTKDDMKKLIGAGGLTLPSGVPIKSVILLRTMKDPVVMERRIWDPVRSRMVHDADRRTRRVYVGGTNHHIEIREDDKGGWHGKVVPMFDAAQLVRMERRPAVDRRDDLNGRFIMSLAEGETVHMCHPRTREPGYFVVFKLDKPHTIHFVHHWDARRSKATETMLAREEIAVTAGNLAKCGPRMGVSPYKVVVDPLGRIRPRPD

SEQ ID NO: 18481 - protein, 1295 aa, unidentified
  REGION 1..1295: note = Cas Enzyme sequence
LLRQKLLAVGLLPRDEGDFKRLLETTDPWELRSKGLDHELTPHEFGRVLLHLAQRRGALGLKLPDAEDGQVDTTDDEGRVKAAIGHVRAQMLERKARTFGEFIAKVRAERVSPITTEDRRPPARRKGPREYRDPIRNRAGSYEHCADRAMIRDEFTKLWEAQTAFNGETARLLTQANGLRTALDDEAGDSIWLHKGLLFGQRRQSWDLGTLGRCVLEPTERCVPHADMYASRYLVVETVNNLKIIERGREARPLTPEERQKIKDYLSGPLGTERARKKRGDTGPVADKPKTSVTITDVRNLMGWGRATRTSQFRFNIESDPDRVINTGWFSREIIHGAITPAKWAEMPQRLRDGINRAILKYDPDHEGAADKLTLGVMQWGGLNETQADALVAAWKRRPRPDAKRLNMSRRAVRNLLALMDRDEPWPNPRQPGQTCWLTQIEARKLIAEDADFKDVTTGAPLDLQTRVRYATGAKGATARDRYYMQKHLLLKNGKPIFGPDGLPLAEPPPAPLITNPVVRKAIHEVRRHLVDYMLRFERKPDAIVVELAREARMGKVDADRVLFRTRLRNRIRNDIIASFGLGALTSTQQRAAVARVVLCVQQGGICPLCGNQIVTTQITPRMAASGEGCEVAHIIPKACGGDNGLGNIVLAHTKCNRDMGRRTPRQFWEGTFQGGFEEGMRYVEGIYRDIERPKLSEVRSATGQSLWACYFSGRPGRFGPTFDELKIEQFTKSVTDIQEMTPRQEAATKYATRQVMTYLANALYGGQGLPERSGQRRIFATDGLWTSHLRREWRLFFDPHASRTNGLSEEQEHVRKEKDRGDHRHHAIDAVVIALTSPRVQNAWEQRERMADRDGVNTADEVALENYRRAHPLPPPVPFANAQELKQLVHAAVFGSDSLERPVCHRPVKRKLIGELHEAFPRGPVLDRAGSLTDRFTRRISILELDPNHLREPRPETKNEAIKRLAERRRRQTGEDESAARKWARAVVSASGYMPAIVDQPPGKSGIVRDLALRRRLRDCLSAEGLDPDNFTANQIKKLAEAGKVRHVSGVPIRSVVLLWTISDPVLASRWATDHGTGKRRMLFDAVTHQGDARAARAYIGGNNHHIEFRVAPQPDGTEIWSGKIVTAFEVARRKSQRLRAFRQAGIPKPGDFRKLPKSQRAQFKPTLRAIEAAYPLVDRSNDDAKGGEFVMSLAEGEMLMMKHKVTGKLGYFVVAKLEKRGGNNRDCAVLVPHWDARAAGERKDAEGKRVPDSKREQFTITPVDLKLLAPPDHPHAIKVRATPLGDVYPLQRD

SEQ ID NO: 18482 - protein, 1216 aa, unidentified
  REGION 1..1216: note = Cas Enzyme sequence
VKAAIGHVRAQMLERKARTFGEFIAKVRAERVSPITTEDRRPPARRKGPREYRDPIRNRAGSYEHCADRAMIRDEFTKLWEAQTAFNGETARLLTQANGLRTALDDEAGDSIWLHKGLLFGQRRQSWDLGTLGRCVLEPTERCVPHADMYASRYLVVETVNNLKIIERGREARPLTPEERQKIKDYLSGPLGTERAPKKRGDTGPVADKPKTSVTITDVRNLMGWGRATRTSQFRFNIESDPDRVINTGWFSREIIHGAITPAKWAEMPQRLRDGINRAILKYDPDHEGAADKLTLGVMQWGGLNETQADALVAAWKRRPRPDAKRLNMSRRAVRNLLALMDRDEPWPNPRQPGQTCWLTQIEARKLIAEDADFKDVTTGAPLDLQTRVRYATGAKGATARDRYYMQKHLLLKNGKPIFGPDGLPLAEPPPAPLITNPVVRKAIHEVRRHLVDYMLRFERKPDAIVVELAREARMGKVDADRVLFRTRLRNRIRNDIIASFGLGALTSTQQRAAVARVVLCVQQGGICPLCGNQIVTTQITPRMAASGEGCEVAHIIPKACGGDNGLGNIVLAHTKCNRDMGRRTPRQFWEGTFQGGFEEGMRYVEGIYRDIERPKLSEVRSATGQSLWACYFSGRPGRFGPTFDELKIEQFTKSVTDIQEMTPRQEAATKYATRQVMTYLANALYGGQGLPERSGQRRIFATDGLWTSHLRREWRLFFDPHASRTNGLSEEQEHVRKEKDRGDHRHHAIDAVVIALTSPRVQNAWEQRERMADRDGVNTADEVALENYRRAHPLPPPVPFANAQELKQLVHAAVFGSDSLERPVCHRPVKRKLIGELHEAFPRGPVLDRAGSLTDRFTRRISILELDPNHLREPRPETKNEAIKRLAERRRRQTGEDESAARKWARAVVSASGYMPAIVDQPPGKSGIVRDLALRRRLRDCLSAEGLDPDNFTANQIKKLAEAGKVRHVSGVPIRSVVLLWTISDPVLASRWATDHGTGKRRMLFDAVTHQGDARAARAYIGGNNHHIEFRVAPQPDGTEIWSGKIVTAFEVARRKSQRLRAFRQAGIPKPGDFRKLPKSQRAQFKPTLRAIEAAYPLVDRSNDDAKGGEFVMSLAEGEMLMMKHKVTGKLGYFVVAKLEKRGGNNRDCAVLVPHWDARAAGERKDAEGKRVPDSKREQFTITPVDLKLLAPPDHPHAIKVRATPLGDVYPLQRD

SEQ ID NO: 18483 - protein, 1365 aa, unidentified
  REGION 1..1365: note = Cas Enzyme sequence
MPAYLGLDIGSNSVGSAWIDTDEKTITCGISVFPAGVDESDYKRGEPKNVKRRMARRTRITLARRAARKRLLRQKLLAVGLLPRDEGDFKRLLETTDPWELRSKGLDHELTPHEFGRVLLHLAQRRGALGLKLPDAEDGQVDTTDDEGRVKAAIGHVRAQMLERKARTFGEFIAKVRAERVSPITTEDRRPPARRKGPREYRDPIRNRAGSYEHCADRAMIRDEFTKLWEAQTAFNGETARLLTQANGLRTALDDEAGDSIWLHKGLLFGQRRQSWDLGTLGRCVLEPTERCVPHADMYASRYLVVETVNNLKIIERGREARPLTPEERQKIKDYLSGPLGTERAPKKRGDTGPVADKPKTSVTITDVRNLMGWGRATRTSQFRFNIESDPDRVINTGWFSREIIHGAITPAKWAEMPQRLRDGINRAILKYDPDHEGAADKLTLGVMQWGGLNETQADALVAAWKRRPRPDAKRLNMSRRAVRNLLALMDRDEPWPNPRQPGQTCWLTQIEARKLIAEDADFKDVTTGAPLDLQTRVRYATGAKGATARDRYYMQKHLLLKNGKPIFGPDGLPLAEPPPAPLITNPVVRKAIHEVRRHLVDYMLRFERKPDAIVVELAREARMGKVDADRVLFRTRLRNRIRNDIIASFGLGALTSTQQRAAVARVVLCVQQGGICPLCGNQIVTTQITPRMAASGEGCEVAHIIPKACGGDNGLGNIVLAHTKCNRDMGRRTPRQFWEGTFQGGFEEGMRYVEGIYRDIERPKLSEVRSATGQSLWACYFSGRPGRFGPTFDELKIEQFTKSVTDIQEMTPRQEAATKYATRQVMTYLANALYGGQGLPERSGQRRIFATDGLWTSHLRREWRLFFDPHASRTNGLSEEQEHVRKEKDRGDHRHHAIDAVVIALTSPRVQNAWEQRERMADRDGVNTADEVALENYRRAHPLPPPVPFANAQELKQLVHAAVFGSDSLERPVCHRPVKRKLIGELHEAFPRGPVLDRAGSLTDRFTRRISILELDPNHLREPRPETKNEAIKRLAERRRRQTGEDESAARKWARAVVSASGYMPAIVDQPPGKSGIVRDLALRRRLRDCLSAEGLDPDNFTANQIKKLAEAGKVRHVSGVPIRSVVLLWTISDPVLASRWATDHGTGKRRMLFDAVTHQGDARAARAYIGGNNHHIEFRVAPQPDGTEIWSGKIVTAFEVARRKSQRLRAFRQAGIPKPGDFRKLPKSQRAQFKPTLRAIEAAYPLVDRSNDDAKGGEFVMSLAEGEMLMMKHKVTGKLGYFVVAKLEKRGGNNRDCAVLVPHWDARAAGERKDAEGKRVPDSKREQFTITPVDLKLLAPPDHPHAIKVRATPLGDVYPLQRD

SEQ ID NO: 18484 - protein, 1035 aa, unidentified
  REGION 1..1035: note = Cas Enzyme sequence
MSQTVLGLDVGANSIGWALVAGNGAEPIRAGVRVFPEGVDNYDTKKEKPKMEARRVARGMRRQIRRRSARKSALRKLLAEIGLTPSEDGTNPYALRRKGLDGPLTPAEFGRVLIHLNQRRGFKSNRKTDRGRKADDKGTLGEINWVAEQIKASDSRTLGEMMDKVLRGEWKPVDEMGRLQGAVRRIHTRRDMFLGEFDALWEKQKSFGAPLSNLLGDDLRKRLNNPAKDDDWMHKGLIFGQRNLYWPADVVGRCELEPKLKRCEKADRLAQRFRLLQEVNNLRFLDPATGEEHKLSDEHRTLLLDKLSRTDKMDFDRVRKELGFIDSITFNLERGQRKSIKGLPVDAQLAKKELFGKEWHDLPDEQKNRIVRQLIDADDETLQRLAVEKWGLTAEAAERLLGVELPEGYASLSRVALAKLLPSMERGLLYMSDDNTPCALTEAGYLRPDQRPRERYEMLPEPPETANPVVRQALHEVRRVVNAIIREYGKPDRIHIELARDATKSAEERVKSSKFRQENEDRRSAAADEIRSAIKEHGLSIKLTRDAIDRLLLWREQQEMCAYSGRPIGIGQLLMGEADIDHILPYSRCLDDSMMNKVVAFRNENQAKGNRTPREWLEHSDPQKYERVQQFARHLPYNKRKRFTQKELELDSFVARQLNDTRYIATAVTDYLRGLVDEPHHVLCPKGTHTAELRRHWGLNTLLKELPDSPAWVADAELRDGQKDRADHRHHAIDAVVVALTDQSRLHHLSRINRQGGTNFTGEVLPEPWPQFRESVKKAVAGIHVSHRVQRRVSGGLHEDTYYGPVHEKQLDGSIVQRPGEFVVRKPIESLTSSMIEDIRDPTIRQIVIARLNERGVPFGRGVKGGIPKEVWRPQLAMASGVPIRKARTVKRDETIQPIRGGSVYVKPGSTHHLAIFELTLKGKKTRVPKFVTMLEAIDRIRRGQNIIQRTHPDYPDAKFVMSLSQREMLILRIDGRDMLYRFDTAASTTKQMAFYPDNAAEQHGKLTKYPDSLAKLNPRKVTVDPLGRIRWAND

SEQ ID NO: 18485 - protein, 1100 aa, unidentified
  REGION 1..1100: note = Cas Enzyme sequence
MSHTTLGLDLGPNSIGWALIDQDRDCVINCGVRHFPEGVDAFDTKKEKPRNEARRAARGMRRQNRRRGARKRGLRSELIRVGLWPEEPAEQEALLRRDPLALRVRALEEPLTAHEIGRALLHLNQRRGFLSNRKKERKTPEVKGMLAEINTLAADIQQTGCRSTLGEYLYRKAASLNHCHRTENDHVRRRHTLRQMLVDEFDQIWTCQQRHHPDLLSDKLRFGVKGPQKQPHKPVRRGQSHTLVDAFGLEGFLFFQRTMYWPRSVVGKCELEPKEKRCPRADRRAQRFRILQELNNLRYIDPITYEEQSLDDDQRNLVLEKLSTRKEMTFEAMKKALGFMETVQFNLESGKRTKILGMVSDYALANKNAMGPAWHKLPENVKNAVVELLAVSTDDDETFERLVHVQGLTPEQADGALSADLPAGYVKLSLKAIEKLLIHLERKLPLMGNDESDSAMHAAGYMRRDQLQRRVFDQLPDLARVGDARVGDIPSPVVKRAIVELRKVVNAIIREYGKPDAIHVEMARDLRQGPKARSEYSHRIREIEVKRSRAADEIRALRDQGVNVRLNRDTIQQYLFWQEQDHSCMYCQGKISQAQLFGGEVDVDHILPYSRSLDDSQMNKVVCHRHCNADKTNQTPHEWLAPRDPARFERVCQHALSLVRGGLLPYKKYRRIIQKELKLDDFIARQLTSTAYIARATVEYLKCLFAQDHSVLGLKGELTAELRHQWGIDNLLSTLPDSPAWQAQNELRPGEKNRADHRHHAIDAIVIALTDRSRLQQLSRIRKAGGTLRTGEVLPFPWETFRDDVVDKVSRINVSHRAERKVAGALHEETAYGPTRDADVFVVRKPLDALSPNEVPLIRDAVIRSIIEERLKNHGIEVGRATKKVDARRWRAAMANVTMPSGVPIRKVRVLRKEKTIQPIRGGSVHEAYVKPGSTHHLALFEWEEGGERKRSVDFVTMLRATDRVKTQRQEFRRLVTQYQEAEQEKIRKRSSQYRERQRQAERVAPLIDRNPPSNHATIPESAKFLYSLSRGEMVWANWKGQHKLLVFKTAASTQGQIYFAEHTDARRSAEQTQFVARANKLDARKVTVDPLGRIRWAND

SEQ ID NO: 18486 - protein, 1008 aa, unidentified
  REGION 1..1008: note = Cas Enzyme sequence
MAKKLGLDLGPNSLGWALIDTDAGELVAAGVRVFPEGVARDTQGHELSKNEVRRLARGARRVTRRRAGRRRRLRQLLVESRLLPAPASRPPGNPQRVAWEGDAFRAADPYELRRRALDERLEPYEIGRVLTHLAQRRGFLSNRKADRARKKETSEMLAEISGLESDIATSGARTLGEYLSTLNPGDPRTRVRGRHTRRDMYQREFEAIWEAQKPHHPAVLTEELRQHVRHLLFYQRPIRVPRRLIGTCELERNRRRCPRADRGAQRFRILQEVNNLLLIDEHGEERPLTGQERTELIAYLASSTKRTFDQIRKKLGLSPNVRFNLERGDRKYLYGMPTDRALAHKDRFGKAWDKLDDEKKNRVVRSLLDDDEPTVLEKATTLWGLSRQQAEAVLDADLPPGYMRFSREAIYKLLPHLERGLPLMTGQDRPCAITEAGYLRPDQRDVQRRSRLPRPLDVPNPVVRQGLFEVRRVVNAILREYGPVDQIHVELAREVKGSFRDRWEYIKTIRRRERQRDEARQAVAAQGVRPTRDAIQRYLLWREQETVCVYTGRPISLTQLLGGEVQVDHVLPNARSLDDSMMNKVVCFRDSNVEKGDRTPYEWLAEADTQRYDEVCLRARKLPYGKYRKFLLKNVELDKFVSRQLNDTAYISRLVRQYLECLVADRHRDILCTKGQLTGELRHSWGLDTILRDLPDSPAWREDPSLANAGKKDRSDHRHHAIDAIVVALTDRSRLQRLAREESAHAPWGGFRDDVVAAVRGMHVSHRVTRSLHGPLHEDTFYGKTDRSDWFVRRKPVKDLTLAEVERIRDKVVRAKVIERLQESGLEPGRKKRGTEGGGKILAEVWTETLWMNEEKGIAIRRVRVEMTDKSILPIRGGSVFVKPGNTHHLCIFEMPDGKRKPVFVTMLEAARRARDGQPIIQREHPDAPEARFLMSLSPGELVLADCNGEERILRYRTAASTQHQIYFVDARDARPRKEQKDYVFRPNTLNARKITVDPLGRIRWAND

SEQ ID NO: 18487 - protein, 1011 aa, unidentified
  REGION 1..1011: note = Cas Enzyme sequence
MPTRLGLDLGPNSVGWALIDTDSACVAATGVRVFPEGVDRDTKGGELSKNEARRVARGMRRQITRRAKRKRRLRKLLVDAGLLPPTAALPRSDPQRQEWETHAFKENDPYAIRRAALDGKLELHEIGRVILHLCQRRGFLSNRKADKADKARKKEAPRMLVEISELEAQIAAASCRTLGEHLAGLADKNPLARLRGRHTRRDMYQREFDAVWQTQQSHHPGVLTEDLRERIHHIIFYQRPIRIPKSLVGCCELEPKRRRCPVADRRAQRFRMLQDVNNLLLIDEHGEERPLTPEERSCLLDHLSTAASRKFVDIRKHLGFSDQVLFNLERGERKSLYGMPTDKALSHKDCFGKGWLGMEEEQKNRIVRCLLEEDDDAIKHKAVSEWGLTREQADNILDADLPAGYMSFSREAIAKLLPHLEQGLPLMTGDDRPCAITLAGYLRPDQRPVERLDHLPQPPDLPNPIVRQALHEVRKVVNAVIRQYGRPDQIHIELAREVRGSAKQRAEYIFNTRKREARREQAAEEIRQAGFVPTRNAVNRFLLWKEQGEVCAYTGRPIGQKQLMEGEVDVDHILPKPRSLDDSMMNKVVCFRAANAEKGDRTPYEWLAGSDPQRYEELCRRARKLPYGKYRKFLLKELKLDDFVHRQLNDTAYISRAVREYLRPLVADPHADILCTKGQLTAELRHGWGLDTILSELPDSPAWREGADLGHGQKNRSDHRHHAIDAVVIALTDRSRLQQLARQRVCPPPRERFRDEIVQLLKGVRVSHRLRRKVAGQLHEETLYGKTPKPGEFAYRKPLDRLTTAEVERIRDRVVREKVIQRLGEFGVRVGGKKKGQSDGESKIPPEAWSKPLWMNEEKKIPIKTVRLTKPDKTIQPIRGGTALVKPGSTHHLCIFQLPNGKREAVFVTMLEAARRAANGLPIIQRTHPQCPDATFVMSLSKGELVLANWKGQERILQMQTSVQTEKKVEFTDPSDARPSTQKAKYRCQASAIEGKKITIGPLGEVRWAND

SEQ ID NO: 18488 - protein, 1360 aa, unidentified
  REGION 1..1360: note = Cas Enzyme sequence
MVSSYLGLDIGSNSVGSAWIDYKEGVLATGTSIFPAGVDESDEKRGEPKNAKRRMTRRTRITLARRAARKRRLRQALISAGLLPPDSEGFKTLLEQDDPWSLRRKGLDNPLRPYQFGRVILHLAQRRGAQGLRATEVEDGTDAEGDKEEGKVKTSIIAVRTAMRQKNAHTFGELMAILREERVSLIKSPDRRSEGHGVGPREYRGAIRNKGANYEHCADRAMIRDEFAKLWNEQKRQGGPLAEKLTDDLRLILDDEMGDSDWKQKGLLFGQRRASWDVGTLGRCVLEPTERCVPHADMYASRYLVVETVNNLKIIERGKEARSLTPEERDKIKKYLSGPLGIIGNGKLKGQPKRSVSISDLRRQMDWGLASKTSQFRFNVESDEDRDINTDWFSREIIHGAITPGNWERLGENARDRVNRAILKYDPGEEEDERKMKAVTSWAKLTEAQADAVINAWKRRPKPDSKRLNMSRRAARNLLALMDGPEPWPDLNRPGETRWLTPIEARKSIAADKNFRDVTTGRVLDETARIRYATGAKGATARDRHYMKRHPLRRNGQLIFGPDGCLLPEPPPAPMISNPVVRKAIHEVRRHLIEYMIQFGRKPDQIHVELAREAKMGKKDADALLFRNRLRNRIRNDIVNEFGLSSYSSTQQHEAVRRVVLAMQQKCVCAICGKTMIDGNCEGISLRTAAEGRGCEVAHIIPRASGGMNGFANTMLAHDKCNRNMGRRTPRQFWESALSGGYEEGITWIEKMYRGIERPKISAVKEATGQSLWACYFTRRDDLAKIAQFKKDVKDIQGMTARQEAATKYATRQVMAYLADALFDGKGLPERGGDRRIYATDGMWTSRLRREWGLFFDPHSSKAKGLSGEEHHVRKEKNRGDHRHHAIDAVLVAYCSQSVRNVWDAREKRADVDGINTADEAALETYRRLHPLDPPAPFRTTDEFRHAVARSIFGDGEIERPLCHRPVKRKLIGPLHKATQYGPVIDTWKHNGTINRELVEGRVTVRQAILGETPGDFLKVSHLRLPRLETDDEAIRRLARRYRIGKQQLTAPQAITFAKKLVKTKAFTRKFVDPKPEKGGLVRDIGQRRLLRHLLEQRGLNPENYTQKELKQSIDLHGPLKNDADIPIHKVTLLWSNSDPVTILRDEYDHATSNRRKLDRADFPYTLRLYDGQNNHHIEIRSVNKLNGKQVWSGVVVTGFEVAQRKLARLRAFKRAGIPKSSVLRSLPIAERAKFKHSLRDAEQAHPLVDRSDNPDLGGNFVMSLCEGEMLFMKHKETGEIGYFVVAKLDKPQSIFLVPHWDARSATERKDSEGKKVPDSKREQFPVTPMDLKKLAPPGQPHALKVRVSPLGQVKVLNRD

SEQ ID NO: 18489 - protein, 1067 aa, unidentified
  REGION 1..1067: note = Cas Enzyme sequence
MSKRVLGLDLGPNSVGWALVTEGDASGPEAGLIDLGVRIFPEGVDNFDTAKEVSRNEQRRVARGMRRQIKRHARRRRRLTQALVQSGLWPSDPAAREALMAMDPYALRSRAIRERLEPHEIGRVLLHLNQRRGFLSNRKKDRGDKEVKGMLAEINENERLRCEAGFETIGAWLADKQANLHHHGREENDHVRNRHLARSQYEQEFEAIWNKQAEYHPDLLTDELKHGRLGSMKYPVKPIRLPRGMTQLEAFGLHGILFFQRRMYWPKSVVGLCELEPKQKRCPRADRHAERFRVLQEVNNLRFVDPDTHIEQGLSDGQRAMVIEYLGTREKATFDQIRKKLGFLESVRFNLERGQRSSLKGMTVDWLMATAIGKQWHDRPEDEKDEIVRLLIDNDGDKDAVHDALTDQYGFTADEAEKALDVDLPTGYTSLSLVAIDRLLPHLQRGLVYQSASDPERSALHAAGYLRRDELGRRLFGELPDLRRINPANCRLGDIPNPVVKRALTELRKVVNAIIREYGKPDAVHLEMARSVKMGPKARSEYNSRIRERERERSNAADSLRQAGTPVRRESILRYQLWEEQSHECMYCGQPISQQQLFGEGAEVDVDHILPRSRSLDDSQLNKVVCHRRCNHDKGQQTPYEWLAASDNQYEAICQRAAALHKKGLMPYRKYVRFLQKELKLDEFVNRQLTDTAYITRATMEYLRLLFHQDHAVLGLKGQLTAELRYHWGLDTILAELPDSPAWQEHINLRPGEKNRADHRHHTIDALVVALTNRSRLHELSDIVHRGGARRHGEILDEPWPDFREDVQDAVSRVNVSHRVERKVRGALHEGRIYGPTDNPGEWVFRTPVTKLSPSEIDRIRDDVIRRLVIDRLAEHGIEHGRGKNANSKKLKEALSGLTMPSGVPIKKVRILKPDKTIQKLRIDEGDKASVKPGSTHHLCIFEWQENGKAKREAVFVTMLEAVNRLKRGEPVIQRTHPKRPEARFVMSLGRGELILADWKGEEKLLTLKTSISTEGKVEFAEHVDARKSSGDRKYHKYKMTINSMFARYNARKVTVDPLGRVRRAKD

SEQ ID NO: 18490 - protein, 1073 aa, unidentified
  REGION 1..1073: note = Cas Enzyme sequence
MGKKVLGLDLGPNSIGWALVDVGDSKSEASLIDMGVRVFAEGVDAFDSAKEVSRNEGRRTARAMRRQTKRRTLRRRRLTEALVSAGLWPSDPAEQNELLQRDPYELRSRAVDPAGELSPYELGRVFLSLSRRRGFQSNKKTDKGKEAGDLLQEISENEKEREASGAPTLGAWLHQKSIAFDHRHRVPNDHVRRRHLSRKEYLDEFDQVWETQKAKHPQLLTDRLRYGMAGENRYPVVPTARPKPGDRLLDLFGLHGLIFFQRKMYWRTSVIGRCELEPKQKRAPIADRRVQLFRILQEVNNLSYIDPNTKETTLLDDGQRKRLIAKLMMKEKMPFDDIRKALGKLDGVRFNLEKGERSNLKGHRTDSTIAQKKYFGPDWYDLEEGVRTEVVEALLDPNLDEFQFAEKASNTWKFSPQQIERLLAVDLPTGYGSLSTKAIEKMLPYLQKGMIYSSSNPENSALGAAGYLRRDQLKRRLFDFLPSPARTKNTPIGNIPNPVVKRTLTEVRKLVNAVVREYGKPSEIHVEMARDLQMGSKKRKKVSSDMRKREAKREEIADRIKEADERPTRENILRYQLWEEQNRMCIYTGRPISQTQLFSEIGGVDIDHILPRSRTLDDSQANKVLCFRDVNAEKGNRTPYEWLADNHPERYESLIARVLSLRKSDFYTSNKTDRFLIRQLKVDDFIARQLVDTAYITRATAEYLRCMFDADHHVLGLKGRLTSELRWRWGLETLLEELPDSPAWAAAKKLRPGVKNRADHRHHAIDALVIALTDRSTLQKLSATLGDRLAAREETQLELPWKGFRQQIKEKVASILVSHRVERKISGKLHEETLYGPTKKPGEWVVRKSIDLLSLSEIPQIRDAVIREAVIRKLAANGIEVGRAKDKDKKLPKKLLCDLMMPSGVRIRKVRIVKKDGTIRQIRSGCLRAYVKTGSMHHLTVFEWGKNGKNERGAVFVSMLEATRRLKSGKTVIERDPPQNHSVIPANARFLFSLSANEAFLAEKNGVQHLYIFSTAPSTRNELRFYSHLDARRVTSSDRDENDKKKIKTFTLRRLVGRKVTVDLLGRVRWAND

SEQ ID NO: 18491 - protein, 1063 aa, unidentified; identical to SEQ ID NO: 15610
  REGION 1..1063: note = Cas Enzyme sequence

SEQ ID NO: 18492 - protein, 1063 aa, unidentified
  REGION 1..1063: note = Cas Enzyme sequence
MKKRTLGLDLGPNSIGWALVEEDLQQKGGCLIDMGVRVFTEGLDAFNTGKESSRNEKRRVARGMRRQTARRRKRRKEMTDALKSVGFWPSTAQERDNLMKLDPYELRAKAVSNVTLTPFELGRVFLHLTRRRGFLSNRKTDATGKEGEGLLHEIQENETKRVQSGHPTLGSWLNEKQQTQDPKNRKEDDHVRRRHLSRKQYQHEFDLIWKSQSGFHPKLLTDRLRWGNLGPIEFPCKPLPKTDRSATKLELFGIEGLLFFQRKMYWPTEVIGRCELEPKKRRCPVADRRYQRFRIWQEINNLRYIDPDSGCESQLTPGQRTLLFGKLWDVDKFEFSKIKKALGFLESVKFSLEKGEKSSLKGNATDKVAKGIWGKDWIHLEEALKDEIIEALTNPNLDDREFVNLATNKWGFDTEQISRLMKINLPSGYGSLSLKAIKKLLPHVEKGLTYSLQDEENSALHAAGYLRRDQLKKRIYDFLPSPQVERSATIGDIPNPVVKRTLTEVRKLVNAIIREYGKPDEVHVEMARNLKIGAKKRKEITTENEKRAKKREDIAIKLRDHGVLANRENILRYQLWEEQNRQCLYSGRTISVSQLLGEGAGVELDHILPRSRTLDDSQTNKVLCFRDSNQSKGNRTPSEWLASSNSTQFDEIIQRANILLRSGMMPYSKYKKLLQKEVNTDEFVSRQLVDTAYITKVTGEYLRCLFDADHHVLGLKGALTAELRWQWGLETILEQLPDSPAWVTRDELRPGEKNRADHRHHAIDAVVIALTNRSRLQTLARSMADRTNQREGELHDEPWENFRDTIKERVSKVWVSHRVERKVSGALHEETQYGKTERPDWWVTRKAVDTLKANEIPNIRDPLIRDLVISKLKQAGIDFGRKAEVDPKRLKEILADLRMPSGVPIRKVRVLKTDKTIRSIRKKKSETFVKPGSTHHLSIFEWEENGKKRRAADFLTMLEASQRSKKGASIIQREAPASNEKIPTNAKFVMSLAQRETVLVEQNDKVDLLIFRTAASTQGQIYFSHHSDARSSNDYKKIVFSANTLRGRKVTVDLLGRIRNAGD

SEQ ID NO: 18493 - protein, 1063 aa, unidentified
  REGION 1..1063: note = Cas Enzyme sequence
MKKRTLGLDLGPNSIGWALVEESSDEKSGKLIDMGVRVFTEGLDAFDTAKESSRNEQRRVARGMRRQTARRRKRRKAITQALTSVGLWPASNDQREILIQQSPYELRAKAVSGTKLEPFEIGRTLLHLAKRRGFLSNRKTDAAGKEAEGLLHEIQENETKRVQSGHPTLGSWLNEKHQSQDHKIRREDDHVRRRHLARKQYQHEFDTIWKSQSKFHPHLLTDALRWGKLGPTEFPCKPIPRNGQPESPLELFGIEGLLFFQRKMYWPTEVIGRCELEPKKRRCPIADRRFQRCRIWQELNNLRYIDPDNGKEFQLSVPQRQLLFAKLWETDKLELSKLRKALGFLETVKFNFERGERSSLKGNATDFAARKAWGKDWNHLDEDLKDEIIEALTNPNLDDREFSQLASEKWKFNNEQISKLMKINLPSGYGSLSLKAIKKLLPHLEKGLTYSLQNEANSAIHAAGYLRRDQIKRRIYDFLPSPQVERKTPIGDIPNPVVKRTLTEVRKLVNAIIREYGKPDEVHIEMARNLKMGAKKRKEITKENGDRAKKRESIADTLSEHAVLRSRENILRYQLWEEQNHQCLYSGKTISIAQLLGEGGGVEIDHILPRSRTLDDSQTNKVLCYRDSNQAKGNRTPHEWLASSKPDQFDEIIQRANILLRSGKLPYAKYKKLLQKEVNTDEFVSRQLVDTAYITKVTGEYLRCLFESDQQILGLKGALTAELRWQWGLETILEQLPDSPAWSTKDQLRPGQKNRADHRHHAIDAVVIALTNRSRLQSLAKAMSDTTNQRQGELMAEPWEGFRESIMERVSKVWVSHRVERKVSGPLHEETQYGKTDQSDKWVTRKPIDSLKTTEIPNIRDPFIRDLVIAKLKDVGIDVGRNTQVDAKRLKEVLADLRMPSGVPIRKVRLLKSDKTIRPIRKNKCETYVKPGSTHHLSIFEWEEKGKKKRGAIFLTMLEASRRSKTGDSIIQRDVPTKTESIPPSAVFVMSLAQRESVLLEDGDSLNLMIFRTAASTQGQIYFSMHTDARSSNEYKKMVFSANTLRGRKVTVDLLGRIRNAGD

SEQ ID NO: 18494 - protein, 1063 aa, unidentified
  REGION 1..1063: note = Cas Enzyme sequence
MKKRTLGLDLGPNSIGWALVEEDLQQKGGCLIDMGVRVFTEGLDAFNTGKESSRNEKRRVARGMRRQTARRRKRRKEMTDALKSVGFWPSTAQERDNLMKLDPYELRAKAVSNVTLTPFELGRVFLHLTRRRGFLSNRKTDATGKEGEGLLHEIQENETKRVQSGHPTLGSWLNEKQQTQDPKNRKEDDHVRRRHLSRKQYQHEFDLIWKSQSGFHPKLLTDRLRWGNLGPIEFPCKPLPKTDRSATKLELFGIEGLLFFQRKMYWPTEVIGRCELEPKKRRCPVADRRYQRFRIWQEINNLRYIDPDSGCESQLTPGQRTLLFGKLWDVDKFEFSKIKKALGFLESVKFSLEKGEKSSLKGNATDKVAKGIWGKDWIHLEEALKDEIIEALTNPNLDDREFVNLATNKWGFDTEQISRLMKINLPSGYGSLSLKAIKKLLPHVEKGLTYSLQDEENSALHAAGYLRRDQLKKRIYDFLPSPQVERSATIGDIPNPVVKRTLTEVRKLVNAIIREYGKPDEVHVEMARNLKIGAKKRKEITTENEKRAKKREDIASKLRDHGVLANRENILRYQLWEEQNRQCLYSGRTISVSQLLGEGAGVELDHILPRSRTLDDSQTNKVLCFRDSNQSKGNRTPSEWLASSNSTQFDEIIQRANILLRSGMMPYSKYKKLLQKEVNTDEFVSRQLVDTAYITKVTGEYLRCLFDADHHVLGLKGALTAELRWQWGLETILEQLPDSPAWVTRDELRPGEKNRADHRHHAIDAVVIALTNRSRLQTLARSMADRTNQREGELHDEPWENFRDTIKERVSKVWVSHRVERKVSGALHEETQYGKTERPDWWVTRKAVDTLKANEIPNIRDPLIRDLVISKLKQAGIDFGRKAEVDPKRLKEILADLRMPSGVPIRKVRVLKTDKTIRSIRKKKSETFVKPGSTHHLSIFEWEENGKKRRAADFLTMLEASQRSKKGASIIQREAPASNEKIPTNAKFVMSLAQRETVLVEQNDKVDLLIFRTAASTQGQIYFSHHSDARSSNDYKKIVFSANTLRGRKVTVDLLGRIRNAGD

SEQ ID NO: 18495 - protein, 1063 aa, unidentified
  REGION 1..1063: note = Cas Enzyme sequence
MKKRTLGLDLGPNSIGWALVEEDSQQKGGCLIDMGVRVFTEGLDAFDTGKESSRNEKRRVARGMRRQTARRRKRRKEMTDALTSVGLWPSTTEERDNLMKLDPYELRAKAVSNVTLTPFELGRVFLHLTRRRGFLSNRKTDATGKEGEGLLHEIQENETKRVQSGHPTLGSWLNEKQQTQDPKNRQEDDHVRRRHLSRKQYQHEFDLIWKSQSGFHPKLLTDRLRWGNLGPIEFPCKPLPKTDRSATNLELFGIEGLLFFQRKMYWPTEVIGRCELEPKKRRCPLADRRYQRFRIWQEINNLRFIDPDSGRESQLTPGQRTLLFGKLWDVDKLEFSKIKKALGFLESVKFSLEKGEKSSLKGNATDKVAKGIWGKDWIHLEENLKDEIIEALTNPNLDDREFFNLATAKWGFDNEQISRLMKINLPSGYGSLSLKAIKKLLPHVEKGLTYSLQDEENSALHAAGYLRRDQLKKRIYDFLPSPQVERSAPIGDIPNPVVKRTLTEVRKLVNAIIREYGRPDEVHVEMARNLKIGAKKRKEINTENEKRAKKREDIASKLREHGVLANRENILRYQLWEEQSRRCLYSGRTISIAQLLGDGAGVEIDHILPRSRTLDDAQTNKVLCFRDSNQSKGNRTPSEWLASSNPTQFDEIIQRANILLRSGLMPYGKYKKLLQKEVNTDEFVSRQLVDTAYITKVTGEYLRCLFDADHHVLGLKGALTAELRWQWGLETILEELPDSPAWVTRDELRPGEKNRADHRHHAIDAVVIALTNRSRLQTLARSMSDRTNQREGELLDEPWENFRDTIKERVAKVWVSHRVERKVSGALHEETQYGKTERPDWWVTRKPIDSLKANEIPNIRDPLIRDLVISKLKQAGIDVGRKAEVDPKRLKEVLADVKMPSGVPIRKVRVVKTDKTIRSIRKNKSETFVKPGSTHHLSIFEWQENGKRKRSAVFLTMLDASQRSKNGNSIIQREVPEQNETIPKTAAFVMSLAQREAVLVDQNDKVDLVVFRTAASTQGQIYFSHHTDARSSSDYKKIVFNANTLRGRKVTVDLLGRIRNAGD

SEQ ID NO: 18496 - protein, 1080 aa, unidentified
  REGION 1..1080: note = Cas Enzyme sequence
MGAEMKYRLGIDLGTNSLGWAVLELADDPSKPTRVIRLGSRIFSDGRNPKDGQSLAAMRRLPRSQRRRRDRYLKRRARLMDVLVEHGLMPAEVDEQYKLVSLDPYRLRALGLDQALHPHHFGRALFHLNQRRGFKSNRKADRSADKETGKVRPAIEALQARLLQAGARTVGEYLARLRYPDGLGAEKASKSPVRARLRNAGKKDAAYNLYVGREMVEQEFDALWDAQSRFALTTTKEDARSAIKSILFFQRPLRPIDPGPCAIDPPQSKDDREGRRAPLALPSAQRIRIYQELNHLRITLPGRDERPLTRDERDRLAEPLLRGRKLEFRTTVRTLLAVPTGTLINLEDAERRPALKGDFTALALGSEKCFGTAWHRLRLVEKDAIVERLLDTESQSELVDWLTSELSLPRTNALSIAEAALPENFSRLGRRAISRVLPELVADVVTFSEAVGRAGYGRHSQNHDGIVRSQLPYYGEVLAQYVSGGNLDLKELNEERRWGRLANPTVHIGLNQLRKLINALIHRYGKPEQIVVELARELKMSRDQKERLRKEQAENQRRNEQYRSELASWPGVRPNDSSEARLRWKLWNAIRGEGGLAVVCPYTGETISAAMLFSDAVEIDHILPFSRCLDDGIGNKVLCVRRANRDKAGQTPFEAFGHSPQGYDWGAIQARVAALFPRDKTKARRFAADGLDWYLREQDFLARQLVDTAYLSRVARQYLESLYPPDAARVWVTRGSLTGLIRGKWGLNRILSDSGVKDRTDHRHHAVDAAVIAVMERSLLKALSDAARRAELSGVNRLVDDMPVPYPAFRSEVESAVQRVVVSHKPDHGPQAALHNDTSYGLVDTAPVKGARVVVHRVPVATLQPRDVDENLLLPSPQLHKRLSTMIDGKAGKDLASALEQFSLETGIYRIRKRERLAIEPITDVTRRPYRGVKTDGNYCYEIWQADNGRWGGKIISLFRANRKDYADFMKDLGRYRKLSYSGQRLVMRLLVNDMVAIEGDSGRRVMRVVKQSEGKVVFAEHFEGGNLKERDATATDPFKYLTRSPASLQALKARRVFVDILGTVKDPGPPKCSSDASST

SEQ ID NO: 18497 - protein, 1054 aa, unidentified
  REGION 1..1054: note = Cas Enzyme sequence
MSAAVNTLWNIDNVPISGTTKGNAMTRPDEGLRYRLGLDLGTGSLGWAVLELDAHGKPCRIVRMGSRIFGSGREPKTLTSLAADRRQARQMRRRRDRYIQRRTRLMHELVAAGLMPTDEVERAALKTLDPFELRARGLDEQLEPHELGRALYHLQQRRGFKSNRKADRGNVEKSAMKQAIRDLDAAMGDDETVGSHMWRRIQDGKRARIVPEKIGSKNSYEFYVDRAMIEREFDRLWETQRKFHSDILTDANKAKISHAIFDQRPLKPVDPGRCTLEPGQKRAPVALVSTQLFRIYQELNALRVQDQTSVTLANRPLTREERDAGVAFLGTKAKVSLSALKKELFGREPMTLSLEAGERAHILGDIVSAELSKASAIGARWWGLALAKQDAIAAVLHDAESDEEVITQLLAHGLTQEEAEGAADASLPEGYSRLSRVAIGKILPHLIDDWDTEADAALTYDRAVLAAGYASHSDLHGGELFEALPYYGQVLRRHTQDLANRDSYHVRTTANPGEWEFGKVANPTVHVGLNQVRVVVNALVERYGSPAEIHVEVARDLGQSAEGRREASSKRAQNEKANDALRAELAALGQRDTFANRERLRLYNELSALNHVWVLTGIPIPKSRLFTNDFQVDHALPYSRTLDDSLSNKILVHHTANQYKKARSPFEAYASLENREDNPEWAAILDRAESAFGKTSPKFRRFSADAMDRYENGEQDFIARQLTDTSYLARLTREYLATLVLAGDDGFHPERIVAMPGRLTSLLRGKWGLNSLLSDNGEKQRSDHRHHAVDGLVIALSDRSTLKAVTDANKKAEDKYRLANDAGVKKLLDDLPLPWVGFVDDAQAAVDRIVVSHKPDHNERGQLHEETAYGVHDGPDKEGRYLVAKSGEEPKWRPVVPIFRRGEGPDSALPYKAYVGGSNYCIEIVRNAKGRWEGEVISTFQANQADFQAFMGETSTFRSQSFSGRDLVMRLVAEDCIAVEREEGVREVLRFIKTSGASQMFFTNVREGNVDARSRDKSVAFAMLSKNPGPLQAIRARRVFVDPIGRVFDPGFAG

SEQ ID NO: 18498 - protein, 977 aa, unidentified
  REGION 1..977: note = Cas Enzyme sequence
GREPKSLSSLAANRRQARQARRRRDRSIQRRKRLMHELVNFGLMPEAEEERQALKSLNPYELRHRGIRERLEPFEIGRALFHLQQRRGFKSNRKADRKNDEKSAMKAAIRELEAAVGPEETVGSFLYRRLTTHGSTRMRPTQRGGQNTWEFYVGREMLEHEFDRLWETQRAYHPELLTEEARQRIREAIFRQRPLKPVDPGRCTLEPDEKRAPIMLASSQLFRIFQEVNALRVIEGDSLDLRPRPLTREERDAAIALLRSKPKVTFAALKTRVFGKGADVRLTHEEGERAHLLGDVVSAELARDGALGSRWHDLTLDEQDEITRILHDADSDEDVVGALTTRFGFSEHEARGACEASLPDGYYRFSHKAIRRILPYLIDWDEDADAARTFDKAVAAAGYSSHSDIHSGEIFDQLPYYGRVLYRYTQDLANRSEDHVKERTNPDEWEFGRIANPTVHVGLNQLRVIVNAIVKRYGPPFQVHVELARELGQSAVKRLEASRKRSENERRNEALAQDLQALGQINNHANRERLRLYEELAPLDQMCVLCGERIERSRLFQPGVYEVDHILPFSRTLDDSFSNKHLIHTQCNRFKKNRSPYEAYGELPEWPQILERAEAAYRNTKAKLARFASTAMERYESGGQDFIARQLTDTSYLARVAREYLTYLRLSGDDGFHPERIVAMPGRLTGLLRAKWGLNDLLSSTGAKERSDHRHHAIDAIVIALSDRATLKAVTDANRRAADKYAASNDDGFRKLLDDLPEPWTGFTEDARAAIGRIVVSHKPDHNEKGALHEETALGVRGGPDKEGRFLVRKKGEDERWRPVVPVYRRGEGPDSSLPYKAYVGGSNYCIEIVRTSTGKWEGEVISTFQANQRDYQAFMRDRRRFLRESFSGRPLVMRLIAGDTVAIEREPGKREIWRLYKMSSAGQMYFAPVNEGNVAARVSAGLLKAFTPRADPLRKVRARRVFVDPLGRVHDPGFRE

SEQ ID NO: 18499 - protein, 1031 aa, unidentified
  REGION 1..1031: note = Cas Enzyme sequence
MNANDGNTALKYRLGIDLGTGSLGWAMIELDDDGYPCRVIRLGSRIFGSGREPKTLSSLAANRRQARQMRRRRDRYIQRRTRLMHELVAAGLMPAQESERNALKDLDPYLLRYRGIRERLEPYELGRALYHLQQRRGFKSNRKADRGNTEKSAMKEAIRDLDAALGADETVGSYMHQRLARHEHGVGARIKPVLQGSKNSYEFYVDRAMIEHEFDLLWNTQVEYHAGLLSDEARTRIHAAIFDQRPLKPVDPGRCTIEPNEKRAPVALASSQLFRIYQEVNALRVIDDASMDLRARPLTRDERDAAVSYLRGRAKATLPALKKAVFDHGSSVRLSLEAGERASILGDIVGFELSKASAVGARWHELTLDEQDAITRILHDADTDEAAVAALVQDHGLTEDEAFGACEAALPEGYYRLSQKVIRKVLPHLMDDWDDDGDAPLTYDRAVVAAGYDSHSDLHDGELFDVLPYYGKVLHRFTQDLANRDSFHVKATANPDEWEFGRVANPTVHVGLNQVRTVVNALIKRYGPPFEIHVELARDLGQSAEGRREASARRAKNEKLNDELRAELAGLGQRDSYANRERLKLYAELAPLNQVCVLCGERIERSRLFQPGMYEVDHILPYSRTLDDSFNNKHLIHVACNRFKGQRSPFEAYGDLDSWSMILDRAEAAYANNKAKLNRFSADAMDKYENGDADFIARQMTDTSYLARLAKEYLTRLELSGNDGFHPERVVAMPGRLTALLRRKWGLNNLLSDTGEKERSDHRHHAIDAAVIALSDRATLKAVTDANKRAEAKYGASNDDGVKRLLDDLPEPWDGFHAEMVGAVDRIVVSHKPDHNEHGQLHEETAYGVHDGPDKDGRYLVAKAGEEPKWRPVVPIFRRGEGPDSALPYKAYVGGSNYCIEIVRAASGKWEGEVISTFQANQPDYQAFMRDTASFRTQSFSGRELVMRLVAGDIIATEQESTRDIWRLCKLESVGSMYFARVEEGNVDARTRDKSVDFTMLKKNANPLRSMNARRVFVDPLGRVFDPGFVE

SEQ ID NO: 18500 - protein, 1109 aa, unidentified
  REGION 1..1109: note = Cas Enzyme sequence
VKYKLGLDLGSTSLGWAVVELNDVDNITRLVDMGVRIFPDGRDAQSHTPINVVRREHRQMRRRGDRVALRKKRTLQLIHKYGMDFDIRVDATLADPYALRARAVVEKLQPHELGRVLFHLALRRGFKSNRKETRGEAGGKLKNATASLQVAMGDKTLGQFQFESHRYRFAEQFDGNKIKDGAFYPTRDMYLAEFNRICTAQGLSDEMRKEFEHAIFHQRPLLPPVIGTCMFEPGQLRAYKFEPVFQRFRVLQQINQLRIIDNGVVTELSGEQRQKLQDILLRTFDDVKRDKSGRVKITFAAVRKMLGLARGVRFNLETEKRKEMDVDTTAFAFSECGLSDFWYACPDDKKSQILARINDDTLNDDDLIGYLVDKCGLNSDVAAQLIQRPFEEGVANLSVCAMQKMLPFLAQGDLYHVAEDKAGYNHADRGVVQMAQLPYYGDVAALKPSLVPDKNGVYRTMNATVHIALNQLRAVVNDLIARFGSVPYAINIEMGRDVRAGARERAEIDSQQAANKRENDRIASELVVMGGRVSRENIQKYKLWENLGKNPLDRRCVYTGEIISKEKLFSPEFEIEHILPFSRTLDDSMANKTISAVAANRFKGNRSPDEAFTDSKSPWHYDDVVARAQNLPGATKWRFNRGAMNAFLRDQDCIARALNDTRFMTRIAVTYLQHVCADKYRVTGMPGRMTAMLRDAWHLDWWKDKADAEKYRGNHIHHAIDAFVVACTGAGILQRLSRNAIETDKLFGKTQKEKRRQWFVDMNVPFDGFDYYDFKMRCENTIISYRQSQKSPKDSKGTIGCLHEDTAYNLEFFERGTSAVMSRRDALPTTDKDKKDFAKAFNNVNPKTLQMFLKDTGTTNDEPNIANKFLDWCTLRDIRKVRMYKRGVDVTTYVPVFRTKRQRDTYRATYLNWYVASGIAGGIADKKMRLAQQEKEKALLQEFQNAAKLAYKWYVGGNNFCADVFKMRDDDKRYPKLRGRWQVEILSNYNAQLDAGSPLWRRKYATAGRVMRLRINDMVMATFSKDDPKLPKGLVETVMHQCAIENTDTVNVIFRVKKISSNGTIYLRPHFIAKEEGDTKSWIASATSLQEHNAHKVYVSPSGKLQCLE

SEQ ID NO: 18501 - protein, 1098 aa, unidentified
  REGION 1..1098: note = Cas Enzyme sequence
MVIPYRLGLDLGANSIGWCAVKLDGQGSPCGVLDAGVRILTPNDEAGRDPKSKASLTANRRDARSMRRRRDRFLRRRKRLMTLLIDNGLMPADEQERKALERLDPYWLRAAALDQRLEAHELGRALFHLNQRRGFQSNRIADADDGEKSATRDGMRDLGQALRKSGARTLGEFLAQRHRRDKDGRRLLQNGKAMTPESVRFRPSIQGTRNLYDFYPSRDLISAELTQIWEAQAVHHECLTPALFDKLKRVILEQRPLKKPLVGRCMLRPDVQPVRQYGIDLDLGERAPKAHPLFQRFRILQDVAQLRVVLPGMPERPLRLPERDRVAAYLMNHGGSTIELKKLRSAADLPDNARFNYEQSGRGNLPPDQTAAKLAAKKAFGKRWRALLRERQIEVVERLLAMEDDVELTAWLRKEHGLSDVEAETVSAIRLPPGHGKFGRSALADLVKEMEKQSKEAEDPNTGEVYERPLTYDEAVEALGRHHSDLRPAEKATRLPYYGEALVRHVVSMPAAPEGSQERIGRVPNPTVHIGLNQLRRLVNALINKYGLPQSIAIELARELKLSKTRKAEIQKENKKNEQKNIKRRERLAGLGIPDTHDGRLRLRLFDELPCSNRCCVFTGTQLSIEKLFDGTIEIDHILPYSKTLDDSFMNKVLCIREANRTKRSRAPAEAWSGDELQKIVERAEQLFPKKAWRFQPDAMSRFKDDHDFLARHLNDSQYMARLAKTYLEHVCRDVQALPGRMTAMLRAKWGLNTLLPYHNYTGTNRKNREDHRHHAIDAFVVACTDRGLLNRIAREAGRAETLNLGRLFPKGSFPDPYDDYRDDLADRLNNIIVSHKADHGLLPGGQLNMHATSGQLHEETAYGVVDDEEINGKPYNLVTRKSVEALTREEIDSVRDDALREELQEELQRVADDAKQAGQELKKEELKKKALANFVARTNTRRVRVLKTNQSVREVRHGSAFIKAYIPGHNHRVELFELPDGSWSGEGVTVYDAHQPGYAPAWTREHPDAGLVMRVHKGDLIEANFGEGTEIYRVYQLWAKMICLAAHNEAGSIDVRHKDPDDPLRWIFATWKKLQGAAAKRVHVDIIGRVTAACDAP

SEQ ID NO: 18502 - protein, 1076 aa, unidentified
  REGION 1..1076: note = Cas Enzyme sequence
MRLGLDIGANSIGWWLYETDKSGANGRITGVIDGGVRIFSDGRDPKSGTSLAVNRRAARAMRRRRDRYLRRRATLMKLLAKSDLMPTDPTVAKKLEQLDPYKLRAEGLDKPLPLGHLGRTLFHLNQRRGFKSNRKADRGDNESGKIKDATQRLDWAMHDSRARTYGEFLHMRRQRASDPRHMPTVRTRLSIAVWGGPDAKEEVGYDFYPDRRHLEEEFHRLWEAQTPHHPDILTDDLRDLVFEKIFYQRPLKEPVVGLCLFAGYNGVPAKEERLLRAHPLTQRRVLYETVNQLRVTADGREARSLTLEERDTIIYALDNKKPTKTLSSMNINLVALAKILKLRNDERFTLETGVRDTLACDPLRAIMTHPDRFGSRWSTLDWQAQWEVIQHIRKIQSDAEFADLLRWLMDKHGLDKDHAEKAANAHLPEGYARLGFTATQTILEHLTACVLTYSEAVEACGWHHSDRRTGECLSTLPYYGAVLDRHVIPGTYDEKDDDITRYGRITNPTVHIGLNQLRRLVNKIIAVYGKPDQIVVELARELKLSGAQKTKEMQRIRNTTADAIRRSEQLAEIGQPNTGHNRMLLRLWEDLGPAVGPRKCPYTGKTISLTMVFDGSCDVDHILPYSRTLDDSFSNRTLCLKEANRGKSDQTPWEIWGDTQQWDSIEANLKNLPDNKRWRFAPDAMQQFEGKRDFLDRALVDTQYLARISRAYLDTLYTEGGHVWVVPGRMTEMLRRHWGLNGLLSDKDRKAVKAKNRTDHRHHAIDAAVVAATDRSLVNRISKAAGQGERAGQSAELIARSTPFPWEEFRNDIESQLSKIVVSHRADHGRIDLEGRKKGCDSTAGQLHNDTAYGIVDSQTVVSRTPLLSLKPSDIELTTKGKNIRDPYLQKMLSAATMGKEGKALEAALRDFAAQPGPYQGIRRVRLAESLQETARIPVPMDKPIKAYKGDSNHCYELWRLPDGKIKPQIITTFQAHANADRRPHPAAKRLLRVFKRDMVALERDGETVIGYVQSMHITNGLYIAPHLEANADARNRDKSDSFRFIQIGAGPMAKAGLRRVFVDEIGHLRDPGTPF

SEQ ID NO: 18503 - protein, 1074 aa, unidentified
  REGION 1..1074: note = Cas Enzyme sequence
VRWRLGLDIGTNSIGWAALELDDGSPTHPVGLIDSGVRIFSDGRNPKDGQSLAVSRRLPRQMRRRRDRYLKRRDEFMERLIAHGLMPTDASSRKALEALDPWILRARALDEKLSLHEIGRALFHLQQRRGFKSNRTADADDDDRGKVAEATARTIARMQEQGARTLGEWLGAPRRAALAANGATPKGGRAPLPAARARLRGEGASAAYEFYPTRDLIAAEFDAIWSAQREFHGEALGGDAYAALRDTLLFQRPLKPQPVGKCTLLPREPRAPRALPTVQRLRIYQEINHLEIQEPGQRARKLSLEERDQLVEKALATAQLKFDVARKLIGASEHARFNIERDARRAYLDGDKTAAALAARACWGQAWRELSLEDQDEVVERLLADADETALMAWLRAKHGLDEERAIAVSRALNRLPDGHGALGRTASRRILKSLMDGVLTYSAAVEASGFDLHSQFGDGGDVKRRLPYYGKLLERQVAFGSGDPDDPEEKRFGKVANPTVHVALNQLRRVYNAIVARYGAPSEIVVELARELPLSAVRKRELERQHKDNKDANDRRRALLAELGQLDSYENRMLLRLWEELNPADQLDRRCPYSGEPISIARLFSGEVEIDHILPFSRTLDDSAANKTVGLRSANRFKGRRSPFEAFGESPAPYDWSSIVERAASMPANKLWRFGPDAMERFENVERDFLARQLTDTSYLSRLAKAYLEHACGSVWVTPGQLTAQLRRALGLDSVLPGHNVEGDAPREKNRNDHRHHAVDAIVVALTDQALLRRAATLAARSEDEHRSKLLAGLEVPWPAFRDDVRDAVGRIVVSHKPEHGVEGALHNDTAYGLATPPDPDGRCEGVRRAPLAEIKSAKDLEKIRDPVLRDRLIETTSGLQGKDFAAALATAGEEMRPPVRRVRILETVSVVTVSDAKGRPYKAHKRDANYCFDVFADAAGRWRGGVVSMFDANQPGFDPEACARADGTPLVMRLRKGDVLALGSRGAPSYLRVVKFSKGGAVLADHAAAGALKARDADPDDPFRYVTAGASRLQRDHARLVTVDPSGRIFALDSTDRSEAELETASSASRRQ

SEQ ID NO: 18504 - protein, 1079 aa, unidentified
  REGION 1..1079: note = Cas Enzyme sequence
LGLDIGTNSIGWWLYATDEEKITEVIDGGVRIFSDGRDPKSKASLAVDRRVARAQRRRRDRYLRRKAALMKRMAAVGLMPADPTEAKALELLDPYALRAAGLDQALPLTHFGRALFHLNQRRGFKSNRKTDKGDNESGKIKDATKRLDEEMAIKNARTYGEFLHMRRTSATDPKNVPTVRTRLSIARRDNAEKEEAGYDFYPDRRHLAEEFDKLWKAQAGYSPDVLTDELRDEISVIIFHQRPLKTPEVGLCLFSGSHGVPKKDKRIPSAHPLNQRRILFETINNLRVAARGEPARGLTRDERDAIVHALDNKAHTKSLSGMSMKLKALGKVIKLRPEQSFTLQTANRETIACDPVRASLSHPDRFGPRWSMLDADAQWDVVQRIRAVQSEAEHDALVKWLMATHGLDRDHAESTAKAPLPEGYGRLGLTATKRILAALEADVIPYSDAVKACGWHHSDGRTGEVLTELPYYGQILDRHVIPGTYNESDDDVTRYGRITNPTVHIGLNQLRRLVNKIITVYGKPDEIVVELARDLKLSEDQKRDVQRDIKKNTDAAIARGAKLSEMGVPDTGANRMVLRLWESLGDDVMTRNCPYSGKRISATMLFDGSCDVDHILPYSRTLDDGFANRTLCLKEFNRQKTDKTPWEAWGDTPAWATIEANLKNLPANKAWRFAPDAMERFEGENDFTSRALKDAQYLSRIARTYLDALYDGADGKSHVWVVPGRLTEMLRRHWGLNSLLPDKDGAVKAKNRTDHRHHAIDAAVVAATDRSLIQRISKMARKDEVNGAEEVARSVPPPWEGFRTDIETQLDRIIISHRADHGRIDPAARKDGHDSTSGQLHNDTAYGLGEGNSVVSRKPLLSLKSNDIEVTTKGANIRDVDLQRHLERITRGLDGKALEAALAEFAATAKLPDGTDNPYYGLRRVRLEETLQQGARVEVKDRNGKPFKAYKGDSNHCYEIWRMPDGKVVPQVITTYEAHQIDVEKKPHPAAKRLLRIFKRDMVAIEQDDKAIIGYVQSMHVANGLFIAPHTEANADARSRDKSDSFRLIQMSAGPLVKANARRVYVDEMGRLRDPGAPS

SEQ ID NO: 18505 - protein, 1084 aa, unidentified
  REGION 1..1084: note = Cas Enzyme sequence
MRLGLDIGTNSIGWWLYTTEGNAVTSVVDGGVRIFSDGRDPKSKASLAVDRRAARAQRRRRDRYLRRKAALMKRMAAVGLMPADPVEAKALELLDPYVLRAEGLDQPLPLTHLGRALFHLNQRRGFKSNRKTDRGDNESGKIKDATARLDQAMMAKGARTYGEFLHMRRAAAPDPKHVPSVRTRLTVARRDHEEKEEAGYDFYPDRRHLSEEFNKLWTAQARHAPDILTDELRDEIATIIFYQRDLMKPKVGLCLFSGQHGIPEKDKRIPSAHPLNQRRILMETVNNLKIAARGEPARSLNREERDQIVHALDNKAHTKSLSGMAMKLKALGKIIKLRADQSFTLETANRDAITCDPVRASLSHPDRFGTRWTTLDTEFQWDVVQRIRAVQSDGEFADLVEWLMESHALDRDHAEATANAPLPEGYGRLGLTATRKILTALEAEVVAYSSAVAACGWHHSDGRTGEVLETLPYYGEILARHVIPGTGEPDDDDVKRYGRITNPTVHIGLNQLRRLVNRIITVHGRPDEIVVELARDLKLSEDQKRDVQRDIKKNTEAAIARGAKLEEMGVPNNGANRMVLRLWEDLGPAIGPRRCPYTGQTISAGMLFDGSCDVDHILPYSRTLDDGFANRTLCLKEANRQKTNKTPWEAWGDTDQWEVIAANLKNLKDNKAWRFASDAMERFEGENDFSARALKDTQYLSRIARAYLDALYDGQDSKSHVWVVPGRLTEMLRRHWGLNGLTALTDSDAQTVKAKNRTDHRHHAIDAAVVAATDRGLIQRIAKMATKDELNGAEQVARSVSPPWDDFRTDVGAQIGRIIVSHRADHGRIDPVARKSGKDSTSGQLHNDTAYGIGNGSTVVSRKPLPSLGPNDIAESTRGANIRDPDLQRHLARVTRGLDGKAFEAALIAFAASPKLPDNSDNPYFGLRRVRLEETLQESARIEVKDKNGKAFKAYKGDSNQCYEIWRLPDGKIKAQVVTTFEAHQQGVDKKPHPAAKRLMRVYKRDMVLLERDGETIVGYVQSMHVANGLYIAPHTEANADARNRDKADSFRFIQIGAGPLIKAKARRVHVDEMGHLRDPGPPA

SEQ ID NO: 18506 - protein, 1079 aa, unidentified; identical to SEQ ID NO: 18504
  REGION 1..1079: note = Cas Enzyme sequence

SEQ ID NO: 18507 - protein, 1071 aa, unidentified
  REGION 1..1071: note = Cas Enzyme sequence
MRLGFDIGTNSIGWWLYATDGNEITGVIDGGVRIFSDGRDPKSKASLAVDRRGARAQRRRRDRYLRRKAALMKRMAAAGLMPADPVAAKALEQLDPYALRASGLDQELPLTHLGRALFHLNQRRGFKSNRKTDKGDNESGKIKDATARLDQAMIAKGARTYGEFLHMRRASAPDPKCVPTVRTRLSIAPRDNAEKAEAGYDFYPDRRHLFEEFTKLWAAQAANSPDILTDELRDEISVIIFHQRPLKTPEVGLCLFSGSHGVPQNDKRIPSAHPQNQRRILFETVNNLKVAARGELARGLTRDERDTIAHALDNKAHTKSLSGMSMKLKALGKLIKLRPEQSFTLETANRDSIVCDPVRASLSHPDRFGSRWSTLDAEAQWDLVQRIRAVQSDAEHNALVAWLIATHGLDRVHAENVANAPLPEGHGRLGMTATKRILAALEAEVIPYSAAVAACGWHHSDGRTGEVLTELPYYGQILDRHVIPGTYDENDDEVTRYGRITNPTVHIGLNQLRRLVNKIVTVYGKPDEIVVELARDLKLSEDQKRDVQRDIKKNTEAAITRGQKIEELGYANTGANRVMYRLWEELGPAIGPRCCPYSGKPISASMIFDGSCDVDHILPYSRTLEDGFSNRTLCLKEFNRQKTNKTPWEAWGNTPAWDAIEANLKNLPANKAWRFAPDAMERFEGENDFSARALKDTQYLSRIARSYLDALYDGADGKSHVWVVPGRLTEMLRRHWGLNSLLPDKDGAVKAKNRSDHRHHAIDAAVVAATDRSLVQRISKMAQRDEVNGAEEVARSVPPPWDDFRTDIKSQLDRIIVSHRADHGRIDFAARQTGNDSTSGALHEATALSIIDDQNVAVRIPLLSLSAAQFEEGGRSGWVRDPQLRGALHLATKGKDKKDFEAALLSFAAKPGPYHGISRVRIEKPLQDTARVYVPADAPIKAYQGGSNHRYEVWKLPDGKVLHHVVSMFVAHQGNLTRPHPAAKRIYQFMKGDLVRLEDSKFGPVIATVEKFNGKGMIELVPHNEANASDRYRKTKEDLYIRLGATTLLRAKARRVHVDEMGRLRDPGPPQ

SEQ ID NO: 18508 - protein, 1086 aa, unidentified
  REGION 1..1086: note = Cas Enzyme sequence
MPFRQPVSYAFDMGTNSIGWCVFRLSAAGHPVAIADAGVRIYSDGRDPQSKTSLAVARREAKAAARRRDRTKRRQKATLRTLAEYGLMPGGKDERERLLRETADSADRNAPANDPLNLRARALTEKLPLHHIGRALFHLGQRRGFKSNRKTDRRDNDKGKIAIGIDRLRDAIREAKAETLGVFLASRRAQGLHVRLRAGSSVILDDGYDFYPVRSLLEEEFRHIWDAQAVHYPDVLTEARGEHLFKVIFHQRPLKKPRIGSCTFNPLEQRLAKAHPLFQAFRLYKEVNELEVVAPDLSQRKLTLDERDALVLKLRGAKTAKYKTLRKDLKLTPDMRFNKESENRVDMAGDEVTAALSAKGLFGPRWNTLSMDSQWKVIERIQEEENPFVLHQWLVETHGLSDDAAEAVAACHLPEGYGRLGHTALSTMLEELRADVIPEAKAAERAGYNHSYFGTGEIFDELPKYQEVVARSIPPGTGDLEDEYDVRKGRITNPTVHIGLNQLQRLVNGLIRRFGKPAEIAVELARDLKTNEKKKTEINRRIGENTRAARQRSEKIAELRKDTPALVDNGYNRLLLKLWEELNPAKPEDRCCIYTGKPISISMLFSGAVDVDHILPYSRTLDDGQGNKLLCLKEANRVKRNRAPSEVTEWANHYDEILERANRLPKPKRWRFARDVMADFDADSGFLDRQLTDTQYLSRLAREYLCSLYPEKHEQWRVRVIPGRMTEMLRRHWGLNTLLPDHNYSDAKNRNDHRHHAIDAAVVGVTTRSMLQRISTEAARREEQELEDVVKGIPVPWEHFRDDLQQALNNIVVSHKPDHGTVGLDDKGKWQTAGKLHNDTAYGLTGEVDARGNTIVVRRKMLLSLTDKDIPAIRDDELRARLYSAAGGLSGKELQQALLDFARNDPKYRGIRRVRVTETLAVIPIRDKDGNVYKGYKGDANYRYDVWEMKDGKWQAEVISMFDAHQKGWESPVRKANPTARKVLSLQQNDMVAYEHPSDGYTIARVVKFASSGQIVFARNNEGGSLKARDANRDDPFKYFSKTANGLREIKARQIRIDETGRVYDPGPRDRESRMIGNQKLKTIAI

SEQ ID NO: 18509 - protein, 1096 aa, unidentified
  REGION 1..1096: note = Cas Enzyme sequence
MIWQNTLFSFDIGTNSIGWCVLALNDRDEAIRIIDIGARIYSDGRDPQSKTSLAVARREARAMSRRRDRYLRRRKAALRTMADYGLLPADKDVQKALLAETGDKRAGSGLPSLNPYALRAKALDEKLPLFHIGRALFHLNQRRGFKSNRKTDRKDNDKGKIALGIDELRAEMHRAKALTYGAWLAARREAGHVVRLRAGSEAMTESGYAYYPERKLLEDEFDAIWDAQATHYPDILTPERRAHLFAVMFYQRPLKKPRVGKCAFNPLEERLAKAHPVFQEFRLYKEVNELELVLPDQTQRKLSLEERDTLVKLLRAKKEVGFKALRSALKLDPDLRFNKESDAREKLKGDEIYSALSDKKRFGPQWAGFPLEKQWTIISRLRDEENPEALFAWLKEDFGFEGERAEAVANTPLPDGYGRLGETALASMLDALKEAVIPESEAAKRCGYDHARLGFESEDGEPCLPPYQEILERHIPPGSGDPEDIYDLRMGRITNPTVHIGLNQLRRLVNLLIARHGKPKFITVELARDLQLSEKQKADHNRTIAKNTREAEARSRLLLEMGQQDTGYNRVLLKLWEELNPGKPEDRCCIYSGKVISAQMLFSAEVDIDHILPWSQTLDDGHGNKILCMKAANREKRNRAPADVTEWNGARYDEILARAARLPQNKRWRFAPDAMQKFEKDGGFLARQLTDTQYLSRMALEYLNCLYPSEEADKYGVLSPKRHVRVSPGRLTELLRRNWGLNNLLPDSNLGEMAQAKNRKDHRHHAIDAAVIGVTTPSLLNRISGAAGRLDDVDFEDLVRKIVKDTPPWPNFRDDLQKAVNSITVSHKPDHGTVSRKGYADGKGQTAGKLHNDTAYGLGTDKNGNAVAVRRKAFLSLEPKDIPAIRDEDLRMALHEAIGGLSDKKAIQSALMMFRDAAPTAFKCIRRVRLEEKLQVIPIHDAEGRAYKGYKGDANYRYDVWETLDGKWQAEVVSMFDAHQPGWQSTFHKDNPTARRVLSLQQNDMVAYKHPKDGYTIGRVVKFTVDGRMYLVDNKESGSLKARDTDKNDPFKYLVKSANGLKEIACRQVRIDVAGRVFDPGPQDRESRSKRKKSTA

SEQ ID NO: 18510 - protein, 1076 aa, unidentified
  REGION 1..1076: note = Cas Enzyme sequence
MRLGLDIGTNSIGCWLYETDGAGADARIIGVIDGGVRVFSSGDKGAGRDPQSGASLAVDRRTARAMRRRRDRYLRRRATLMKVLANAGLMPADPAEAKTLESLDPYALRATGLDEALPLTHLGRALFHINQRRGFKSNRKTDRGDNESGKIKDATARLEQAMMASGARTYGEFLHMRRQRATDPRNVPTVRTRLSVARRDDPDGKEEAGYDFYPDRKHLEEEFCKLWTAQARYHPELTEELRDLVFEKIFFQRPLKDPKVGLCLFTAEERLPKAHPLTQRRVLYETLNQLRVTADGRETRPLTIEERDQIIHSLDNKKPAASLKSMAMKLTALAKMLRLRDCERFTLETGVRDAIACDPVRASLSHPDRFGPRWSALDIDAQWEVISRLRKVQSDADHASLVDWLMQEHRLERHHAEGTAKAPLPEGHGRLGLTATTRILDRLKTDVVTYAQAVAACGWHHSDQRTGECLDRLPYYGEVLDRHVIPGTYDENDDDITRFGRITNPTVHIGLNQLRRVVNKIIEVYSRPDQIVVELARELKQSEQQKADAMKRIRDTTEAAKKRSEKLEELGIEDNGRNRMLLRLWEDLGPAIGPRCCPYTGTPISVEMVFRDCDVDHILPYSRTLDDSFANRTLCLKEANREKRNQTPWEAWGGTAKWDAIEANLKNLPDNKRWRFAPDAMERFEGENDFLDRALVDTQYLSRISRTYLDTLYTEGGHVWVVPGRLTEMLRRHWGLNSLLSDKDRGAVKAKNRTDHRHHAIDAAVVAATDRSLLNRISRAAGQGEESGQSAELVARDTDPPWEGFRSDIETQLGKIIVSHRADHGRIDKEARKQGRDSTAGQLHQETAYSIVDDMHVASRTDLLSVKPAQLLDEAGRSGQVRDAQLRKALRVATADKTGKDYESALREFAAKPGPYHGIRRVRIIKPLQEQARVSVPAQDPIKAYQGGSNHVFEIWREPDGKVQPRVITTFEAHTTESPQNRRHPAAKLLLRVYKGDMVALERDGRTVVGHVQQMHIKNGLFIVPHSEANADARNSDKSDPFKWIQIAARPAVASGIRRVSVDEIGRLRDGGAKPI

SEQ ID NO: 18511 - protein, 1077 aa, unidentified
  REGION 1..1077: note = Cas Enzyme sequence
MRLGLDIGTNSIGWWLYETDGTEANARITRSIDGGVRIFSDGRDPKSGASLAVDRRAARAVRRRRDRYLRRRATLMKVLAGAGLMPADPDDAKKLELLDPYALRARGLDHALPLTHLGRALFHINQRRGFKSNRKTDRGDNESGKIKDATGRLDFEMAANKARTYGEFLHMRRERASDPRHVPTVRTRLSVAARGGPDAKEEEGYDFYPDRRHLEEEFHRLWVAQKGHHPDVLTDDLRDLVFEKIFYQRPLKEPKVGLCLFTAEERLPKAHPLTQRRTRYETVNQLRVTSDGREKRPLTLEERNRIVHALDNKKPTKTLSSMSMTLKALAKVLKLRDGERFTLETGARDVIACDPVRASLSNPVRFGPCWSTLDGKAQWEVISRIRKVQSEAEHSALVDWLMEVHALDRDHAEAVAHAPLPEGYGRLGPTATARILERLKAGVVTYAEAVSACGWHHSDQRTGECLDRLPYYGEVLDRHVIPGTYDKNDDDVARYGRITNPTVHIGLNQLRRLVNKIIETYGKPDQIVVELARELKQSEQQKREAMKRIRETTDAAKKRSDQLAELGVEDSGRNRMLLRLFEDLGPAIGPRSCPYTGEPISLTMVFDGSCDVDHILPYSRTLDDSFANRTLCLTEANREKRNQTPWEAWGETARWDAIEANLKNLPENKRWRFAPDAMARFEGENDFLDRALVDTQYLARISRAYLDTLFTDGGHVWVVPGRMTEMLRRHWGLNKLLTDGERGAIKAKNRTDHRHHAIDAAVIAATDRSLINRISRAAGQGEEAGQSAELIAREAEPPWEGFRSDLAMQLNKMIVSHRADHGRIDREGRKEGRDSTAGRLHNDTAYGLSRLEGEVDRVVSRTPLLSLKPGDVAITSKGKNIRDQQLQKALDVATEGKEGKAFEAALRDFARKPGPYQGLRRVRLVETLQESARVEIGSLPNGRALKAYKGDSNHCYELWRLPDGKVKPQVVTTFEAHAGTEKRPHPAAKRLLRVFKRDMVALERDGATVICYVQKFNQAGILFLAPHRESNADARDRATNDDFSLYRMSPGPMYEADIRRVSVDEIGRLRDGGPPRK

SEQ ID NO: 18512 - protein, 1069 aa, unidentified
  REGION 1..1069: note = Cas Enzyme sequence
MRLGLDIGSSSIGWWLYKTNAYGITGVLAGGVRIFSDGRDKQLGVSFAAGRRAARSARRRRDRYLRRRAVLMRKLTDAGLMPKEPLEAKALEALDPYALRATALDKPLSKTALGRALFHMHQRRGFKSNRKADRGDNESGKIKDATARLDQAMMATGARTYGEFLHQRRSPVTDHRRVPSVRTRLTLGTWGDAEKAETGYDFYPDRRHFEDEFHKIWEAQAKYDPQALTDDIRDALYETLFYQRPLKEPEVGLCLLSDERRAPRAHPVTQRRVLYETVNGLRITGDGRSARPLTRDQRDALIHALDNKKHTKSLSGMQMKLAALAKEIKLPKGERFTLETGNRDAIACDPVRASLSHQDRFGQIWSGLDLEAQWDCIQRIRDVESDTDFEGLVAWLMERFSLNKTRAVATANAPLPEGYARLGTRVSQSLLTELQADVITYSEAVERIGFHHSDQRTGEILDTLPYYGAVLERHVIPGTGVKTDDDVTRFGRISNPTVHIGLNQLRRVVNLIIATYGKPDEIVIELARELKQSNDQKKEYSKSVKKNQEDAIRRGKQLMELGQQNTGANRMLLRLYENLGPAIGPRCCPYTGQTISAAMVFDGSCDIDHILPYSRTLDDGVSNKTLCLREANREKGNKTPWEVWGHTPRWEKIEANLKNLPDNAKWRYAPDAMERFEEKRDFLDRALVDTQYLSRIARTYLDTLYTEGGHVWAVPGRMTEMLRRHWGLNSLLSDRENQPVKQKNRTDHRHHAIDAAVVAATDRGLLNAISRAAGQEEVQGKSAEEIARSIPEPWEGFRTSIKNQLDKVIVSHRADHGRIDPAARRKGKGNTTGQLHNAKAYGVVDGKSVVSRTALLALKPGNLVPTSTGRVVRDPDLLTALRAATRGKEGKAFEQALAEFAAKPGPYQGLRRVRMIESLQESARIEIKGPDGTLVKAYKGDSNHCYEIWRLPDGKAKPQVITTYEANRGISRRPHPAAKRILKVSKRDMVAIEREGRTIICAVQSLDINNGLLLAEHMEANVDARRDDKSEPFKIIQMSVRTLLKAHIRRVSVDEIGRLRDGGRSKKTE

SEQ ID NO: 18513 - protein, 1075 aa, unidentified
  REGION 1..1075: note = Cas Enzyme sequence
MHTRLGLDIGTNSIGWWLYEIDGAETNARIVGVLDGGVRIFSDGRDPKSGASLAVDRRAARAMRRRRDRYLRRRATLMKLLARSALMPADPAEAKKLERLDPYELRATGLDETLPLTHFGRALFHIDQRRGFKSNRKTDRGDNESGKIKDATQRLDWAMHDAKARTYGEFLHMRRSKAEDPRHIPTVRTRLSIAARGGPDAREEAGYDFYPDRRHLEEEFHHLWEAQATHHPTVLTEELRDLVFETIFYQRPLKEPKVGLCLFSAEERLPKAHPLTQRRVLYETVNHLRVTSDGRALRPLTLEERDTIILALDNKKPTKTLSSMSMTLTALAKAIKLRDVERFTLETGVRDSIACDPVRASLAHPDRFGPRWSVFDGETQWEIVSRIRAVQSDADFEALVSWLQKTHGLDAEHATHTANASLPEGHGRLGLGITRALLKKLEADVVTYSEAIEACGLKHSDQRTGEDLGTLPYYGEVLDRHVIPGSFDENDDDVTRFGRITNPTVHIGLNQLRRLVNKIIETHGKPVQIVVELARDLKQSEAQKKLAIKRIRDTTADAKRRSSQLEELGVADNGHNRMLLRLWEDLGPAVGPRSCPYTGRTISTTMVFDGSCDVDHILPYSRTLDDSFANRTLCVKEANRDKGDKTPWEAWGGTARWDAIDANLKNLPENKRWRFSPDAMERFEGEKGFLDRALVDTQYLARIARSYLDTLYTEGGHVWVVPGRMTEMLRRHWGLNALLSDASNGAVKAKNRTDHRHHAIDAAIVAATDRGLLNKISKAAGQGEQAGQSAELIARDTPSPWEGFRADLEHQLNNILVSHRADHGRIDREGRKLGRDSTAGKLHNDTAYGVVDDATVVSRVPLLSLSLVDIEITSKGKNIRDPQLQRALATATRGKEGKAFEAALRDFAAKPGPYQGIRRVRLIEALQKSARVEVGLDQAEEGPLKAYKGDSNHCYELWRLPDGKVKPQVTTTYEAHTGVEKRPHPAAKRLLRVFKRDMVALERNGETLICYVQSMHIANGLYLAPHFEANADARSRDKSDPFRFIQIGAGPLVKAGIRRVLVDEMGRLRDPGPPR

SEQ ID NO: 18514 - protein, 1078 aa, unidentified
  REGION 1..1078: note = Cas Enzyme sequence
MRDHDMRLGLDIGTNSIGWWLYETDGKDTAATITRVIDGGVRIFSDGRDPKSGASLAVDRRAARAMRRRRDRYLRRRATLMKLLARTGLLPADPAEAKQLERLDPYELRAKGLDEALQLTHLGRALFHIDQRRGFKSNRKTDRGDNESSKIKDATQRLDWAMHDAGARSYGEFLHMRRSRAEDPRHVPTVRTRLSIAVRGGPDAKEEAGYDFYPDRRHLEEEFNLLWETQAQHHPDILTDDLRDVVFEKIFYQRPLKEPEVGLCLLSSEKRLAKAHPLAQRRVLYETVNHLRVTADGRETRPLTREERDTLIHALDNKKPTKSLSAMTMTLAALGKLLKLPDGERFTLETGVRDSIACDPVRASLTHPDRFGPRWSTLDWEQQWNVISRIRAVQSDAEFVALVDWLQQEHGLDADHAARVADAPLPEGYGRLGLSVTKALLEKLKADVITYSEAVAALGLHHSDQRTGEDLRYLPYYGEVLDRHVIPGTYDAKDDEVTRYGRITNPTVHIGLNQLRRLVNKIIEVHGKPDQIVVELARELKQSEAQKKLDIQRIKDTTADAKRRSAQLEELGVADNGNNRMLLRLWEDLGPAVGPRCCPYTGKTISLTMVFDGSCDVDHILPYSRTLDDSFANRTLCLKEANREKSNQTPWEAWGNDKTRWDAIDGNLKNLPDNKRWRFAPDAMERFEGEKDFLDRALVDTQYLARISRTYLDTLYTEGGHVWVVPGRMTEMLRRHWGLNSLLSDASRGAVKAKNRTDHRHHAIDAAVVAATDRSLLNKISKAAGQGEEAGQSAELIARETPPPWEGFRADLEHRLNSMIVSHRADHGRIDREGKKHGHDSTAGKLHNDTAYGIVDESTVVSRTPLVSLSPGDIEITTKGKNIRDPQLQKALAVATKGKEKKELEVALRAFAEKPGPYQGIRRVRLIESLQQSARVEVGQDERGAPLKAYKGDSNHCYELWRMPDGKVKPQVVTTFEAHAGIEKRPHPAAKRVLRVFKRDMVALERDGETMICYVQSMHIANGLYLAPHREANADARNRDKTDPFRFIQIGVAPLIKAGIRRVLVDEIGRLRDPGPPR

SEQ ID NO: 18515 - protein, 1047 aa, unidentified
  REGION 1..1047: note = Cas Enzyme sequence
MAYRLGIDIGTNSIGWCVLTMDAAGRPSGIGDIGVRIYADGRDPKGGTSLAADRRIARSMRRRRDRFLLRRTDLMAALVAHGLMPAEAPARKALEELDPYDLRARGLDEALPLHHLGRALFHLHQRRGFRSNRRTEAGDRKEAGKIKAAAGQLADLMAASGARTLGEFLARRHAGRQSVRARLRGEGAKAAYDFYPQRALVEAEFDALWRAQAAFNPELSEAACENLRAILFRQRRLRPVDPGKCALDPARDRDDAGGFRAPSALPTSQDFRILQELANLRVVFPGRPERPLAIAERDRLFHDLKHKNTLTFGAIRRLLGLPGEAGFNLESEKRDRLLGDETAAVLAHKDRFGPAWRALPAERQAAIVERLLAEEDEEALAAWLVEACGLTEPAAGAVSAAPLPEGHCRLGRRALAAVNAALRDGWRDFLCADTGEIIRAPLTYAEAAERAGYHHSDHRPGEILDALPYYGEALADQVSGSGDPDDPPEVRFGRIANPTVHIGLNQSRRIVNAVIERYGPPAEIVVELARELKLSRKEKDRIAKEQAENQAKNEARRQKLAGIGERDTGENLLRLRLWEELNPADPLDRRCVYTGEPIGLRRLLSDEVEVDHILPFSRTLDNSAANRTVSLRRANREKGNLSPFEAFGPDAERWNDILARAQGLPKNKRWRFAPDAMARFDRDRGFLDRQLTDTAYLSRLTREYLSFVCPANRVRAIPGRMTALLRGKWGLDSLLGGDNRKNRCDHRHHAIDAAVAAVTDQGLLQRLASAAETSRERLIDAMPEPWSGFRDDVGEVVRGVTVSYRLDHGAAGRLHEDTAYGLVRDPAAEDGFNLVSRKPLTGLNANEIERIRDADLRQRVAARARDAGVAGIALKQALADFAAETGVRRVRLLKREAETIPIGGPDGKPYKAYIPGDNHHVDIFETPDGRWRGEAVSVFQANRPGHQPAWRRDHPAARRVMRVHKGDLIALGNGDDRRIMRVVRLGVRAGVLWLAPHNEGGVLQQRHDDPDDLFRWLFAAFSKLPEMGARRVAVDALGRVRDPGPPR

SEQ ID NO: 18516 - protein, 1052 aa, unidentified
  REGION 1..1052: note = Cas Enzyme sequence
MRLGLDIGTNSIGWWLYAANLNETIDGGVRIFSDGRDPKSKASLAVDRRVARAMRRRRDRYLRRRTVLMERLAAAGLMPNDPAARKALEGLDPYALRAKGLSHRLSLNELGRALFHLNQRRGFKSNRKTDRGSNEKESGKVASGVDRLETAIRESGTKTLGQYLHQRRQTETIHHTPPVRTRMTTLTIGDKSEDGYDFYPSRALLEDEFHKIWHEQEKHHPALTEALRDTLFETIFYQRPLKAPVIGRCLFEDEPRLAKAHPLFQRRILFETVNALRVREPGQPDRGLSMEERNALILLFDSKTAKNPGTANQSFTQIRKTLRLRPDQSLTHEGKTRKGIECDRLRALLAHPDRLGATWGRMTIDEQWELVQKLRDTEDAKALEQWLQARFDIDEAQAMHIANTPVPEGYGRIGLQATSQILEHLIAEVIPFSVAAEMVYGDHRGIATGEMIDRLPYYGEILDKHVIPGSGAPEDDDITRFGRITNPTVHIGLNQLRRLVNKIIDVYGKPDEIIVELARDLKNSKDQKIEINKAIKKNTDAAIQRGKKLEEIGERNNGENRLRLRLWEELNDDCMDRRCPYTGTKISVAMLFDGSCDIDHILPYSRTLDDSIANRTLCMREANRQKGNQTPWEIWGDRPQWDDIAPLIKRLPKNKQWRFAPDAMERFEGENDFLARQLVDTQYLSRIAREYLSRLYPEEKQTGGKIHVYVTPGRLTEMLRRVWGLNNLLGEHNLAKPKNRHDHRHHAIDAAVIGMTDRTLLNRISKLHRQAEDVRAAAEKIEPPWPGFRADLTNQLEKITVSHRADHGRINFETRKNGRDSTAGQLHNDTAYGPTDIENVVVTRKPLLTIKPADISRIRDKHLQARLYQQTEGLDGKDFIAALEAFSKEDTPYRGIRRLRLTEKLKTIPIKDNKGRIYKGYKGDSNHSYEIWRLPDQKFTAQVLTTFDAHQAETIARPHPAAKRIMKLFQNDMVEINHPEQGKIIVRVVKFGQSGSIVFAKHTEAGALKARHADEGDAFRYINSGANPLMEMGVRRVYVSELGKVEYLDSPT

SEQ ID NO: 18517 - protein, 1046 aa, unidentified
  REGION 1..1046: note = Cas Enzyme sequence
MQPYRLALDLGANSIGWAVLDLDAQRAPCGLRDLGVRVFPDGRDPQTAASLAAERRAARSARRRRDRYLQRRAALLNELIRQGLMPTDPADRQRVARIDPYALRANALRRRLTPAEFGRAIFHLNQRRGFASNRKLDRGNEEKGKIAEASGRLKTELSRAGAPTLGVWLAERHEARQHVRARLVGQGAKASYDFYPTRDLLMAEFTAIWAAQAAWDPSLTDARRERFCRIIFHQRPLRTPPRGRCWLEPGEFRADRGLPLTQRFRIAQDLAHLRLGEPGMPQRNLTSRERGVLVAKLHRGEEISADKLRKLLGLSATTDLNLRGAGADALKGDETAKRMGGVKGVGKAWHDLPPDVQDRAAQIILDEQEEQAAIAALEALGIERNAAARAVDVTLPDSTASLSAKAMARILPHLEKEGATYDKAVQAAGYAHHSDDRTGEIRAALPYYGEVLFDRIGTGSGDPAHETEKRFGRAPNPTVHVALNQLRHVVNALIARHGPPAQIVVEVLRDLGRSAEQRREVEKEQRTNREANDRRRALLAERGVKVNAANLMRLRLWEEQSRDGDPKERRCPYSGELIGMERLFSAEIEEDHILPFALTLDDSAANRVLVTREANRRKSRQTPHQAFGNKAAEWEAILQRAALLPKQKAWRFSPDALIKWQGEHKDFLARHLTDSSYLARLARFYLRIVCDPDQVWCVPGRLTALLRAKLGLNSLIGKGGAMKDRADHRHHALDALTVGLIDRGLLQRVTRAAKQAEESGRRLIDDLPEPWPGFVAAAREAVERVVVSHRPDHGTAGKLHNETAYGAVRGAEYGGPNVVVRKPIASLAAWSPADAQAHVRDPLLAARIAEALGASDAKTRQNALADMRDAAGANVRRIRTWERLEGTKAIADRATRKTYRVVKLDANHRVEFWRLPAIDGKPGRVVMQAVPLFNAAADAEAKRLGRPVADRRPHPAARLMMRLHKNDMVAFGVGAERQILRVVKFRSNQVNLAPHNEAGNLKARDADKADSFKYVNASIVSLARAGARKVYVSASGQVSDNGPLLW

SEQ ID NO: 18518 - protein, 1099 aa, unidentified
  REGION 1..1099: note = Cas Enzyme sequence
MTYRLGLDLGTNSIGWCLLKLDTSGKPKAVEAAGVRILTPNEEAGRDPQSKASLAADRRAARAMRRRRDRFLRRQARLMETLVGAGLMPAEIAGRKALEKIDPYWLRAEALDRKLGLHEIGRAIFHINQRRGFKSNRIADGGDNEDGAVKAGMAKLHAALEESGARTLGELLANRHSRDRDGYRVDSEGARTGARNDNPHARAKVRGVRFRPRAEGAKNLYDFYPSRDMTEGELDAIWAVQKKHHPQLTDDLLVRLKRIIVEQRPLKKPVVGRCTLRPEPGEQTLYGLKIDMGERAPKAHPLFQRFRILQDVSQLRIKRPGLNERPLTMQEFKTLVSLLSTSGEAACKFENLRKKLKLPDDARFNYELSGRSGFKPDETAVKLRGKKAFGKSWDNLDRDRQIELVEHLLQVEDPEALVLWLMERHGLSAEQAEAVSGTRLPQGHGQFGRSVLADLVEVMESRSVEDGVDPQTGEIYARPLKYNEATQAFEEHHSHRRASGDLPKLPYYGEALRRHVISKPDAPEGSQEHRGRVPNPTVHIGLNQLRAVVNTLIDTYGQIDEIVIELARELKLNRQRKDEIQRENRENEKKNADRRERLAKLGVADTHDARLRLRLFDELPADEKVCVYSGAALSVERLFDGSIDIDHILPHSSTLDDSFMNKVLCTAHANREKGNRAPASAWSGERLQEIEERARRLFPKKAWRFSLDAMGRFDADGGFLARQLTDTQHMARMAKTYLEQVCKQVWAPPGRLTAMLRAKWGLNDILLDHNFTNPALPKNRKDHRHHAIDAFVVACTDRGLLNRMARASGQAEDLNLDRLYPNDSFPEPWQGYRDELRAVLDRVVVSHKPDHGLAPGNQDNPGVTSGQLLEETAYGLVDEEIDGKRYNLVTRKPVTALTSSEIQRVRDKDLREALQVVEYEAKQTGQKLEDALAAFGEAKGIRRVRILKTEQSVRRITHGNGFEKAYSPAGNHRIEIYELPDGSWSGEGVSVFDANQRGFKPQWRERHPGAKLVMRVHNGDLIAAEFDGKPDIYRVYRLEPSAKRIRLAAHNEAGSINDRHNDANDPLRWVFGTYSRLKEAKARPVRVDPTGRVSYPEPS

SEQ ID NO: 18519 - protein, 1083 aa, unidentified
  REGION 1..1083: note = Cas Enzyme sequence
MDYRLGIDLGTNSLGWFAVKLGPDGAACAVLDGGVRILTPNAEAGRDPQKKQSLAADRRAARATRRRRDRFVRRQQRLMETLVAADLMPADPTERKALERLDPYWLRAAALDQRLEPHELGRAIFHLNQRRGFKSNRIADAGDKEKSATKEGVRALEAALHASNARTLGEFLAQRHKRDRHARRLSDGAGFAAPQPVRFRPRAEGASNLYDFYPTREMVAHELEAIWAAQGPHHPQLTPALLAKLERIIIEQRKLEPPPVGLCTLMPEAPEIEEHGLRIKLGQRTPKAHPLFQRFRILQDAAHLRISRPGVEARRLTMQEFHAVAAKLMAAGESRVSFDGLRKGLKLPEDASFNYEFSGREGFPPDQTAVKLSNGKAFGRAWRSFSRERQIEIVERLLATQDAGALQDWLQERCGLSTEQAEFVSEVRLPQGHGQFGRAALAALVDVMEREMHADPVTGELVDAPMTYDEAVRRLEAGLHHSDHRPDPKNRLPYYGGVMRRHVIANPDAPPGSQENIGRVPNPTVHIGLNQLRAVVNALIDACGPPKEIVVELARELKLNQSQKEKIQKENQENEKKNQDRRDRLARCGVSDTYNSRLMLRLFDELPAAEKVCVYSGDPLSMNGLFDGSIEIDHILPQATTLDDSPANKVLCTREANRIKGKRTAAEAWSGDALQTIVERAQRLFPKKAWRFQPDAMKQFLGRGDLADRYLRDTQHMARLAKEYLEHVCPHVWASKGLLTAMLRGKWGLNGLLPDDFAETSQPKNRNDHRHHAIDAFVLACTNPGMINRIARASGEARDLNLDRLFPKGGFPEPFEGFREALDKKLKAMVVSHKPDHGIAPGRHRAGATSGKLHQATAYGLVNRAINGKRYNLVTREAITALTNKKIERVADDRLRSELQRVSQEAAQSARKLSEALADFGRTRGIRRVRVLKTKKPVEVVTHGAGFKKGYLPGDNHLLEIFELPDGSWSGEVVTEFEANNPAHRVSWRSEHPNAVLVMRLHKSDLIEADFGEGHRIFRVYQLEPSARRVRLSPHNMAGNADERTSSNDPLRRRFGVYSNLKKAGARRVRVDAIGRVSPAVDT

SEQ ID NO: 18520 - protein, 929 aa, unidentified
  REGION 1..929: note = Cas Enzyme sequence
ALEAALHASNARTLGEFLAQRHKRDRHARRLSDGAGFAAPQPVRFRPRAEGASNLYDFYPTREMVAHELEAIWAAQGPHHPQLTPALLAKLERIIIEQRKLEPPPVGLCTLMPEAPEIEEHGLRIKLGQRTPKAHPLFQRFRILQDAAHLRISRPGVEARRLTMQEFHAVAAKLMAAGESRVSFDGLRKGLKLPEDASFNYEFSGREGFPPDQTAVKLSNGKAFGRAWRSFSRERQIEIVERLLATQDAGALQDWLQERCGLSTEQAEFVSEVRLPQGHGQFGRAALAALVDVMEREMHADPVTGELVDAPMTYDEAVRRLEAGLHHSDHRPDPKNRLPYYGGVMRRHVIANPDAPPGSQENIGRVPNPTVHIGLNQLRAVVNALIDACGPPKEIVVELARELKLNQSQKEKIQKENQENEKKNQDRRDRLARCGVSDTYNSRLMLRLFDELPAAEKVCVYSGDPLSMNGLFDGSIEIDHILPQATTLDDSPANKVLCTREANRIKGKRTAAEAWSGDALQTIVERAQRLFPKKAWRFQPDAMKQFLGRGDLADRYLRDTQHMARLAKEYLEHVCPHVWASKGLLTAMLRGKWGLNGLLPDDFAETSQPKNRNDHRHHAIDAFVLACTNPGMINRIARASGEARDLNLDRLFPKGGFPEPFEGFREALDKKLKAMVVSHKPDHGIAPGRHRAGATSGKLHQATAYGLVNRAINGKRYNLVTREAITALTNKKIERVADDRLRSELQRVSQEAAQSARKLSEALADFGRTRGIRRVRVLKTKKPVEVVTHGAGFKKGYLPGDNHLLEIFELPDGSWSGEVVTEFEANNPAHRVSWRSEHPNAVLVMRLHKSDLIEADFGEGHRIFRVYQLEPSARRVRLSPHNMAGNADERTSSNDPLRRRFGVYSNLKKAGARRVRVDAIGRVSPAVDT

SEQ ID NO: 18521 - protein, 1090 aa, unidentified
  REGION 1..1090: note = Cas Enzyme sequence
MTYRLGLDMGTNSIGWCAVKLDRNGNPCGILDAGVRVLTPNDEAGRDPQSKASLAANRRDARSARRRRDRFLKRQKRLIETLVEAGLMPADPAARKALEKLDPYWLRAEALDRRLELHEIGRAIFHLNQRRGFKSNRIADAGDNEASAMKAGIAALKEALKAESARTLGEFLARRHQRDKQGRRLTDEPQPVRFRPRIDGAKALYDFYPYRELVELELEKIWTAQSAHHPQLTDALLARLKRVIVEQRPLKSPPVGRCTLQPDEDIDDSLGFEIDRGERTPKAHPLFQRFRILQDASQLRVARPGERERKLSLAEYRAICAKLMASGGNTVAFDKLRAAAKLPEDMRFNYELAGRKGFPPDLTAVKLSHKNAFGKGWRNLPRDRQIEIVERLLAVEDPEDLKAWLMQTCGLDAAAAEFASAVRLPQGHGQFGRAILAELVGIMERGEDVTDPETGEVYTPPLTYNEAVAALGLHHSRLSERATHRQLPYYGEALARHVIAKKGAPKGSQDAIGRVPNPTVHIGLNQLRAVVNALIETYGPPAEIVMELARELKLNKKRKDEIQREIRQNEKKNDEIRAELEARGIGDTFGNRLLLKLYAELPPDERVCVYSGTPISKEMLFSGAVDIDHILPHSKTLDDSFANKVLCTRQTNRSKGNRAPGEAWSGEELQEIVERAERLFPRKAWRFQPDAMEVFEKKGGFQARHLVDTQHMSRMARQYLELVCDQVWVTPGRLTAMLRAKWALNDLLPDHNFTDANQPKNRKDHRHHAIDGFVLACTSRGLLNRIARESGRAEELDLDRLFPKDSFPKPFEGFREALRTALRSIIVSHKPDHGLAPGAQNDVTVTSGRLLEETAYGPANDEIDGKHYNLVTRKPVATLKPTEIDRVRDARLREQLQELVYSSKRDGTKLEEALASFERETSIRRVRILKTEKSVRTIKHSNGVTTFEKAYSPGENHRIEIFELPDGKWAGECIAAFDANQPGFVPKWRKDEPEAELVMILHKGDLVEADRGDGPCIYRVTSLWDQGTLPLALHNEAGALDKRHKDTDDPFRWWYAGYAGLKKASARLVRVDPIGRIRRADGAAIPVSGR

SEQ ID NO: 18522 - protein, 1080 aa, unidentified
  REGION 1..1080: note = Cas Enzyme sequence
MPYRLGLDLGTNSIGWWMVKLDKAGRACGSLGGGVRIFSDGRNPKDGTSLAVQRRVPRGMRRRRDRYLDRRSDLMNHLIAFGLMPGDEGERKALEALDPYELRAAALDRALSPHELGRALFHLNQRRGFKSNRKTDSDDNETGIVKERISELRARIETSGARTLGEFLHKRHLKGRMVRARPEAGFYPERAMYEHEFDLIRQRQNSHHSLTIEQWDPLKDIIFFQRPLKPVDPGWCLFEAGEKRAHRALPLTQEFRMVQEANNLRVTSPGSPARRLTLEERDKVLGHLRKKKELKLDAMLKLLKLPSGSTVNLFDDHRSTIKGEETAARLAHKEIFGDTWFNLSAEERTGIVRTLLDTEKPEEIERIAQLQWGLSEAAAKKLAGKSLPDGYSRLSEKAIAKLLPIMEDQGLNYAEAVEQVPEYGHHSDFRPDEARDTLPYYGEVLARHCVGADPSAPRENEVAHWGRLANPTVHIGLNQIRRLVNRLIEVHGKPEEIVIELARELKMSKEDKDKERKKNSENEAANRRREEQIRAAGTAPSPHLLRKLRLWEEQKVGTANLCPFTRQPISFEMAISAATEIEHILPFSKTLDDSMANKVLCLIEANRAKRDRSPYDAFHTDPTIAGRKYVYDDILFRADNLPANKRWRFHPDAMDCFNNDERDFLDRQLNETKYLSRIARSYLSNLYNEKEEGRMRVRAIPGRLTAMLRGKWGLSALLPDHNLADGEEVPRKNRNDHRHHALDAFVVANTTQGLLKRLADLNDDAERQRLVDAVPDPWDDFDREELRKQLARLTVSHKADHGTPGSKGKTTGALHNDTAYGIVGPGKNGNTIVVSRTPLSRFTTPKDMDKGLEGIRDAALREALTAAWETFKAAPPAASNSDDADSRRKPKNPAMAFAEMAATKGIELGGRKVKVRRVRMCEELGVVPIKDRKTGKAYKAYKPDGNAFNEVYELPNGKWVSVVIRRFDANQPDFNSADFRPHPAARKVMRLHIDDLVAVDDGGQRRVLRVVKLSGQKITLADHFEAGALKSRDADKEDPFKYLEKSANVLKSMGLRKVGVDEIGRLTDPGPQQAKSGGKA

SEQ ID NO: 18523 - protein, 1080 aa, unidentified
  REGION 1..1080: note = Cas Enzyme sequence
MRYRLGLDLGTNSIGWWMVKLDKAGRACGSLGGGVRIFSDGRNPKDGTSLAVQRRVPRSMRRRRDRYLGRRSDLMNHLIAFGLMPSDESERKALEALDPYELRAAALDHPLLPHELGRALFHLNQRRGFKSNRKTDSDDKETGVVKERISELRTRIEKSGARTLGEFLHKRRLKGRIVRARPEAGFYPERAMYEDEFDLIRQQQNSHHSLTAEQWDALKDIIFFQRPLKPVDPGWCLFETGEKRAHRALPLTQEFRMVQEANNLRVTSPGEPTRRLTLEERDKVLGHLRKKKELKLDAMLKLLKLSSGSTVNLFDDHRSTIKGEETAARLGHKEIFGDAWFNLSTEERTGIVRTLLDTEKPEEIERIAQQQWGLSEAAAKKLAGKSLPDGHSRLSEKAIAKLLPIMEDQGLNYAEAVEQVPEYGHHSDFRPDEARDTLPYYGEVLARHCVGADPSAPKKNEVAHWGRLANPTVHIGLNQIRRVVNRLIEIHGKPEEIVIELARELKMSKEDKDKARRTNSEHETSNRRREEQIRAAGVAPSPHLLRKLRLWEEQKVGSANLCPFTGQPISFEMAISAATEIEHILPFSKTLDDSMANKVVCLIEANRAKRDRSPFDAFHTNPTIAGRKYVYDDILFRADNLPANKRWRFHPDAMDRFVNDERDFLDRQLNETKYLSRIARSYLSNLYNEKAEGRMRVRAIPGRLTAMLRGKWGLSALLPGHNMAGGEDAPKKNRNDHRHHALDAFVIANTTQGLLKRVADLNADADRKRLVDEVPDPWDNFDREELRSQLARLTVAHKADHGTPGRKGKTTGALHNDTAYGIVGPGKNGNTIVVSRTPLARFATPKDMDKGLTGIRDKALRDALIVAWDAFKEAPLETSSPDDEDSRRKPKNPAMAFAEMVATQGIELNRRKVKVRRVRMCEELGVVAIKDRKTGKPYKAYKPDGNAFNEIYELPNGNWVSVVIRRFDANQTDFNSANFRPHPAARKVMRLHIDDLVAIDEGEQRRVLRVVKMSGQTITLADHFEGGALKSRDSDKEDPFRYLGKSANVLKSMGLRRVGVDEIGRLTDPGPRRVEDGGKA

SEQ ID NO: 18524 - protein, 1041 aa, unidentified
  REGION 1..1041: note = Cas Enzyme sequence
MKYRLGLDLGTNSIGWCALKLDGEGKPNGVLASGVRLLTPNQEAGRDPQSKVSLAADRRVARSMRRRRDRFLRRQKRLMELLIESGLMPTGETERKELEKIDPYMLRARALEGRIEAHELGRALFHINQRRGFKSNRIADSDDDEKGATKQGIKALREALAAEDCRTLGQFLAKRHEKRQQVRFRPTTEGTKILYDFYPSRDLVEHEIDEIWKAQKAHHSQLTDELLTRLKHIAIEQRPLKKPVVGRCTFRPEEERAPRALPDFQRFRILQDLSSLVIERAGAASRKLSITERDALAALLGAQASPVTFEKMRKAIKLKDGERFNYEATNRKGFDPDLTAAKLGAKNAFGRTWRSLERARQNEIVEKLLTEEDEDALIEWLEADAGLAPENTEYVAGKLRLPQGYGNLGRSMLADLIDAMTHEAVEATDPATGEVCPSPLTYDQAVERLDLHHSSLREGEKLERLPYYGDLLKRHVIERPDAPEGSQEKRGKVTNPTVHIALNQTGKLVNALIDAYGPPEQIVVELARELKQNQKQKDDHNKRIRENTEANEIRAGKLEELKVENNGENRLRMRLYAELPPDERVCVYSGKPIGIEKLYSADIEIDHILPFSATLDDSIANKVLCTRESNRTKGNRPPADAFDANQLTEMAERAERLFKNKAWRFAPDAMDRFAENGGWAARHLTDTQHIARLTKTYLEHVCEPGQVWAVPGRMTAMLRGLWGLNQLLPGHNLPAGKKDRGDHRHHAIDAFVVACTERALLQRIAHAAGKGEALDMQRLFGSEGVPKPWEGFRDELEKSLSSIVVAHKRDHGVEGRLHEDTAYGIVDAEIDGKRFNLVTRKPIDRLTAKEITQVQSASLRAELEAVTKAAEENGTKLNLALAEFGRLSGVRRVRVLKTEQSFITVRHGKEGQFEKALVPGDNHRIEIFAHDGKWLCEAVTVFDANKSGWTPEWTRRYPGARLVMTLHKGDMIDADLGTGDRYWTVYRLNAASNRVWVAPHQDAHVQDERAWQRPTMTTLQKAGAKLAQLDMLGRPRRPGGG

SEQ ID NO: 18525 - protein, 1114 aa, unidentified
  REGION 1..1114: note = Cas Enzyme sequence
MALTYRLGLDLGSNSIGWCALHLEDTGTTADGRLTYHPSGLMDAGVRLLTPHEEAGRDPQSKISLAADRRAARSARRRRDRFVRRQKRLMETLVAAGLMPRDPAARKELERLDPYYLRAAALERPLTLHELGRAIFHLNQRRGFKSNRLADEQDAEKSAMKRGIAELDAALSKANVETLGQFLAHRHKRDRYGHRTGDEPPATVRFRPEREGNKVIYPLYPARHLIERELEKIWQAQAPHHPQLTDALLARIKRTVVEQRPLKTPPVGRCTLRPKVDERDLDGVSVDLGARAPKAHPLFQRFRMLQDVAQLRVVPRPGHRERYLTIEERDTLVRELAKRSGNRVTFESLRKKLDLPSEARFNYELAGLSGFPPDLTAVKLAHKSALGPRWRQLSRDLQITVVEHLLSVQDPDTLAVWLGETLGVDESTADRLTTTRLPQGHGQFGRGVLRDLVEVMETDYREEADPGTGEVYRRPLKYDEAVEEIGHHHSDQRPDGLAARLPYYGEALARHVISNPAAPEDSQERIGRVANPTVHIALNQVRKLVNALIDTYGPPTEIVVELSRDLKQSREKKAEIERENRQNETRNEERRARLAELKVEESRDSMLRLRLYEELPAAERVCVFTGSPIGIEELFTSAIEIEHVLPHSSTLDDSFMNKVLCRREANRRKGKRAPAEVWSGAELEEIVARAHRIVPRKAWRFQPDAMEKFAESGDFLARQLNDTKYMSRLAKTYLEQVCGQVWVVPGQLTAMLRGKWGLNVLPQQDNMKTEAHDPDRATKNRNDHRHHAIDAFVVANTDRGLLNRVARASAQAEEMDLDRRFPKNGFPDPYPGYRDDLWARLRTLIVSHKPDHGLPPGAQDDVHQTAGRLHEQTAYGQVAEEIDGKRFNLVTRKPLVELTDRKIAQIRDRRLRDALQAHMAAARPATGNLSDAQRRAALEAFTQRHGVHRVRILETEQSVRTVRHTDSVGQTFDKAYVPGPNHRVEIFELPDGTWHGEGVTMHDANTPGYEPVWSSKYPGSKLLMRLHPGDCVEADFDNGLGRCVYRVHRLEPSVKRVRLATHHEGGSIQARHEDKSDHLEWVFGTYARLRTARACKVYVDILGRIKPPRDEAGQ

SEQ ID NO: 18526 - protein, 1070 aa, unidentified
  REGION 1..1070: note = Cas Enzyme sequence
MFYRLGIDIGETSIGWFILQLDKKLEICDIVDGGVYIFPDGREAKSREPLSVSRRTARGIRRNLDRKNNRKRRLIRLLEETGIWPDGIAEQKKLEALDPFVLRQKAVNEKISLPELGRVLFHLNQRRGFKSNRKSDGKESESGKIKLAVQALETQLAEQGCRTYGEYLCRRHEKRISTKVRPMADSKGYEFYPTREMAEHEFDLIMSRQQQYHPELTSEITESLRDVIFFQRSLRPQAVGKCELEPQENRAPVWHPLFQRFRILQEVNNLDLVKSTPDEIGLTAEQKKKILLMLQEGTGLNKQGLLLFTKIKSKLNIPTKRKFNLQSDKRTGLQGDWAAWKLSDDNCLGKGWFKMSPDRQVELLELLHNAEDDGKLKQDLIDLFGLNEEQAENVAKLNLPEGYASLSLKAIKNILLYLEQGKVYSEACTLAGYNHSDRRTGEIYDYLPYYGRILKSAVIGGRFEGEEPDVDEDIGLQEVYFGKINNPTVHVGLNQLRKVVNEIISRYGKPQQVVVELARELKLGVEGVRKLEKRQKENQKDNEKIAEELERAGQPNTYQNRMMYKIWERLAENPSQRCCPFSGRPISVSDLFSGAFEIEHLIPFSRSFDDSINNKVISSRDANRFKAERTPYEAFGNSPGNYKWEEIVARSENLPREMQWRFSADAMEKFAEEDGCLARMLTDTQYFARCALQYLEAICENQSKDRKMAWGIPGQLTAMLRDKWGLNSLINPADRKDRSDHRHHAVDAFVVACTSRSLLKKMADAARLYEKTDEGEYKQIREKREKLIENMPLPFENFDREKLQQWVNGLVIAFKPDHGVQGQLHRDTCYGYIEKGSNKGSSVFAVRKDLRAVVEGSAKDGNKKINEIADVAIRSKLLDLLQNVEDKKQRQQLTEEFMAETGIRRVRCHIEKSDSVMIPVRDNGGQIYKYYESGNNSRADIYCATKGKDAGKWKCEIISTYSANQKDFVPEWRRRDPHAKLIMKLHINDMVAYDELNKGTGQTERVIARVKKMTSGLVFLRGHLIAKEEGDKLSWGASANQMQEKNLRKVYVDAMGKVKDPMFKNERKVS

SEQ ID NO: 18527 - protein, 1097 aa, unidentified
  REGION 1..1097: note = Cas Enzyme sequence
MWRLGLDIGSNSIGWVVLELDSNDSGYGYEPCGIMDMGVRVFPDGREPAGTDGKTGLPKIGDSLAVTRRMARGMRRNRDRRLKRVRAFADKLVEFGLIPEKGVAGRQQYRTGAIAMELDPYEVRAKSAIGTVSKEELARALFHLCKRRGFLSNRKTDGKDKEASERKEAMQGLAAILRERGLTLGQYLRDRLALEKHVRFRGAEFDDEAATIAIYPTRAMYVDEFNAIRKAQGNTFLTDEQWDTLFNVFIYQRALIPKEPGACSFEHGHDGRDEHPRAWRHLPISHAFRIMQEVNNLRYQGGKGDVDLSGKQREALIGALECQKSMAFSKMRDLLKLPKSSIFNLESDRRKKLEGNGTACDMRALFDNHGVDWDGLAARVQNDVVQMIHDAKDEDEFQNANDGQWNLPVDLVRDLSKKYYPSAHGHLSRCCMEKLLPLMRNGLQYWEAARQVYGDHTDYSQFATGEIVDELPYYGEVLRGATMPAHVTPNTPEEEERYGKISNPTVHVALNQLRKLVNALIARYGSPHDIHLELARNVKSAGKAYQEMLKGLSVNTKMNEKRRKQFEECFPGQTPSGLDMVKMRLWEELGSDDTDGGDCSMPRVDVYTGRTIGFRQLFSDEVEIEHILPYGRTYDNSMANRTVTFREVNRRKGGDKLPYAFAVGDAGLDSEAMRARAQRLPRGKRWRFGPDAAEVYERIITKNMTAAERKQYDADKNGGFIDRQLVDTQYISRLAARYLVPVVGEPKRVVPVNGHVTNLIRNKWQINNYKQKGGKNERQDHRHHAEDALIVAMADRGLVKRIADSTRARQDGRADYAAKLCFPERPAWATDDLIKGVAEKIYVSFRQDHSREAKLYQETAYGLLDAQDRWSKDGFNGVVRRPINVLKDKEVSQIRDAAVRAAVAEFLDRPEVVELKKWDDKMALLSRTPIRIGSAKGKVRLRRVRIVIKNQSITPIQSAPYKGYSADSVAFCDIWHTPKYNKKGKPTGKWGFVGKYVSYADAKKYEGDDDRLHSVYKPHPAARKVMRLFKNDMVMLTDGNGGEMLTRVAGYSSTRNSLDVRPHLESVVKHNFKSIQVLSEEMFMQKVHVTIDGIVVR

SEQ ID NO: 18528 - protein, 996 aa, unidentified
  REGION 1..996: note = Cas Enzyme sequence
MRRRRDRYLNRRAALLNLLTSLGLMPVDAAAAKQLERHDPYALRARGLRERLTPHELGRAIFHINQRRGFRSNRKTDKDGEAGKIKPAIKRLRELMAEAGAGSLGDFLNRRRLSGLPVRVRPKGQGAKAEYEYYPERSLLEEEFDAIWKAQSTFDPSLTEAAREQLRGIIFHQRPLKPVNPGRCTLEPDQPRAPVALPIAQRFRIMQELNHLRVVSGDLAERPLNLGERQKLAAVLLQGKDLTFDAMRQRLSLPPGYSFNLEGENRDRLRGDQAAHLLSKKTLFGASWLTLSPAEQERLVDLLLEEEDEGELVAALVADWGLDAQRAAAVGGVNLPAGYARLSRKALHAVTDCLAADVIHYADAVTRAGYASHSHFATGEILDRLPYYGVVLQRHVGFGTGHPADRAEERYGRIANPTVHIALNQVRRVVNELVKLHGHPAQVVVEVARDLKNGIMARREIAKRQAEMKRHNDRRRADLQALGIAVTADALLRLRLWEELAADPAARCCPYTGETISMGRLFSPEVEVDHILPFSRTLDNSPSNMTVSLRRANRYKGNRTPEEAFALSPVGYHWDSIVARAGLMVRGKRWRFAEGAMARYEEEGDFLDRQLVDTQYIARVAREYLSCICDPKKVWVTPGRLTSLLAARWGFPRKDRNDHRHHARDAVLVGVMDRGLLQRVATHHARLAGEGVERFLAGLPEPWPGYRTEVLTRIHTVVVSHKADHGVAGALHNQTAYGIRGENGTPGNAQYRVPLEKLAAPTDLLRVKGLGLRTAMLAAASGMPLRLCREKMLELATLPEKEAKARLAGFADIPAKEFATRLAEFAAGRNMRRVRVLDTLTLIHVGNGDGAPYKGFKGDSNAYYDIFLRPDGEWAGEIVSTMDANRPGFMPQLARQGLPRVMRLFNGDMLEIEDAGVRRVVYVVKQSEKQIVLAEHFEANADNRNRDKEDPFRFIYKSSPAALRKAGAVPLFVTPTGCIRRLEVPRHAAAYGGNSR

SEQ ID NO: 18529 - protein, 1266 aa, unidentified; identical to SEQ ID NO: 15811
  REGION 1..1266: note = Cas Enzyme sequence

SEQ ID NO: 18530 - protein, 1281 aa, unidentified
  REGION 1..1281: note = Cas Enzyme sequence
LSTLGIDIGSNSVGSAWVDTDRNEIHLGVSVFPAGVDEQENKRGAPKNQARRDKRSQRRTIHRRAERKRCLRKLLVQEGLLPQDLDDFGKLLEANRWPVPSDQDEYQKLLKDNYTVWHVRRDALTRRLHPYEFGRILVHLAQRRGAVGVQIDPDDDDEGKKVKAGMDRLNALMTERGSETVGQLLANLIDERRRSNNGAAWQEPIRNRQYRMPEEDQLFAGRELIRKEFHLLVQRQRSLNDSALAPMLTDDLIRQLDDPSETETWRHGGLLFGQRRTYWDTGTLGRCDLEPTDRCAPEADRHASYYRVIETVNNIRITKRGEPERALTPEERQKVIDALRRQKTGSVATVRKALGIHKKAVKEFYTLNIERDKDRKPNTDWFYREVVHGVFTEERWNQLGERLRESVNRAVLKFDPGNEEHENKLRNTVGLWWALDAAAVDRFIAAWKGRPKLEKRLKLSRRAIRNVLPYMNNYDEKNKRWPTQIEARIRFAEDRSNDATYEQRVRYDLGVQALTKRNRQYLRKHDEPIPPAPMLANPVVRKAVHEVRRHIIAWWHKVGRTPDRIVIEYVRSATQPAKVRNEALARNRKRNAIRKNIIDEFKLGVLSMTQQSRAVERVLLCRQQKALCAYTGQPISEVAAAHGRDVETDHIVPKSRSQDNGFNNKVLVKREANRGKGNKTVKEWMTAGQFAAMEQRLAYLKKGESTDNYFTKKDCGRKWENLHRDAPTTADFLASQLTDTAYAARQVGQWLREVLYDGERDGRRRVFTTKGSYTSILRNDWGLSESELDRQWHNILEPGEGEVDNRSRRARKEKNKSRADHLHHAIDAVCIAFTTPDRIKDLARFAEQQENARAVLGYWPRRKALPPPWPPVHTNPTDDQLRAATAQFREQVLAAAKNLIVYHRPVKRRLVGAFHEDTHYGPVVGPLPAHRTENPQRLFSLRMPVYENRDKRVKPGHLRVPDGWDELSAQLDRAGVPKAAKRAICRRLAALPDPPAGKGGIVRDRTLRDRIRKCLRAAGIDPDNFTLAEIQRIAEDGKLTMKSGVPIKSMILLRTNRNPVIIPRKHLDAKTGKLTPHMDPENPNKPHPRTKRVYIGGNNHHVEIRERTRRRKGETVSEWGGKVVSTFEAAQRNADRLTELKKAGVPMSKKLRQMPRNQRRRFGPIIADVNLRFPVVDRTDNDQVRFVMSLAEGEMIHARRWDSKKKQTIGPADYFVVCKLDKAGNSCSIHFAPHWDARKASEQNRWAVSPADLKNCGPEPGQPPYKVRVSPLGEVRRLEKD

SEQ ID NO: 18531 - protein, 1233 aa, unidentified
  REGION 1..1233: note = Cas Enzyme sequence
MEPEREQIMSQGAEQVRFILGLDIGSNSVGSAWVDTDKQEVHLAASVFPAGVDEQENKRGAPKNQARRQTRAQRRTIDRRAKRKRVLTRFLMEEGFLPCEPVGLQKLFDLDPWALRRKALKEPLTPHEFGRIVIHLAQRRGAVGVVSDPENPDEGKVKEGMDRMNALLAERGAATVGQLLADLMDERRQQQDGVTWNEPIRNRQYRLPEAQQLFAGRDLIRKEFQRIVEAQRAFEGSGLSGLLTDELVKRLDDPTRTDTWRQGGLLFGQRRTYWDTGTLGRCVLEPTERCVPEADMYAQEFRVVEYVNNLRVRAPFEDWRSLTAQERDQVIAKLRAPLLKRSKGQLVPKKSASMDDIREALGVPKTRRKGADPFEIRQESQDPDRPPNTDWFYREVVHQVFSEPVWTAMEQGARDIVNKALLKLDPDQPDDAERVRFRATGWWGLDDKAAARLVEVWKSRPKLERRLKLSRRAIRNLLPYMNRFSQARRRWPTQIEARQAFAEDRASDASPEQRRRYLIGAPTLTKADRRFLRKHPDLLPPAPMMSNPVVRKAIHEVRRVLIAWRRRMGCWPDQVVLEYTRSATQPEKVRNEQLALNRKRDRIKDGLREQFNLRGLAINQQERAIQRVVLCRQQRGLCAYTGTPISEKTAAEGTDVEIDHIVPRSRSQDNGLNNKVLVLRTANRGKGNQTVKEWLPAEAFAALEQRLQHFQKGEPVEEYSTGRDYARKWENLHRDAPSTGEFLSSQFTDTAYATRQVGQWIRDALYDGERDGRRHVFTTKGPYTAILRKDWGLLEDLLDQHWRLHAVGDADEAAPAAESKARREKGKDRSVHLHHAIDAVAIALAPRKLQELAARAEAEERARALEGRWPRSVPLAPPWPSLPHEASRDDLQQAIQTFRDQVVGAAQQIVVCHRPVKRRLVDKFHEETHYGPVIAPLPCHRTEKADSLFTNRISADRLTPNHLRVPDEWDELSARLDDPGVLPGDKKALRRQLAALVDPSPGKSGIVRDRALRDRIRKCLRGNALDPDSFTAAEIKKLVGEGKLTMGSGVPIKGVVLLRTNADPVIIPRKRWDPTTNRMIRDDDPRTARVYIGGNNHHMEIRQNRRRGRWSGVIIPTFEAARRVRLERRDAVERVDNDDSDFVMSLAEGEMIYARRKDRPPDDPAAVGYFVVCKLDKPARIHFAPHWDARKASEQDRWDVTPGDLKNCGPEPGVPAYKVRVSPLGEVRRLEHD

SEQ ID NO: 18532 - protein, 1233 aa, unidentified
  REGION 1..1233: note = Cas Enzyme sequence
MEPEREQIMSQGAEQVRFILGLDIGSNSVGSAWVDTDKQEVHLAASVFPAGVDEQENKRGAPKNQARRQTRAQRRTIDRRAKRKRVLTRFLMEEGFLPCEPVGLQKLFDLDPWALRRKALKEPLTPHEFGRIVIHLAQRRGAVGVVSDPENPDEGKVKEGMDRMNALLAERGAATVGQLLADLMDERRQQQDGVTWNEPIRNRQYRLPEAQQLFAGRDLIRKEFQRIVEAQRAFEGSGLSGLLTDELVKRLDDPTRTDTWRQGGLLFGQRRTYWDTGTLGRCVLEPTERCVPEADMYAQEFRVVEYVNNLRVRAPFEDWRSLTAQERDQVIAKLRAPLLKRSKGQLVPKKSASMDDIREALGVPKTRRKGADPFEIRQESQDPDRPPNTDWFYREVVHQVFSEPVWTAMEQGARDIVNKALLKLDPDQPDDAERVRFRATGWWGLDDKAAARLVEVWKSRPKLERRLKLSRRAIRNLLPYMNRFSQARRRWPTQIEARQAFAEDRASDASPEQRRRYLIGAPTLTKADRRFLRKHPDLLPPAPMMSNPVVRKAIHEVRRVLIAWRRRMGCWPDQVVLEYTRSATQPEKVRNEQLALNRKRDRIKDGLREQFNLRGLAINQQERAIQRVVLCRQQRGLCAYTGTPISEKTAAEGTDVEIDHIVPRSRSQDNGLNNKVLVLRTANRGKGNQTVKEWLPAEAFAALEQRLQHFQKGEPVEEYSTGRDYARKWENLHRDAPSTGEFLSSQFTDTAYATRQVGQWIRDALYDGERDGRRHVFTTKGPYTAILRKDWGLLEDLLDQHWRLHAVGDADEAAPAAESKARREQGKDRSVHLHHAIDAVAIALAPRKLQELAARAEAEERARALEGRWPRSVPLAPPWPSLPHEASRDDLQQAIQTFRDQVVGAAQQIVVCHRPVKRRLVDKFHEETHYGPVIAPLPCHRTEKADSLFTNRISADRLTPNHLRVPDEWDELSARLDDPGVLPGDKKALRRQLAALVDPSPGKSGIVRDRALRDRIRKCLRGNALDPDSFTAAEIKKLVGEGKLTMGSGVPIKGVVLLRTNADPVIIPRKRWDPTTNRMIRDDDPRTARVYIGGNNHHMEIRQNRRRGRWSGVIIPTFEAARRVRLERRDAVERVDNDDSDFVMSLAEGEMIYARRKDRPPDDPAAVGYFVVCKLDKPARIHFAPHWDARKASEQDRWDVTPGDLKNCGPEPGVPAYKVRVSPLGEVRRLEHD

SEQ ID NO: 18533 - protein, 1065 aa, unidentified
  REGION 1..1065: note = Cas Enzyme sequence
MAELTLGLDVGPNSIGWGLVDQGAGKIVAAGVRVFPEGVDRDQKGGEKSKSQSRRDARGMRRQIRRRAQRRRLLRQALTAAGLLPDDSERFKSLLERNPYELRSRALDEQLQPHEIGRALLHLGQRRGFLSNRKTDKPNDNKTKGILAEMSELAAEMEQAGSRTLGEHFAERATGFHPCTQPDGPHIRRRHTRRAMYEAEFERIWSAQQKHYPQLLTELLKFGKRGKQSFPKRPERLGKHSNLVDEFGLYGLIFFQRKMYWPKSVVGRCELEPREKRCPRAARAAQRFRILQEVNNLRVLDRAARTERRLDAAERRTLVNHLMATKEAKFDQIRGWLKLPDSALFNLERGGRKKLDGHLPDAALSGKKCLGKRWAPFAENIKDRAVDILVEEDTTEEAVRRLVTECGFPEEDAKVAAAIHLPEGYMSFGRGAIAKLLPHLENGVMLMADDASNSALHAAGYLRPDQREVNQRRFLPPSPNVANPVVRQALVEVRKTVNAVLRELVYRHGHTLGKLHVELAREAKKSFAERSQLRIDQSQREKARENAAKWIEEFDASIKPTRATVNRYLLWREHDEFCPYCGAKIGPAQLFNGEADVDHILPRWRSLDDSMANKVVAHRRCNAEKGDRTPREWLEDSDPERYERAMRVAERLPYGKQRKFQQKDILLDDFVQRQLNDTAYISRCVSQYLRCLGAKVVCTRGDMTADVRYWWGMNSILQPDGSDRKNRDDHRHHAVDALVIALTDEKRLFALANARGENMPPPWEGFREAAEVAVLAINVSHRAQRRLHGALHKDMFYGATHKPQASGTTANDTPRPWAKDWTEENCTFVRRKPIESLTKTQDLKKVRDPTVRAILRWHLLAQGIDPDKSGAIPGDAFKGKNLPRMPSGVPIRRVRMVEHSSAMRPVSESRSYQCVEPGSNHHMVIYDLLDAQGKPILNADGEPKRDGFVVPMIDVAARITRLLREQENEEKKRITLVERELGPGKKFAMSLSINEMFLLKMPDGSHSPHRIQKLSEGSIILRPHTYAGKVSDYDKPPLIQRRTPNTLRGRKVTVDALGRVRSAHD

SEQ ID NO: 18534 - protein, 1085 aa, unidentified
  REGION 1..1085: note = Cas Enzyme sequence
LETGVGVDLADHARQLIADVVRRRFRHSDTAVGAANQIEAGRDPQSKASLAANRRAARSRRRRRDRFLRRCKRLMTLLIDNGLMPADMQARKALEHLDPYRLRADALDQRLEAHELGRALFHLNQRRGFKSNRIADSDDSDKSATRDGMRHLKRALDDCGARTLGEFLASQHQRDRFGRRVSQDGKTAVPQSVRFRPSTTGSKNLWDFCPSRDLIADELVKIWNAQRAYHPCLTPELFAELERLILNQRPLKKPLVGRCTLRPELQLVRQHGLELDLGERAPKAHPSFQRFRILQDVAQLRIVRLGGRERPLSLQERDMIAACLMKLSGHTISFERLRAAAKLPEDARFNYELAGRSGLQSDQTAAKLGSRKAFGKLWRALSRERQIEVVERMLAVEESDVLEAWLCREHGLDKAESEAVSGMRLPQGHGAFGRGVLTDLVDVMERESRQAMDPDTGEVYDRPLTYDEATAALDFHHSDLRPTEKSARLPYYGKALVRHVIPKPDAPEGSQESIGRIPNPTVHIGLNQVRGLINALIDEYGAPKTIAVELARELKLNKTRKDQIQRENRENERKNNERRERLTSLGVADTHDARLRLRLFDELPASERVCVFTGAPLSIERLYDGSTEIEHILPHSRTLDDNFMNKVLCTREANRNKASRAPAEVWSGDDLQEIVERAERLFPKKKAWRFQPDAMRRFEVEGGFLARHLIDSRHMARLAKTYLEHVCDDVRVSPGRLTAMLRAKWGLNSLLPDHNFADANQPKNRRDHRHHVIDAFVVACTDLGLLNRIARESGRAEALNLDRLFPHDSFPVPYDGYREDLAARLNTIVVSHKPDHGLSPKTQANVHVTSGQLHEETAYGIVNEQVDGKQYNLVARKPIDALTCGEINRVRDAGLRAELQGVADEAERTGQKLHEALANFGRHRNIRRVRILKTEQSVRIVRHGAGFTKAYAPGGNHCVEIFELPNGEWSGEGITIFDANQPGYVPAWRSKHLDARLVMRVHNGDLIEADFGGGRRIARVYSLEPSANRLRLAGHNEAGSLDNRHKDPNDPLRWIFRSWTKLKKGQARRVRVDMLGRVAAVEDRL

SEQ ID NO: 18535 - protein, 1072 aa, unidentified
  REGION 1..1072: note = Cas Enzyme sequence
CQAPIRNRQYRLPESELLFAGRDLIRREFHRIVEVQQSFRESQLSDLLTDELVRQLDDPTPTRTWRHRGLLFGQRRTYWDTGTLGRCVLEPTDRCVPIADRHASYFRVVETVNNIRVQRRGEEERPLTPTERHEVLRLLRRPLFKKRKGALVAKSAPTVSDIKQALQINPRDKTVRLNIEADEEREINTDWFHREIVHGALTEARWDAMSEVDRESVNRAILKFDPDQPEDAERLRAGAVAWWRLDDAAADRLLAAWKQRPKLEKRLNLSRRAILNLLPYMEQFDELHQRWPTQQEARKAHAKALELQALTTGNAALRLAAQRYRTGAPGLTARDRYYMRLSKHQIKQDGDIVRDAEGRPLAVLPPAPTLSNPVVRKAIHEVRRHLLAYLRKFRCKPDRVVVELARVTKQSERQRNAMLARNRHREKIRKQIIDEVLPAPDAFGKQGAESLSLHQQRSAVDRVILARQQKQICPYCGQAGLTDFVAARGDDLETDHIVPYSRCGDDGLNNRVLVHRRCNQGKANQTPREWWGPAFDQRIRFAEQLFKDAPPDKFDYFTKRDYDRKWQNFTREVREEDEWKNSQLTDTAYAARQVAAYLADALFDGRGLPERGDGQDQQRIFFTVGKITLMLRKDWQLFETLKPEQTGLPEPLAAKEELQLAEKNRGDHRQHALDAVAIALTDPAIKHALATWAARAAEYRDRCGKWPKRAPFPPPWGSVASFRRQILAQVYQNLVVAHRPVKRRLVGALHEETHYGPVIPPLPRHRAEHPDSLFTNRIPAVRLTPNHLRMPDQWDEWSRRLEDPNLPSHERRAILKRLAAMEDPSPGKSGIVRDRALRDRLRKCLQTNGVDPDDFNPPQIKKLVADGKLAMPSGVPIKSVVLLRTIADPVIVPRKKLDPITGTLVPDMDPADPTKPNPRTRRVYIGGNNHHLEIRQRQRQRQGQLVEEWVGHVVSAFEAARRVRLEKRDAVDRADNEHGLFVMSLAEGEMIFARRKDRPEEPPDYYVVCKLDKAGNSSRIHFAPHWDARKASEQDRWDVTPSDLKLCGPEPGKPPQKVRVNPLGEVVVLDKD

SEQ ID NO: 18536 - protein, 1068 aa, unidentified
  REGION 1..1068: note = Cas Enzyme sequence
MKRFSFDIGTNSIGWAVMEPNEDDSQVKILDIGVRIFNDGREPGRSGQPGDPLNQTRRQKRALRRILERRKRRKQAMYRFLKAVGYAPENAQTHAEWVKLDPYKLRAEALERPLKPLEFGRVLMQLSARRGFKSNRKTNAKKETSEFKDKINSLEQLLDGKTLGQFLWERKRSIDERFKDNQARKPIMVTDRIRFRPGTQYYPNRAMYEREFAAIQKYQKKYHPDLDFGKAFRIIFFQRPLKRPERGACTFYPDEYRAYLSQPSAQIFKALQDINNLSYMTDKEHELTSDQKQAIFDILQRRGKLEFSRIRSTLLLPEDAVFNLEQGTKDKLEGLSTDIEFSKYITHWRELDLAARDSLVETFIMEDNEDCIIEAFANAGIPRDESIKALEKIDLKVGVGSLSAKFMRECSAIMLNQWIRYDQAVETIGFKHSEPNSSSFFERLPYYGQVLTYTTAAPKKKLSSEDLSGLPPEQIYGRISNPTVHIALNQLQKLCNALIDRFGKPDEIAVELATELKLGREKIKQRIQEQRKNKEENDRIGQEISKILGNAAELKIAGMDILKYRLWEELGGNSAGRYCIYCGKPISARQLFNGEAEIEHILPFSRTLKNNRNNLTITHKWCNALKGNRTPYEAFGHNPAGYNWEDIETRVTDVFRYNYAKKNSFLNKDLDESLINESSFLDSQITDTAFIAKAARDFLSCIVPKKKIIVTPGRLTSLLRAKWGLNSILSSVYDEKNRADHRHHAIDAIVIGLTTRSTLQRFATANAIGSAEKIMPPPFPVDRNWLEKRLMTILISFKPDHGVGGPLFDETAYGFNLDPSDEKKKPSEYFVRKPLSSLTWNIVENDDIVNNWARDTIKDFLATKQMTSKNSDNKKLSQALQELSQESGIQSVKIRAKNAEGYKILLAGENGRKGHKAYQRKDVICVDIWKIPKKSNKGGEFKGVYTSRADAHAYGGIIRKERPHPAAKWLMRLYKNDIIMFEYKGKKVFSRIAGLPTTANKIDIRPIFAASSIDEWIDQTPEKFRNQFWRILTREQNFISINSLFNSLKGSEIKHVNISIDGRLLCRK

SEQ ID NO: 18537 - protein, 1097 aa, unidentified
  REGION 1..1097: note = Cas Enzyme sequence
MIPFLGKLIIGYNHILEIVNNIFKKQEGIMKRFSFDIGTNSIGWAVMEPNEDDSQVKILDIGVRIFNDGREPGRSGQPGDPLNQTRRQKRALRRILERRKRRKQAMYRFLKAVGYAPENAQTHAEWVKLDPYKLRAEALERPLKPLEFGRVLMQLSARRGFKSNRKTNAKKETSEFKDKINSLEQLLDGKTLGQFLWERKRSIDERFKDNQARKPIMVTDRIRFRPGTQYYPNRAMYEREFAAIQKYQKKYHPDLDFGKAFRIIFFQRPLKRPERGACTFYPDEYRAYLSQPSAQIFKALQDINNLSYMTDKEHELTADQKQAIFDILQRRGKLEFSRIRSTLLLPEDAVFNLEQGTKDKLEGLSTDIEFSKYITHWRELDLAARDSLVETFIMEDNEDCIIEAFANAGIPRDESIKALEKIDLKVGVGSLSAKFMRECSAIMLNQWIRYDQAVETIGFKHSEPNSSSFFERLPYYGQVLTYTTAAPKKKLSSEDLSGLPPEQIYGRISNPTVHIALNQLQKLCNALIDRFGKPDEIAVELATELKLGREKIKQRIQEQRKNKEENDRIGQEISKILGNAAELKIAGMDILKYRLWEELGGNSAGRYCIYCGKPISARQLFNGEAEIEHILPFSRTLKNNRNNLTITHKWCNALKGNRTPYEAFGHNPAGYNWEDIETRVTDVFRYNYAKKNSFLNKDLDESLINESSFLDSQITDTAFIAKAARDFLSCIVPKKKIIVTPGRLTSLLRAKWGLNSILSSVYDEKNRTDHRHHAIDAIVIGLTTRSTLQRFATANAIGSAEKIMPPPFPVDRNWLEKRLMTILISFKPDHGVGGPLFDETAYGFNLDPSDEKKKPSEYFVRKPLSSLTWNIVENDDIVNNWARDTIKDFLATKQMTSKNSDNKKLSQALQELSQESGIQSVKIRAKNAEGYKILLAGENGRKGHKAYQRKDVICVDIWKIPKKSNKGGEFKGVYTSRADAHAYGGIIRKERPHPAAKWLMRLYKNDIIMFEYKGKKVFSRIAGLPTTANKIDIRPIFAASSIDEWIDQTPEKFRNQFWRILTREQNFISINSLFNSLKGSEIKHVNISIDGRLLCRK

SEQ ID NO: 18538 - protein, 1048 aa, unidentified; identical to SEQ ID NO: 15257
  REGION 1..1048: note = Cas Enzyme sequence

SEQ ID NO: 18539 - protein, 1049 aa, unidentified
  REGION 1..1049: note = Cas Enzyme sequence
MAWRLALDMGTNSLGWAAFKLTRSGGVEQLLDAGVRIFPDGREPAAKGRVGDSLAVERRLARGMRRNRDRRNERKQKLLKRLKDLKLLPQSAEENENLIAMDPYALRAKAVDDVLEPYELGRVLMHLSQRRGFKSNRKSDDDEESGTIKPKIKELEKALGDQTLGQWMHQRILSGQSIRFRGEDGDFYADRDMYLHEFDAIRAKQQPHRNLTDDNWDDLRNGNRNQAFDGIFYQRPLKPVERGRCQFFINEFRAHKDLPIAQEFRILQEVANLYYYDGPEKYSLNDPQRQKLLETLERQKTLSFNAMRKLKNQDGTLLFPKNCLFNLEEGKKDKLNGNATAIDMRKDEMFGGDWDKLSEDDQNDILEMLHDAADDKELVAELIARFGLDEDHAKAVAKFKLSPATSHVSRKFMSRCAAVMRDEKIGYVEATTHVYDDDGVFFHHSHTEIDQLLEKLPYYGELLQGRVIGGKPDKFDAVTHPEQHYGKINNPTVHVALNQLRKLVNILSARYGRPDEIHVELGRDLKKSAKVRNDISKENAKFAKANDKRAALFRELNNGQSPTGLDLKKMRLWEELGKDEFTRLCPFSGKPISAAMLFNGEVEIEHILPFSRTLDNGAGNLTVSIRNANRLKDNGTPFEAFSDDKHADKGMVWADIMDRARKLPKNKRWRFDKDAMEKFNRDGGFIARQLTDNAHIAKVTKQYLGHICHPDKIVTIPGGLTAMMRSKWYLNNLLGDHNYKERNDHRHHIIDAFVVGLTDRGMLQAVSTQTARGADDLVHIKLPDITTLRNQLNKRLDDIIVSYKPDHGTSGKLFNETAYGIVADDKQDADLKGYNLVTRKKIDALSEKEIHAIRNRGWRTLVVDHVEKARERLDKWDKNALAKTLAEFGSAHNIKTIRILVSNQSATVIPSAPYKAYAPSSFVCVDIWQLPKGKPGKWKPGEFEWHGAFWSYDQCKGQSPDKNKGLINGKPIHPAAKFITRLFKNDLVEIRNGTETEAMKVGGFSTTNNRIDLRPQHETESDQKYFSINGLRHTFCKKLLFDESGKRKG

SEQ ID NO: 18540 - protein, 1082 aa, unidentified
  REGION 1..1082: note = Cas Enzyme sequence
MDWRLGLDIGTNSIGWAVLIPNGNDHFSVKDIGVRIFSDGREPSQAGRVGDPKALTRRRARQMRRRIERVKRRKKAVAKLLKKEGFLPTSEVDRLKVDSLNPYELRACAAHDRISPFQLGRVLMHLSVRRGYKSNRKNQVGDEGLDEKRVTSVKINKLTSTLGGRTLGEFLYEMNKDSKPIRFTPDHSEFYPSRAMYIEEFARIRSIQERYYPKLDWDRLHHILFDQRPLKRPERGHCRYYPEEYRSYNAVPSAIRFRIMGDLSRLSWSTPDGSKGKLDNEHIKLLFSKLEHQKELSFDKAKGLLGLPQCAIFNLQSERFPKLKGNDTCCDLRSPERFGALWDEIPESEQDAIVELLITEDDPSVIAEALAPYSLHQESVANICAYSPRSGVSALSSKFMRQCYKLMLNEHLDYTKATERLGFHHSIDEKLEQLNELPYYGKILHESTIGANPEASEDNPEIRYGRIGNPTVHVALNQVMKLVNALIKRYGNPHEVVIEVGRELKLSKEERDAITKDQTKRKKENDRIKNEYRGLGWKDDHVTNQDIKKFKLWEELGKDSLSRCCIYCGEQISASQLVNGEAQIEHILPFSRTFDDSMGNLTVAHQTCNAKKGNRTPYEAFHAEKGKFAIESIRERAYRVFRQAKAKRFNEDAIKLYEKDDNFIARQLTDNAYIARIARDYLKAISPKVWNIPGRLTALFRAQWGFNTILGNKGEWFKNRFDHRHHAIDAVTIGLIDNTLLMKAASENSRSIKPIAPPCPVDREGLSVLVSETLVSVKPDHGIQGKLFAETALGRIKRLEWIATSALKVGQVDSIGDAKIRRSLVSLMEEMSFAKALDKVAETHERIPVFMDRFVATMQIHELTPKDIFEFHRIIDRGIENRIVEHLAAYGIHDATIKDAKELEKALRQFSEKSGIKRIRYQPKDQTPIIIKSAPFKAYMPGDYLFVDIWMINDPKRGKKRYEGVFVTRAQANQKGFVAPRPHPAAKKLMRLYKNDVIFIDEGDGSYPAVVAGYAATQNKIDIQPLHASDTISSWIKNTNPHMLNGPWKQVDGQNFISINALFQRARISQVKISIEGKIKRR

SEQ ID NO: 18541 - protein, 1151 aa, unidentified
  REGION 1..1151: note = Cas Enzyme sequence
MITLGLDIGSNSVGSAWVDTETGVLDMGASVFPAGVEEQSGKRGAPVNQNRRQKRQLRRSIARRAERKRLLKKTLTDAGLLPQSVLEIESVCAEDPWQLRRKALSEPLTPYQFGRVLLHLNQRRGASNIVLDEENKEEGAIKEAMDRLRRQLDKRTVGEFMAGLMEQRASELEKKPGTLIRKPIRNRLYRLDPKEYLYADRTLIREEFNKLWNAQKSFSGPLAALLTDELRKQLDDPSGDRIWQSRGLLFGQRRQYWDTGTLGHCSLEPTDLGCPLADMYAQEFRVIESVNNIRIEERGKPARPLTPEERSRVIAVLRSQKTATPSTVRKALGLNKKDIKEFFTLNIERDKERSLNTDWFWREIVLGVWGEKAWQHLDESVHQSVNRAIQAFDPEKPEHIEKLRRGCGQWWRLDATATERLVAAWQKRPTIDKRLKLSRRAIRNLLPYMNRRKPDGTWPTQMEARIAFAEDGDAVDQVTGQEPTPVQRRRYSLKGNPPNRKARRFTQKHPDMLPPAPILANPVVRKAIHEVRRHVTAYLRKYGRRPDRVVIELAREAKLPAVVRDKQLATNRQREKIRKAIADQYDLRLGTTAQQRKAEERVLLCRQQRNICPYCGGTIDEKAAANGAGVEIDHIVPFSRCGDNSLNNRVLCHTHCNRGKGSLTPKEWLSPEDFAALETRLAHFEKPEGEDVSYFTHKDFSIKWENLHREGPAADQWRTSALTDTAYASTQVASYLAAALYPEQQDAQRIFFTKGLYTSLLRRDWQLQDAKLGKIRDDHRHHAVDAVAIALTTPERLQELAVKAREWEQLHSQGADTKYPPIAPPAPWKTVEDFRNAVMAGVHTLVVAHRPSMRRLAGAFHQDTAYGPVLDNPKRYTVRVAASDLKPGYLKLSQKQQDDLAQGRRPRPADDPPIDSNSYLVRDLALRLQLRKCLKDRGLDPDAFTEKQLRALLQAGPLRMASGVPIKSAVCLKTIENPVVFPRYNRDIQTGRKVADSDPRSRRIYIGGNNHHAEIRENAKGQWSVKVVTMIEAARRVRAAKDPRARSAVDRSDTKEGRFIMSLSIGETVHMRHPVTNEPGYFTVFKIDPNGAIHVTHHWDARPSKPTEDQEAREDIRLSPSKFKNLGPSDGIPPYKVHVNPLGEPRRLEGD

SEQ ID NO: 18542 - protein, 1067 aa, unidentified
  REGION 1..1067: note = Cas Enzyme sequence
VHWRLGIDLGTNSLGWWAFEVAKEGSRWQVVRSLDGGVFIFPDGRESGKGGRVGDSKAVARRDARSMRRNRDRKRVRLAAFECELRDLGLLPPKPKGAKAVNQRRKEPNPPWDANPYRLRAEAMDRSLTPHELGRTLLHLGRRRGFQSNRLEQSDDDGGKLKEAMERLETDLGEQTLGQFLWQRVCDSDTVEKQGGKAKGLRFRGHDEFYPSRAMYAAEFDKIHEKQKNNHTLTPEQWDRFRNRYVLFQWPLKPVDRGACEFFPNESRHWRDTPIGHDFRIYQELNALKWIDADLGEHALDPEQRTAVLDLLMTRASEVKFTAIRKLKRTDKTLLFAGATRFNLESDKRKGLKPHVIGARLGADPALPNLWAQRCSDAGDDGVLDDIFERLHTEADTEELKANLSDTFNLNDETIVALLKISVGKPTASVSRRFMESIVPVMQHQGLMYWEAVSELENEQGERFHHSYRPGLGDRLLLPYYGEILRGSVQGADPKNFSADNPEKHFGRINNPTVHVALNSLRKVLNALIARFGMPTEIHVELGRDLKNSRDKRDKETAQQAKNQRRNEDILKELARHKIHHPSAIDMKKVKLWEELGPTEMTRRCPFTGKNISFAQLINGDVEIEHILPFKRTLDDSMANLTVAMRSANRLKGNKTPFEAFADDLYEKDGIPWAEVRAGAQRLPEHKRWRFGADAMKRFEKDNDFIARQLTDNAHIARAATRYLGCLKGVQSIVPNRGGLTAMLRGKWRLNGILSDDNKKTRDDHRHHAIDAAVIGLTDRAVLNEVSKLSARGADDRVKIKIPDLPEQIEQDVRTRVPAIIVAYKPDHGWQGAMVKETAYGFVAQDRRDPDLPEHNLVVRKPLTSLTAKEIEAVRDPLIRGAVRDHVDTAKQGGATHEKALAQFTEKTGIKRVRILITDQTVTPVPSAPYKGYKPDSYVCCDIWRLPKGKEGQWVTGQYKWEGVYWLYAEASELAPKPETKKPHPAAKFVTRLFKNDLVAFDDGGMTVVRRVAGFSTTNNKLDVVSHNEANPKQTYVSINVLGAQGLRKLFVAPDGCIKGLQRGGSS

SEQ ID NO: 18543 - protein, 1001 aa, unidentified
  REGION 1..1001: note = Cas Enzyme sequence
MRRNRDRKRVRLAAFECELRDLGLLPPKPKGAKAVNQRRKEPNPPWDANPYRLRAEAMDRSLTPHELGRTLLHLGRRRGFQSNRLEQSDDDGGKLKEAMERLETDLGEQTLGQFLWQRVCDSDTVEKQGGKAKGLRFRGHDEFYPSRAMYAAEFDKIHEKQKNNHTLTPEQWDRFRNRYVLFQWPLKPVDRGACEFFPNESRHWRDTPIGHDFRIYQELNALKWIDADLGEHALDPEQRTAVLDLLMTRASEVKFTAIRKLKRTDKTLLFAGATRFNLESDKRKGLKPHVIGARLGADPALPNLWAQRCSDAGDDGVLDDIFERLHTEADTEELKANLSDTFNLNDETIVALLKISVGKPTASVSRRFMESIVPVMQHQGLMYWEAVSELENEQGERFHHSYRPGLGDRLLLPYYGEILRGSVQGADPKNFSADNPEKHFGRINNPTVHVALNSLRKVLNALIARFGMPTEIHVELGRDLKNSRDKRDKETAQQAKNQRRNEDILKELARHKIHHPSAIDMKKVKLWEELGPTEMTRRCPFTGKNISFAQLINGDVEIEHILPFKRTLDDSMANLTVAMRSANRLKGNKTPFEAFADDLYEKDGIPWAEVRAGAQRLPEHKRWRFGADAMKRFEKDNDFIARQLTDNAHIARAATRYLGCLKGVQSIVPNRGGLTAMLRGKWRLNGILSDDNKKTRDDHRHHAIDAAVIGLTDRAVLNEVSKLSARGADDRVKIKIPDLPEQIEQDVRTRVPAIIVAYKPDHGWQGAMVKETAYGFVAQDRRDPDLPEHNLVVRKPLTSLTAKEIEAVRDPLIRGAVRDHVDTAKQGGATHEKALAQFTEKTGIKRVRILITDQTVTPVPSAPYKGYKPDSYVCCDIWRLPKGKEGQWVTGQYKWEGVYWLYAEASELAPKPETKKPHPAAKFVTRLFKNDLVAFDDGGMTVVRRVAGFSTTNNKLDVVSHNEANPKQTYVSINVLGAQGLRKLFVAPDGCIKGLQRGGSS

SEQ ID NO: 18544 - protein, 1353 aa, unidentified
  REGION 1..1353: note = Cas Enzyme sequence
VSTTRHVIGFDIGSNSVGSVWIDRKAGGITAGVSVFPAGVDESDDKRGDPKNAKRRMTRRTRITLARRSQRKRELRLKLIEAGLLPGTEAEFKTLLETTDPWELRRKGLDEPLTPFEFGRVLLHLAQRRGALGLHVPDPSEEEADADEAAQDDGKVKAAIGAVRAKMIEKNARTFGEFICMVRAERVTPITTADKRRADERKGPREWRKAVRNKAASYEHCADRPMIRDEFARLWDAQSRLRGETARLLTPELRLALDDESGDAIWRHKGLLFGQRRQSWDLGTLGRCNLHPEERCVPHADMDASRYLVVETVNNLKIIERGKEARPLTPEERAKIKAFLSGPLGMEKGRKKKGDTGPPADRPKRTVSVTDLRNFMGTTKDGWGRASKTSRFRFNIEKDEDRAINTDWFSREIIHGAVTAERWAAMPERVREGLNRAILKFDPDQEEDAAKLRAGVMDWAGLSKAQADALVAAWKTRPKPDAKRLSMSRRAVRNLLTLMDRAEPWPDPNRPGQTRWLTQIEARKLLAGDGDFKDRTTGEPFDDITRRRYATGAKGATARDRYYMGKHVLLRDGKPVIDRETGEPLAEPPPAPLIGNPVVRKAIHEVRRHLVEYMKTFGRKPDEVYIELAREAKMGKKDADRLLFKNRLRNRIRNNIIHELDLDSQTATQQRAAVVRVILCVQQGGVCPLCGQSGLTSRLAAAGQECEVAHIIPRASGGHNGLSNIVLAHEKCNREMGRRTPRQYWSDGPGFEQGMVWVEGIYGDVQRPKPSEWKSATGDALWACYFTERDDTAKIEQFKKDVKDIQEMTARQEAATKYAARQVMAYLADALYGGKGLPERATGSGDESDKRRIFATDGLWTSRLRREWGLFFDPHDARSQGLSNDEERERKEKNRGDHRHHAIDAVVIALCTQQVRNAWEEREKRADREGINSADDEKMENYRRLHPIDPPEPFKTREDFREAIRRAVFGDDGSLRPICHRPVKRKLIGALHEETLFGPVLDKAGNLTGNYTAKKSVLALDPNHLRLPRPETEKKAVERLARRRMQEKGEDERSARKWARGIVASPAYTPAIVDPPPRKSGIVRDATLRRRLRACLEEAGLDPDSFSANQVKKLYDAGGFRQASGVPIHSVVLLRTMNDPVVIDRKRPDYSTGRMRRDGDPSSKRAYVGGNNHHVEIRVDEKGNWTGEIVSAFEAAQRKLARLRALREARIPKPDEFRKLPKAERRRHTPVLRAIEEAHPIVDRRDDEARGGRFVMSLAEGEMLHMKHKGTGEVGYFVVAKLDKPRTVVLVPHWDARAATERKDAEGNKVPDSKREQFSVTPSDLKALAPPGRDHAVKVRVSPLGVVTILEKD

SEQ ID NO: 18545 - protein, 1047 aa, unidentified
  REGION 1..1047: note = Cas Enzyme sequence
IWDKQKELGGELAALLTDELRGSLDDPSRDEVWRHRGVVFGQRRTYWSASALLRCDLEPTDERCPKADMVAQEFLIVETVNNIRLRRQGELGQPLTPEQRHRVIERLCREKTSSIAQVRRALGIDKRTLAKQNLPEDAYELNLGADPDRKPNTNWFYREMVLGVFGDAKWQAMSREQHEAVNRAILKFDPAEPNHAERLRRVAVEAWQLDDPQVGSLLEAWRSRPKRENRLNLSRRAIRNLLPYMNEFDREKNRWPTQIEARQQFAEDAHNGATPEQRVRYAVQTTDVLRNLLRSSLRRDPVQVERLVGAALKRRGTGASAPHDEEHRLTLAIGELLARRGLNRARRRFLEKHPDLLPPAPEMANPVVRKAIHEVRRHLNEYLRRFGRAPDRVVVELAREARQSKKVRDAQLARNRKRAAIKDGIREQFGLSRRTKRQQEQAIDRVLLCRQQREVCPYSGKTITEQMAADGDQVESDHIVPKSRSNEKGPSNQVLCFRDANRGKGNKTPKEWLGADSEDFAAIEQRLRHLKEGESPEQYFSPKDCKRKWALLHADAPSTQEFLNSQLTDTAYAARQVVAYVRDALYGGETEGERHVFTTKGQYTAMLRRDWGLLESELDRQWNRAAENVPEDAEHGQRGVARREKDRRDHLHHAVDAAVIAFCWGETIQKIAHDARLQEEMKGKLGQWPSREPIPPPRPWKGNTGFRNAVLEALERVVVSHRPVKRKLVGALHKESLYGPVLGSPHRFTRRIWIWRKAQEHLKPAHLRVPDGWDELSAQLDAQNLSKSAKRRIRRRLAALQDPPPGKTGIVRDRELRDQLRRCLRRNGLDPDDFTPQEIKYLAAEGRVRQSNGVPVKSAVLLWTISDPVRVPRRIWDLTIKKPDERMDRVYDSQNNHHVEIRENLRTGKWQGKVIRAIDAARRVRPAKSPDGTRPEPLPPVDRSDGPATRFVMSLAEAETIHACRKDRAREQPGAVDYYVVAKIDKLRNGARIHFVPHWDARKARGEGKRDEWEVTPADLKGCGPEEGSPPYKVRVSPLGEVRRIDD

SEQ ID NO: 18546 - protein, 1105 aa, unidentified
  REGION 1..1105: note = Cas Enzyme sequence
MSINLGLDLGPNSIGWALVDDCFHRIVAAGVRIFPEGVDNFDSAKEASRNETRRIARGMRRQIRRRSMRKKILRQALIEAGLWPKDTAAQRALESQDPYALRARAIDVNQPKLTKHELGRLLLHLNRRRGFLSNRKEKKADKEAQGMKAEIGTLAHELEQRNQTLGQYLYEKTLIPHDQRQPEDRIRRRHTARAMFEQELLAIAARHSDILTDKLLFGRHGRQPLQGRKPLRCMKGESLLQAAGLHGIIFFQRALYWPKSMIGLCELEPKEKRCPRFDRRAQRFRLLQEVNNLRYINDATHQEEFLKPEARTLLLDKLAKTEKLEFEKIADLLSKLPGMPAREQIKFNYQRGERAYLKGHITDARVAKAYKKWHELPEETKDQAVAILLDPSLGEDEVRRHLTESLGFKPDAAQALMEVDLPDGYIDLSLRALSQGREGKGLLYFMEQGMKYQAGKGTVDNGQPTDAIHAAGYLRSDELLRRALDHLPAPEKLKDTKIGDIPNPVVKRTLTELRKLVNAIIREYGKPDAIHIEMARNLKEGEKKRKAYSKHIAEIEKRRKEAAEEIEKFVKKSSRDDVTKYLLWLEQDRICVYSGRSISITQLFNGDTDVDHILPYSRCLDNSQMNKVLCFRDENALKGQQTPYQWLAHANPTKYEQVCQRAKKLPYPKYKRFLQKEVELDSFIARQLVDTAYIARATAQYLSCLFDQKTQGVLGLKGQLTAELRYQWGLHNLLTPEADEKVKVREDHRHHAIDAIVIALTNRSRLQGLSRIRKQGGTHATGEVLPEPWPTFRQDVQAYVNQIQVSHRPSRKVAGGLHEETMYGLHRNDAGQTVANEYVVRKPLEALSANEISSIRDVAVRDAVIRRLAEHGYEIGRGKTIAAQDMKVLFGDPANPLRLIGKKTGTQGPPIRKVRVIKKEQTIRPIRSGDQTVYVKPGSTHHLSFFEYQEEGKTKYEAVWTTMLDAADRLKRQTHALSQVRQKLEAQGKGKKIRKNDPRLIQAMQQIARDIPLITRVHPQSPEAKFLFSLSRGEMVLAQVGGKPQLLVYNTSASTAGQMWFYHHTDARPAKDKKKFSFMVNTLLGKAQARKVSIDYLGRVRWARD

SEQ ID NO: 18547 - protein, 1068 aa, unidentified
  REGION 1..1068: note = Cas Enzyme sequence
MGIRFAFDLGTNSIGWAVWRFGSGVYGKNTPLELLGAGVRIFGDGRNPKDGQSLAVMRRGPRAQRRRRDRFLLRRANLIEALKRFGLWPSDEAAAQALASLNPYQLRAEGLDRALTPHEFGRALFHLNQRRGFKSNRKADRKNSKDDGKIAAATTRLRERFATENARTFGEFLWRRQKSEDPTQRAPARIRLQGEGAKALYEFYPTREMIEDEFALLWQAQRKHARDTVDDDAREAVHKVLFRQRPLKKPKVGKCTFVPTEERLPKALPSVEARVIYETLNHLEILRGLTRRQLDKAQRDALAATLLAGDNLPMGKIRKTLKLSSDEKINFEEGGRDKLEGSKSAWALSKKGPIGKAWLGWPLERRDALVALLLSEDDDDRLIERLVADFGLTRDQAVAVAAITPEEGYARLGRTANAAILAELMAEVVSYDKAVARAGERLGLLWHHSDERDGVILPRLPYYPEVLDRHVLPGDGESEDIFARLGRIPNPTVHICLNQLRRLVNALIEEFGAPDEIVLELARDLKNSQEQKDRLQKENRQNREASEKRSAFLREMGQQDTGENRARLRMFEEQQRAGGGVARCPYTLRAIGPTDLFSSEVDVDHILPMSRTMDDTRANKILCYRECNRIKRNRTPHEAFGAGWTTAKGARIEWEAIAANAATLQSRLRWRFQPDAMEQFEKDGRDFLARQLNETRYLSRLAKVYVGKICDPDQVWVVTGQMIGLLRGKWGLNDLLVGHNAADATEAAPKNRADHRHHAIDAMVIGAMTRGLVSEIARRAGEAEQRDERLFAGVEPPFAEFRSVVRAALDRMLVSFKPEHGMQGALHEDTAYGFVRDAARAEIGNLVRRKPVESLTAAEIETVRDPLLRAKLLAVRAPFADDKGKVKDTKALQQALRAFSEQERIRRVRVGKTDASVIEIADRGSGAPYKALVPGENHHMDIVQMRDGTWRGYAESLFAVNRKDWRPIWEKEKTGGKLVMRLHKGDMIELTDADGARRVKVVVRLSPSNNVLYLVPHNEGGDFQKRHVDDSDMFRWDFANIAKLKERDARAVRIDEMGRKRPKRSNTV

SEQ ID NO: 18548 - protein, 1075 aa, unidentified
  REGION 1..1075: note = Cas Enzyme sequence
LVVGIRYAFDLGTNSIGWAVWLFGPGLYGNNTALALRGAGARIFRDGRNPKDQQSLAIMRRAPRAQRRRRDRFLLRRGNLVAALRTAGLWPADQERASSLARLNPYQLRAEGLDRELTPEEFGRALFHLHQRRGFKSNRKADRKNKEDGKIAEAAKRLRERLADENARTFGEFLWRRQNKDNVAERLSARIRLHGAGAKALYEFYPTREMIEDEFAQLWRTQARFAPEVITDDKRENIHRVLFRQRALRPPKIGYCTLVAGEQRLPKALPSVEARVIYETLNHLEIAAGVRTRRLERTERDALATVLLRGDNLSWKKMRTALKIGADQKINFEEGGRKQLDGSKSALALGRKGPIGAAWASWPLDRKDAFVGALLTEADESALAEKLQRDFGITDDQAARAAAIVPEEGYARLGPTANAAILDELVADVIPYSEAVALAGKKRGEDWHHSDERDGVILDPLPYYPEVLERHLIPGDGESEDVFQRIGRIANPTVHICLNQLRRIVNALVDEFGPPDEIVLELARDLKNSQERKKEIEAENRKNRDAAEKRSKRLIEEFDQADTGENRARLRMFEEQERAGAGVARCPYTLRAIGLTDLFSAEVDIDHVLPMSRTLDDGRANKVLCFREANRFKRNQTPHEAFGRGWTTARGERVEWEAVAANAANLPRGARWRFLPDAMERFNADGRDFLARQLNETRYLSRLAKAYLSKACDPDRVWVVTGQMIGLLRGKWGLNDLFVDHNRVDLSPEAEEKARKDRNDHRHHAIDAIVIGAMTRGLVNEIARRAGRAVEHDERLFAGLEPPFPEFRQRAREALERLVVSHKPEHRKAAALHEDTAYGFVRDEREAREIGNLVRRKPIDALTGPEVDAVRDPVLRRELQAARARFADAKGKLTDAKAFQHALQQFGEERKIRRVRVGKADQSVIAIADRRTGEIYKGLAPGENHHMDIVQMRDGAWKGFTTSYFEVNRKGWRPRWEAEKTGGKLVMRLHKGDMIELLDADGVRRIKTVVRLSPSNNIVYLVRHTDAGDFQKRHDDADDPFRWDFANIGKLKERGAVAVRVDETGRVTKKRSNVL

SEQ ID NO: 18549 - protein, 960 aa, unidentified
  REGION 1..960: note = Cas Enzyme sequence
MARIWGFDLGTSSVGFAVIDYDEGSSQGKLVRVGVRVFPEGVDEKKKEPRNAVRRAKRLARRQFRRRRWRKRHMRELLVDAGLLPASERKPRSHQGRDDFFLNSDGADPYRLRARAVNERIEPFEIGRVLFHLCKHRGFTGSRKFDTSRADDRSRASEERQIRQEIEDLRRQLAGRTLGEYLHGLPPTEAKRRRHIHRDMVQDEFRRIWDKQRTFYPDLLTDDLRERIWHTLFAQRPTFFSLKTIGKCELEPDERRCLKGDWHAQRFVMLQMLNNLRFLGDRQLSAEQRERLLNELEAKASLTFDQIRKKLGLGDERFNFESGGEKRIIGNATECELAKVFGRQWETLPARDRIRAEIAERLWHLEYRQVGDKRAEIRTAAQWQAERDAFVKSAMRDWSITAEQAESLSKLDLPAGYVMHSKRAILKMLPYLEQGLRYDEAKDRAYPKPPPAGPPAEKLSEPDPNRVRNPTVIRTLGELQKVVNNLLRVDGRPDLIRIELARDLKLPRTRRLKLMAEQRQNEKRRKDARDELARRGLPVTHENVEKYLLANEQGWRCPYSGKQISCDGLFQSGLFEVDHILPRSRSFEDSFANKVVCHRDANKEKANRTPFEAWGADPERWAAIEHILSDIQKHAGFPISKVDRIKRKEFPAFGGEDFTNRQLVDSAYIARMAVDYLSELGVKVEPTNGRVTAHLRRLWGLETILSDAPEGKNRDDHRHHAVDAIAVALTTPAFVKRLSDYYGTDRTPDRERFRVPWDSLRADAERAVAEIVVSHRAQRKVSGALHDENPWGDTGEELEKNGIRYRLYSQRKSSGQRAVEPIQQKLMKPVGPDRAAWVATNSNHHILIYKDDAGELRNETVSMFDAAMRISKRQPIVDRSRPQAAPFRSLCIGDMIERTVDGRKTYWTVKKLSANGQITIQPHNFARDLGRTSPSVTTLVREGARKVVVDPIGRVSYAND

SEQ ID NO: 18550 - protein, 1076 aa, unidentified
  REGION 1..1076: note = Cas Enzyme sequence
MAMAEQRPYRLGLDLGANSLGWAMIWLDEGPSGLGPAGVRIFPDGRDPQSKSSNAVSRRVARGARRRRDRYLQRRKELMAALIEAGLMPAGEAERKKLQDRDPYEIRARGLDKRLSLHELGRALFHINQRRGFKSNRKTDRQNEEGGVIAKAAGKLEQMMLEEGARTLGELLAGRHSGRLGVRARPEARPSNVSSGAKAAYEFYPTRDMLEQEFVKLWEVQRRQHPELTAELHGKLHHIIFFQRPLVPPQVGKCALDPAKRPDDREGFRCPWAHPLAQRFRILQEVNNLTAGPVGERKRKLTAGERCKALHELLQTGAVTFEDLRTALKLESGWIFNLHSDRRDELKGDETAAALCSSKEALGKFDRKIWHSFPAERQAGIVERLLEEEDEEELIAWLIEETGVSKEQAYAIATVTLPDSHCRLGLRALKAIVPFMEEGQRYHQAAASAGYDHARLPTGEIRENLPYYGEILQDQVLGSGDARDPAEQRWGRLPNPTVHIGLNQLRRVVNALIRRFGPPQEIVVEMARSFKLSPDQLRKLELEQRENQRKNDDRRKELEKLGLPVNYGNLLKLRLWEELNPKDALDRQCPFTGEQIGMRRLLSEEVEIEHLLPFSRSWDDSPANKTVCLRAANRAKGQKAPYEAFGSSPTYSGQYYDWEAIKLRAKALPPNKRWRFDPDAMQRFEAGGGFLARQLNETSWLARLAKQYLGAVTDPRKIWVVPGRLTALLRRKWGLDDLLDSEGGRKNRNDHRHHALDALTAGLTDRGLLQRMAREYDEERERIVVKPPWEGFRQDVARVLEAILVSHKPDHGAQGQLHEDTAYGRIAGAKEGEGNLVYRKPFLALKETEVERIRDARLRDELQAAIGSGKAADKRLPNILAEFAKEWGERHGHGALRHVRLTKTEKPDYLVHIGDGAAPYKAYSAGANLCVELYETPDGKWRGEAVSLYQANQAGHQPRWPAEEPGARLVMRLHKGDCISLEEDGQRRYVLVKQLRARGRSMFLAEHHEAGALQTRHDDKEDPFRWRMYPYDKLRQLKAEPVRIDEIGRPWRLGRALPWQEWIERSRRLTPKPGRR

SEQ ID NO: 18551 - protein, 1045 aa, unidentified
  REGION 1..1045: note = Cas Enzyme sequence
MSLRFSFDLGTNSIGWAVYRIRPPKSGEKTGEPVELCDAGVRVFPDSRDPKSQQSLAADRRVARGMRRRRDRYLERRGHLMNALVECGLMPQDEAKRKALESLDPYDLRARALDEKLAPEKIGRVLFHLNQRRGFKSNRKTDAGDKEAEGMKAAIEKLEQRLRDEGVRTIGEWLAGRHQGRDDVRFRGRLAGNKMEWEFYPQRAMLEREFDAIWKAQAKHHPALLTDAARDKIQEIIFSQRPLKPVPAGKCTFEADEDRAPKALPTAERVRILQELNHLHVRPGPTAEMQPLTLDEREKLFNRLKTGSAMKWNAVCKALRLPDTTTFNFQSEKRKELKGDETARRLGVSKRKNIDAADLIGKRWHGLPLATQDAVVEKLLGDEDDDSVCGWLMDKLNITQAQAQHMVNTSLPPGYARLSKKAMAQILPHLESGVITYSEACKEAGYDHANPVEETGEVFNRLPPYQEIEAFNRQLAGTGDPNDPPDKRYGRYPNPTVHVGLNQLRRVVNALAEKHGVPSEIVLEIARDLKNSADERKRISKQQAENQKKNDARDKKIRKRGFPVNGENRMRLRLWEDLNRDDPLNRCCPYTGKQISIGMLFSGEVDIDHILPWSRTLDNSAANRTVCILEANRRKGDYSPAEAVKRGIFQKEDIDCATANLPGNKQWRFAIDAMERFENDPKRNFLDRQLVETRWLSRLARIYLAHMCHKNHVWVVTGQLTAMLRGKWGLNSILGEGDWKQRTDHRHHAVDAAVIGAIDRGMLNRAARDNARKETDAELKLDIAPPLDGFRDSVREVVDRIIVSHKPDHGIGGQLHEETAYGIVKDPKAEDGTLVARKPVAGLTKAEIKRIRNTRIRKELQDLTEDASAKELPEILAEWSRDNGIRRLRILKKEQSFIEIDDRKTGEPYRAVIAGENHHLDVFEMPGGELKFSVATVFDVNQPGWKAEVPEGGRLVMRLHKGDMVKIDGDDGARKVMRVQRIEVSAKRIRLIPHNEAGDFQKRHDDPNDSFRWEFFGFGSFTKRRLRPVIVSPTGKVKRRLPPEK

SEQ ID NO: 18552 - protein, 1045 aa, unidentified; identical to SEQ ID NO: 18551
  REGION 1..1045: note = Cas Enzyme sequence

SEQ ID NO: 18553 - protein, 1093 aa, unidentified
  REGION 1..1093: note = Cas Enzyme sequence
MRAPYRLGIDIGTNSLGWCVFDLDRAGRPGGIRRMGVRIFTDGRDPQKGTSLAADRRLPRQQRRRRDRYLDRRADLIRALVRHGLMPADDAERKKLESLDPYELRARGLDEALPLHHLGRAIFHLNQRRGFRSSRKTERGGDEKAAKEAEGMKGAIRSLEAKLDGRTPGLRTLGEYLWVNFRKDRSVRGSKDGSVQAMSAVRARPRVVKGKNAYDLYYSRAMFEREFAALWAAQAKFHPELTDAMRDEIADIVFFQRKLLPVDPGPCTFEEGEPRAPLALPIQQDFRILQELANLELVERTTQKGRRLTRAERDRLYDALKRKDKVTFDSIRKTVLKIGDGWTFNLEDERRKDLKGDAISAQLGHKKCFGDAWFDLPEERQTGTVGVLLDEEDEEALIARATTYWGLAEANAKAVAAVRLPEGLGRLSLKALRNIVPLLRDGVAEDGGLLGYAEAAERAGYHHSDFRTGEIMDALPYYGQVLSRYTAPVRSPSAPADERRHGRIANPTVHIALNETRKLINGLIGRYGHPESVVVELARDLKLNKEQKDDIRRQQAENQRKNDERRAKLAEIGEAGRTDGILRLRLWEELNPAEPHNRRCVYTGEAISIRRLFSDEVEIEHILPFKQFLDDSPANLTVSLRRANRDKGNRTPWEAFHADPNYDWPAIMARVADLPKNKRWRFREDAPDIVRDKARRALLRERNELPPDVLKEIEAAGAFLGRQLIDTAYLARLVRQYLWNACNPNQVRVTPGTLTGLLRRKWGLNRLLYGNRPDPEEGGEAGATLAKRRDNHLHHAIDAFVIGVTGRGMLQQVSTAADQVRDRLIDDMPEPWEGFREQLAERLGRIVVSYRPDHGKAGRLHEETAYGIVADPAKEGGATLVYRKALVDLNANEIERIRDRALREHVKAEVAPEGKGAKEIKEALAAFADRHGIRRVRLLKTEEGFIPINGGNGAPYKALVAGTNHCIEIFALPDGRWAGEGISIFDSNRNGHSPLWRRAHVDARLVMRVHKGDLLRLEHGGSDRVMRVVQLEASNNRIKLAEHHEGGKLQERHDDKDDPFRWLMASYNTLKERRARKVTVDVLGRVNDPGFKS

SEQ ID NO: 18554 - protein, 1093 aa, unidentified
  REGION 1..1093: note = Cas Enzyme sequence
MRAPYRLGIDIGTNSLGWCVFDLDRAGRPGGIRRMGVRIFTDGRDPQKGTSLAADRRLPRQQRRRRDRYLDRRADLIRALVRHGLMPADDAERKKLESLDPYELRARGLDEALPLHHLGRAIFHLNQRRGFRSSRKTERGGDEKAAKEAEGMKGAIRSLEAKLDGRTPGLRTLGEYLWVNFRKDRSVRGSKDGSVQAMSAVRARPRVVKGKNAYDLYYSRAMFEREFAALWAAQAKFHPELTDAMRDEIADIVFFQRKLLPVDPGPCTFEEGEPRAPLALPIQQDFRILQELANLELVERTTQKGRRLTRAERDRLYDALKRKDKVTFDSIRKTVLKIGDGWTFNLEDERRKDLKGDAISAQLGHKKCFGDAWFDLPEERQTGTVGVLLDEEDEEALIARATTYWGLAEANAKAVAAVRLPEGLGRLSLKALRNIVPLLRDGVAEDGGLLGYAEAAERAGYHHSDFRTGEIMDALPYYGQVLSRYTAPVRSPSAPADERRHGRIANPTVHIALNETRKLINGLIGRYGHPESVVVELARDLKLNKEQKDDIRRQQAENQRKNDERRAKLAEIGEAGRTDGILRLRLWEELNPAEPHNRRCVYTGEAISIRRLFSDEVEIEHILPFKQFLDDSPANLTVSLRRANRDKGNRTPWEAFHADPNYDWPAIMARVADLPKNKRWRFREDAPDIVRDKARRALLRERNELPPDVLKEIEAAGAFLGRQLIDTAYLARLVRQYLWNACNPNQVWVTPGTLTGLLRRKWGLNRLLYGNRPDPEEGGEAGATLAKRRDNHLHHAIDAFVIGVTGRGMLQQVSTAADQVRDRLIDDMPEPWEGFREQLAERLGRIVVSYRPDHGKAGRLHEETAYGIVADPAKEGGATLVYRKALVDLNANEIERIRDRALREHVKAEVAPEGKGAKEIKEALAAFADRHGIRRVRLLKTEEGFIPINGGNGAPYKALVAGTNHCIEIFALPDGRWAGEGISIFDSNRNGHSPLWRRAHVDARLVMRVHKGDLLRLEHGGSDRVMRVVQLEASNNRIKLAEHHEGGKLQERHDDKDDPFRWLMASYNTLKERRARKVTVDVLGRVNDPGFKS

SEQ ID NO: 18555 - protein, 1046 aa, unidentified
  REGION 1..1046: note = Cas Enzyme sequence
MDILRFAFDIGTNSIGWAVLKGTRGSEAKEGTATALTGLIDAGCRIYSDGRNPKDGSSLAMMRRGPRAARRRRDRFLQRQRKLIALLIAHGLMPKPEGDRKRLEALDPYALRAKALDEALAPHEIGRIMFHLNQRRGFQSNRKADKAEDDKGVLKQAQARLKEALERGGSRTLGEFLHKRLKDGSFARFRITGTGPKSEHEFYPTRQMVKDEFTAIWEAQAKHHLVLMTEKAKADVSNALFHQRPLKPVKAGKCTFNPAEERLPVALPSVEARRIYQELNELRYGEGFIVKTPLDKAQRDAFASALLMGDNLTWDKMRKALKLSAATRFSLEETRKELAGCATAKILRGKKGRELFGKAWASIPLARKDEIVWKLLNTEDEESLVAWLEVECGLSRGTALMAAGANLPDGYARLGKTANSQILEQLIAHHDYTYAKAAEAAGYHHSDFSTERKLERLPYYARVLERHVAFGTGDPDDPEEKQFGKFANPTVHIGLNQLRRIVNALIAKHGKPDEIVIELARDLKRSREEKERAQKDNRRNEEANARRREQLAAQGLPDSPGNMMRMRLWEEQRDGLQFLCPYSGEQISIEQLFSEEIEVDHILPFSRSLDDSAANKVVCFRSSNRGKKNKTPHEHFGEAGIWTAIEANAAKLLPNKRWRFAPDAMEKFQRDNRDFLSRQLNETRHLARVARAYLDCVSPQVWVVTGQLTAMLRGKWGLNSLLEGGNRKNRDDHRHHTIDAFAIGCISRAMLQEVARRAGEAEDRDDPRVIQDLPDPFEGYRDQLRERLRTMIVSHKPEHAKQGALHEETAYGIVRNEQDKAIGNLVYRKAIGSLTEKEIDRVRDPLLRQKLQAVRDNDGAKLDAKALGPALIAFAAAEGEREGRNPIRHVRILKPEASNVEIVGRRTGQPYKALVPGENWCMDIVSRRDGKGGFVWKGYAASIFDVNRKGWQPAWEKQKGGKLIMRLHKGDLVEIDDKDGVRRVKRVVVINPSANRFYLAANHEAGSLQDRHDDGGDEFRWDLAAISSFQKRNALKIKVNGIGQRK

SEQ ID NO: 18556 - protein, 1136 aa, unidentified
  REGION 1..1136: note = Cas Enzyme sequence
MPVPYRLGIDIGTNSLGWCVLDLNKKSEPSGIRRMGVRIFSDGRDPQSGTSLAVERRVPRGQRRRRDRYLDRRADLMTALVRHGLMPTDKAERKKLEDLDPYELRAHGLDAPLPLHHFGRALFHLNQRRGFKSNRKTDKPAEPDKAKEVTGMKDAIGILDKKIEEAGCRTLGEYLYKTAREGRTVRGSRDGKVKAVLTVRARPHAAKGGRNAYDFYPSRAMYEREFDELWKAQAAHHPELTSSARDGIRDIIFYQRRLKPVDPGKCALDREGEDKRAPLALPIVQQFRILQELANLRLENPIEQKTWRLSVGDRDQLFAELKTREKLSFTAIRKALKLRGDVKLNLEDQRRPELKGDFVSKRLAAEGCFGSRWFDLPEVEQTKIVSFLLDEPDEQEVVRRAVAEWGLTEREGRAVSAVPLPDGFGRVGLKALRKIVPIMLGEADADGRPLHYSEAAERAGYDHSERRTGEVFAEMPYYGQVLSHYVADVKSPNASSDEREHGRIANPTVHIGLNQLRKLINALIAEYGHPQEVVVELARDLKLNAEEKERIKREQTENKRKNDARRQKLGELGLLNRTDGILRLRLWEELGDNPADRRCVYTGDQISIERLFSDAVEIDHILPFQDSLDDSAANLTICMRRANRDKKKRTPHDAFHANSDYDWDGIVKRAASLPPNKRWRFRPDAMELVRDRAVRVLARAKGMLPKEAFEDIERAGAFLARQLVDTAYLARVARQYLWTACENPNNVWVIPGRMTEFMRRKWGLNKLLYGNRPDPDDQAAAGQMPKRRDDHRHHAIDAFVVGLTDRAMLQRVSTAAARAQERTIEEMPEPWEKFREDLKACLDRMIVSFKPEHGAQGRLHEDTAYGIIRHPEREGGATLVYRKPLEALNANEIERVRDRSLRQKLKDELGGLLFDESTLDAAKQSLQLAKRGGEAAAIQAAKAEVDRLKAAKKNQKKSGAKDLKTALTDFGKKHGIRHVRLLKTEANYIPISRQNGTAYKALTAGENHCVDVIELPSGAWTGEGITVFAANQVGHKPIWAERFAGARQLMRLQKGDLVKLEHEGRERLFRVVKLVPSNDLLWLAEHKEAGNLQQRNDDANDDFRWLYLAFSQMKTRLARKVTVDILGRVRDPGPPS

SEQ ID NO: 18557 - protein, 1044 aa, unidentified
  REGION 1..1044: note = Cas Enzyme sequence
MTPYRLGIDVGTNSIGWCVLDLNGAGEPTGIRATGVRIFPDGRDPQSGTSLAVDRRTARSARRRRDRFLLRQKDMISALVGFGLMPDQAAERKALETLDPYELRARGLDSKLTLHEFGRALFHLNQRRGFRSNRKTDRGAEKEKGKIKQAAGKLEAAMAESGSRTVGEFLAKRRRDGQWVRARLRGDGAKAEYDFYPQRAMLEAEFDALWSAQQAHHSELTEEARESLRKILFRQRDLRPVLPGKCALDPARDPSDLGGMRAPWALPLAQRFRIVQELANLRIVRSDYSQVRLDAKQRDLLLGELLKKKKVSFDAMRRALGLSSEHRFNLESEKRQDLQGDETAAVLADKKRFGKRWHELDPDQQTAIVERLLSEPDEAVLISWLQGEWGLDAEAAEAVADAPVPDGYCRLGRRALSRIVPIMEDQGLGYADAAREAGYDHSDRRPEDLLDELPYYGEALADHVVGTGDPDDPPEARFGRIANPTVHVGLNQLRKLVNALIETHGRPHQIVIELARELKQSQKEKERIQKEQAENQKKNDARRAQLAECGQADNGENRMRLRLWEELDPVDALGRRCVYTGEVIGMRRLFSDEVEIDHILPFSKTLDNSAANRIVSLRRANREKGNRTPYEAWGHDAKRWQEILERAKSLKKNKRWRFAADAMESFQANRDFLDRQLTDTAYLGRVAKAYLTNVCPDNRVYVVTGQLTALLRAKWGLNAFLSDANQKNRTDHRHHAIDAIVAAVTDRSMLQRIATAAGRTEREDRERLVADMPEPWDGFREEVGEAVRRIIVSHRPDHGTAGRLHEKTAYGILADPAREEGYTLVAREPLASLTENKIERIRDLGLRKRVQDHVRSATATGQKLTDRQLKEVLAGFVADTGVRRVRLLKKEADFVAIEDGTGRPYKAYIPGDNHHIDIYRLPDGSWAGEAVTVFQASQPNYIPEWKQKYPAAPLIMRVHKGDLLKLEDGGDERVMRVVKLQASQMRIWLVAHNEGGNFQERHDTDNEIDPFRWQWPTLANLKGRQARLVSVDVLGRVHDGGFKG

SEQ ID NO: 18558 - protein, 1047 aa, unidentified
  REGION 1..1047: note = Cas Enzyme sequence
MAHRLSLDIGTNSIGWCVLALDSEGWPTGLKDIGVRVYPDGRNPKDKTSLAAARRQARSMRRRRDRYLRRRRNLMKALIAAGLMPADEGERKALEALDPFELRARGLRERLLPHEFGRALFHLAQRRGFKSNRQADAGDDDETGKIKQAVARLRAEMDRVGAKTLGEWYHHVRSRSLDPSKIPSVRARLTRLNEDDKQDNYPFYPSREMVEEEFDTLWRAQAAHHPGLLTEALRKRLHRIVFHQRPLKAPAVGKCLYIPEERRLPRAHPLAQRWRILQELNNLRIVEGMRDRPLSLAQRDRLLEHLLRKEKMTFHQMRKALKLPGQTRFNLESEARKHLDGDVASLRIAEGRKPTKTRAARPGMGQAWWALSPDRKAELVDRLLHEPDEEELVAWLKETHGLEESVARGLANTKLPDGHAAVGPTAMRRISDELEADVITYNEAVQRAGFPHHSDFRHDVSAPALPYYGAVLDRHIIPGTGEPEHEEQDRIGRLANPTVHIGLNQIRKLINALIAQHGKPAQINVELARELKQNQKQRKEERRRNRENQERHELARKLFAEVGAHDTGDNRLRHRLWLEQEKTCPYTGVTISACQLFSSEVDIDHILPFSKTLDNSAANKVVCIAESNREKRNKSPYEVWSHTHLWPAIEANARRLPPNKRWRFAADAMERYENEERDFLDRHLTETRYLGRLAREYLTVICPQVYVTPGQLTAMISGKLGLNDILGGHNLPEPLEPRVKSRDDHRHHAVDAFTVGLMDRSFLQQAATLAGRVEREGLKERIEFPDPFPGYREQLREALARTVVSHRPNHSVKGRMHNETALGLAKHIKGDLWGVVYRKPIDSFQKTADLDKIRDPLIRETLLERCYGLSGKDLAAELAKYADETGARRLRVIEPLSVIPIRDKNGKAYKAYKGDANHRIEIWRLPGGKWTSQIISMFQANQEAAGRAASARPHPAAKLIMRLHKDDMIAIEDEGRGRRILRVVKFSGGAIVLADHNEGGNLKDRDGDPKDPFKYLSKSASALQKAGGRKLRIDEAGRVWDPGPLER

SEQ ID NO: 18559 - protein, 1105 aa, unidentified
  REGION 1..1105: note = Cas Enzyme sequence
VKTLGIDLGTNSLGWCLIDTEGEPLETQEGSIVAIGSRIFGDGREPKSGASLAVDRRAARAMRRRRDRYLSRRAALLKALTEYDLMPADDDARQQLVRETNDGKSKDGGPKTSGKLGDISTSVHGLRARALTERLTPHQIGRVLFNLNQRRGFKSNRKTDKRDNEQGKIEIGVNRLGDAMREAKAETFGKFLHGRRLEGKSVRTRLRPETAEDAKGDGYDFYPSRAALEREFDLVCEAQAAYHPDLLTDENVAHLRAIAFYQRPLKPVQAGLCSYNLSEDRLPKAHPLFQAFRLYKEVNELALVGEDQQARKLSIDQRDTLIRKLRSAKTTSFKALRSALKLGSEFRFNKESETRDKLLGDEIYVSMIDPKCFGPCWATFGTDRQWQILSKLREEEDPVELHAWLVGNCGLDDEQTKAVAKLHLPEGFGRLGPTALEALTDALKTETYDDGTVITEAEAARRCGYNHSDKSDPNFEGHDLLPNYQEVLERHIPPGTGNPDDVYDVFKGRITNPSVHIALNQLRRVVNELIKIHGRPDRIAIELGRDLKLSDKQKEEVDRLIRKNTREAEERSKKLAELGQADTGYNRLRLKLWEELNKDQPLNRVCIYSGEPITASMVFTAEVDVDHILPYSKSLDDSEANKILCLTKANRQKRNRAPADVTEWASRYGDILARAGTLPRNKRWRFARDAIEKFADEEGFLARQLTDMQYGSRMALTYLASLYPTEEADAEGVLRKHSRVRALSGRMTEMLRRKWGLNELLPDHNIGGGDTVKEKNRKDHRHHAIDAFVIACTSRSLIQKIQTVSRALEELGTEKVMGEVKEPWPGFRDELFERLKTTIVSHRPDHGTVSRAGYAAGKGQTAGKLHNDTAYGLTGEKDEKGNDLVVSRKPLSAFKAAKDLDGIRDKQLRQALQQATYGLSGREFEQAVHKLAGQAKFDGKDNPFRNLRHVRVVEPLKIIPVRDKSGKAYKGYKGDSNYRYDVWRLPDGKWVSEVVTTFDAHQPGWQSAIRQQYPTAKKVLSLKQDDAVAVDGDNGRVIYRVVKFNSAGQLCMAAHNEAGALKSRDADPADPFKYVYKAGSALRVINARQVRIDEIGRVFDPGPRG

SEQ ID NO: 18560 - protein, 1050 aa, unidentified
  REGION 1..1050: note = Cas Enzyme sequence
MSSYRFSFDLGTNSIGWAVFELDSKTRPVALADCGVRIFPDGRNPKDKQSLAVARREARAMRRRRDRYIKRRSELMERLVANGLMPESRDDQKALEGLDPYTLRAAGLDDALPPHHFGRALFHLNQRRGFKSNRKTDRGENSETGITKIGMKKLYEALLAEGCRTLGELQHRHHEANQTPAMDTNPKSVRAKLRGEGAKAAYDFYPSRDAVEDEFNKLWDSQKRFHPDLLTDAARDAIHDAIFYQRKLKTPVVGRCSFNPAEERVARAMPIAQHFRILQFVGDLRLIDSDLVRHPLNTDQKKALYRALLTKGKLTFKAMRKTIGIGAEYAFSHESEKQSEFRGDETAARLAGPKYFGPKWRELSFKDQSEIVDRLLHEENEETLIKYLQDRFGFDHDRCEAIADAPLPDGHTRLGKTALETLVEIMRDDHLPYDQACAKAGYEHALPPDGVILDDLPYYGMALERHVAFGDGKSDNPEKRYGKIANPTVHIALNQLRKVINALIARYGHPDQVVMEIARDLKQSKAKRDDISKEQKKNQDKNDQRRKKLQEAHIAVNAENMLRMRLWEELDEDNAAARACPFTGETISMARLFSPEVEIEHILPFSRSLDNSPANKTLCMAWANRAKGNRSPWEAFCRDGEPGFDWQEIAARAARLPKNKSWRFGPDAMDRLERDGDFLDRQLTDTQYLSRIAREYATKICDPNQVWVTPGRLTAWLRRNWGLNGILPTGNATKNRDDHRHHAIDAIVVGLTDRGILNRVSRSAALAEAEDLDRSIAEMPDPFDGFRENIRHKLEQIVVSHKPDAGFVPGHPKGDATPGALHNDTAYGIIKTDERGMSEVVTRKDVLSFKGTKEIETIRDAATRQSLLDAVADVPSGVAFTNALRDWSARTGTKRVRVTFNMSVIPIHDRDGKAYKGYKGDGNLCAEIYERPDGKWGDEIISRFDAVQPGFTPQWQCDFPAARRVMRLFRDDMIIAEVDGVMTVCKVVKLSAGIITLTPHHEANTDSRNRDKDDPFKYTYCAGDALRKRKARKLFVDPLGKIRGYPAEDD

SEQ ID NO: 18561 - protein, 1047 aa, unidentified
  REGION 1..1047: note = Cas Enzyme sequence
MSYRLSLDIGANSIGWSLLVLDAVGNPCGIRDIGVRVFPDGRDPKTLASLAAERRLARAMRRRRDRYLQRRKALINVLVRHGMLPAEEMSRKALVRLDPYVLRREALHRKLAPHELGRAIFHLNQRRGFASNRKTDRANDAEQGKIKPASDRLQAEIARAGLPTLGAWLAERHDRQQDVRARLVGSGAKAEYPFYPTRELIKAEFESIWAAQAAWNPILSNSTREAIAGVLFHQRPLKDSLVGRCWLEPGEFRAPKALPSTQAFRIAQDLSHLTIRRTGETDIDLTEAERAKLANLLNSGSDLSFNQIRKALGLTRGETFNLESKAREKLKGAETAARLAGKKGPLAAIWSTLDLASRDALVIALLDAETPDAAVATLVALGISADAAEAAERVTLPDGHAALSSKAIRAILPHLEAGLTYDKAVRAAGYRHHSDDRDGVILDRLPYYGLALADRIGTGTGQPEDPEEQRFGRASNPTVHVALNQLRHVVNAIIDRYGHPKQIIVEVLRELNQSAFERRRIQNEQTENAKRREAWAEELRKLGQRVNSRNLAFMRLWSEQSGDPKERLCPYTGERISLSRLFSGEVDEDHILPFAITLDDSFANRVIVMREANRRKARHTPYEAFHAQADWPEIQARAALLPPAKAWRFGPDALDKWKGEHADFLARHLTDSAYLARLARIYLRAVCDPDQVWCVPGRLTGMLRGALGMDSASLLGKGGARKERDDHRHHAIDALTIGLVDRSLLQRVATAAGRAQDRGRRLLDDLGEPWPGFLAEAASKVQAIKVSFKADTSPSGRLHNDTAYAVLPEPGPKAPNVAHRVPLQSLAGWKPEEVRDALGDPHLAERVIRIMQDAVGKPAQAAALGALAHDNTGRTIRRVQVRERLDGTAEVRDRRTGQPYKRVKLDANHRVEFWRLPATAGKRGKVKMLVVPMMEAAADAEAARLKRPVPDRRPHPAAKLMMRLHKNDVVAFGVGEARKLFRVIKFRDGEVTLAELHESGNLKVRDAAKDDAFKYVSASVRRFASEQTRKVFVDPAGRVFDQGPLIW

SEQ ID NO: 18562 - protein, 1064 aa, unidentified
  REGION 1..1064: note = Cas Enzyme sequence
MMVNDKPEYRLGLDLGTNSIGWAAIQLDDKGEPCGLLDMGIRIFPDGRDPTSEASNAVDRRVARGQRRLRDRKLSRRNRMMQSLVDYGLMPANADECKKLEVSDPYALRARALDEPLEPFELGRTLFHLNQRRGFKSNRKAGGDEKEDGQVHTAINELTSRIEESGARTLGEFLARLHQAGKAVRARPETGLRADRAMYEAEFNAIRGKQEPHHNLSGEHWKDLHDIIFHQRPLRPVESGWCQFEFENSERRAAKALPVFQEFRILQEVNNLRIRVGLEPERRLCAKERMRAMNRLHSGSDIRLSEGRDNKPAKPTRDLGLPSGTVFNLAAGGRKSVKGDETAARLSKPALFGEKWLYLSLDERNEIVRFLLDTEDPEVVRRRATDEWGLNEKQAEAVANVSLPDGYGNLSEKAIRKLLPHLEQGKVFSEAVQDAGYRHHSDFRNAEAHDELPYYGQALPRDAVGADPTKDAKQHGEPAVYGRIGNPTVHIGLGQLRRVVNRVTETYGKPAEVVVELARELKMNREQKREYQRQQSEGRDRNERFRKELGEEALESTPDALRKLRLWEEQGPIHNRVCPYTGKPLSFAMVMSAQTEVDHILPFSRTLDNSMANLVVCMTDANRTKGNLTPHEAFGDQCLEYVKDFPSNKRWRFQEDAMERFEGERDFLDRQLNETQYLSRTARIYLSYLYDEQSEHRQRVRVIPGRMTALLRRGWGLDGMLDDTADSEIPRKTRDDHRHHAVDAFVVANTTQGLLQQFAQATGSDYRDAEERLAALVPPPWEGFNRGEVQERLDRMVVSYKQDHGTRGEKGKTTGQLHEATAYGIIEPIGEGRHKVVLRKELSKFTAKDLDNVPDATLQNALRQLWDETGGKVADFAKRAAEDGVPVNGRPQKVRRVRIYSEQRIIPVEDASGKAYKGYVPGGNEFADVWRLPDGKWQTLVVSKFDANQSGVDPNDFRPHPAAKRLMRLQIDDMGALGEGRNRRIVRVRQMDNNKSGPRIVLDDHNEANVDARIREDAKIRRKTKTDGGMKVEVFSAAKLRRLGFRKVRVDEMGRVFDRGPFKP

SEQ ID NO: 18563 - protein, 1107 aa, unidentified
  REGION 1..1107: note = Cas Enzyme sequence
MRAPYRIGIDIGTNSLGWCLVQLDPVGKPCGIIDLGVRIFRDARNPKSRESLAADRRLARAMRRQRDRRLRRKARLIKVLVKHGLMPEDRIERRQLCTNSKEAGIKAPDPYELRARGLDERLEPFEFGRALFHLNQRRGFQSNLRTDRVSRASKEGSPKHAAKKLESLLQGDDGSPSYRTLGELLYRAGFGPSVRATKVGGSEKLRRFRPTAIRAGSPAYDVYPLRAMYLAEFEALWDAQRRFGLELRDFEAARDETRRAIFDQRPLKPVPVGKCRFNPDDPRAPRALPIAQRFRMLQELNHLRWIDRNRQPHELTASQRARILSKLELRKKVTFDEIRKQLAEELGGSQIEFNFESELRKHLDGDRTAAELSNKRRFGARWWRLSLEERNEIVESLLAAQDEEELKHVALSKWNLTPDQADALLDADLPDGYSRLGRRAIRAMLPHLEAGKRYDEAARAAGYAHHVPHDGQLLEKLPYYGERLIAHTIEVPSASDPAEREYGRLPNPTVHVALNQLRRVMNEIIDRYGRPEEVVVELARDLPMGAADLRKHNREQEENQRRNERLKDEIASLLRDAGASEREVADALRRNDAVLRMRLWKELGPVHDRCCMYSHPPRPISIRALFSSEVQIDHILPRKETLDDSYANKTLCYAQANAVKRKRTPYDAFANHPDYDWQAILLRAKNLPKNKRWRFAADAMERISNAQRPGVPPELADQFTENDGFLARHLVDTRYIARVAREYLTAVCDPRRVWPVTGHVTGLLRAKWGLNNLLPSHNVSGSDDQRVRKNRLDHRHHAIDAFVIACTDRSMLQQVARTTDDGRTKAFESMPPPWPEFSLSELREKVRKIVVSFRADHGSSGIDPVTGRTRTTGKFHNDTAYFPVGTAKGAALVRSRKSIADFATQEEIDAIPCPALRARLQAWIEGETATGKSLKEACASFAHETGIRKVRITEPLTVIPIRDKKTGRIYKAYKGDSNERMEVWRLPNGRWVGQIITTFEANQPLLGSRRRPHPAARLVYELYIDDMIRIEDAALGERTMRIVKMSGQNVFLADHYEAGALKKRDETDNEVDPFKYLIRSVSTLQALKLRKLRVSPSGRVWDPGPPR

SEQ ID NO: 18564 - protein, 1003 aa, unidentified
  REGION 1..1003: note = Cas Enzyme sequence
MRRRRDRYLSRRMSLMNALIKFGLMPSDQAARKALEALDPYELRTRGLDMRLEPHHLGRALFHLNQRRGFKSSRKTLSDEKESGLIDAGINKLRDAMHVGRHRTVGEYLWSRHTRRNELGQVQAVRVRLQGTGKDEHYQFYPHRTLIEEEFDRLWRKQVEFHPDLLTSDAKTQLKHIVFFQRPLKPVVPGRCTLDPTERRAPLALPVVQRFRIYQELANLRIERFGESRALSLPERDSLFTKLERKPKLSFEQMKKALKLDSTHRFNLESPNRDGLKGDETGLKLARDRLFGKMWWDSPPEHQAKIVETLLGTDDSGTLFEIAQRDWGLPDLNARAVARVTLPEGHSSIGRTAIGKIVEIMMAQGLNYHHAAKAAGYEPSDFRGDGSMDALPYYGQVLERQVIGDTGNPADPPERQFGRFPNPTVHIALNQLRIVVNALIQHYGKPAEIVVELARELKQNKKQKDAYNKRVAEDTVRNEQIAEKLASLGVENNGLNRKRYRLWEQLGPPHDRRCIYTNQQIACAKIFSPDVAIDHILPFARTLDDGMENLLLCMASANRGKTNLTPHEWKGSSEEWHDILLRADKLPPQKRRRFSADAVDWWLREEADFVARHLTDTQWIARAAKQYLGGICPADRVWATPGRLTHLLRGKWGLNGILADVRRGALTNDPDSEEDAGQALGVPKNRNDHRHHAIDAFVVALTERGILNRVAHAAGQSSPDRVIEEMPSPWLGFRNELRESIGKVVVALRPDHGKQGPLHEATAYGPIKRPEDWKGHNIVYRSSFSELNENEIDRIRDQGLRSQVQAHLNGIKGGGALAGAALKAALAKFKDHQGVTPRHVRLTKKEQSLIPIRDRNTGCVYKLLTPGRNWCIDIFEQPNGSWKGAPVTLFEANNPGALNEKRKGHPAARRVLRIHKGDYLRLTHQSGYEIYRVFRLNARENRLYLAPHYEAGDLQKRHEKKIAEYRDDPFRWLLASYNTLKERGARKVSVDMLGRIQESGVSK

SEQ ID NO: 18565 - protein, 1053 aa, unidentified
  REGION 1..1053: note = Cas Enzyme sequence
  SITE 186: note = misc_feature - Xaa can be any naturally occurring amino acid
  SITE 986: note = misc_feature - Xaa can be any naturally occurring amino acid
MRRLGLDIGTNSIGWCLIEDDRRIVDIGVRIFSDGRDPKSGTSLAVDRRAARAMRRRRDRYLGRRTAFLKTLVAHGLLPADADQARLVAERDPYTLRKRALYETLEPYEIGRALFHLNQRRGFKSNRKAERKAKSGEEGKIAGGAKALDQAMAEAGADTLGEFLADRQVKRVRLSSQNQEYDFYPXRRHVEYEFARIWEEQAKHHPELLTDAARAALHRILFFQRPLKEQEVGYCTFAGLAGVPSDERRLPKAHPLFQQRRLYEEVNQLRIVSAGAVERSLTRDERDALILKLQDKRKVSFQSLAKVIRLGEGERFNKESENRKDLIGDEVRAELGDKKRFGSRWLHFSLDEQVRIIERLRNEEDPDALHQWLQAEYGLDPERAEAVAGARLPEGYGRFGLTATTRLLDALKGDVVTYDKAAEAAGFHHSDHRTGQMLERLPYYGEILTREIAPGKEEYGDPLERRYGKITNPTVHIGLRQLQKLVNAIIAVHGRPDQIVVELARELKLNEKQKDEHKRRIKQDTEAAIARGKKLTAEGFADTGANRMLLRLWEELNPANPLDRRCPYCGEPISIRQLFSGEADVDHIIPYSISLDDSPGNKVVAHRNCNRIKGNKTPWQCWGHSERWETISAQVARLHKSKQWRFAPDAIERMERDGGFLARQLTDTQYLSRIAGKYLRSLYPTADAGRVDVIPGRMTAMLRRLWGLNSLLPDHNFVENEHSNAPKNRLDHRHHAIDAAVAAVTSLGLMQRIAHSAARAEAKDLDRLFEDLPQPWQGFREELGERLARVTVSHKADHGRKRRPSKDRDVTAGRLHNDTAYGFTGEFAADGKTPIVVHRVPLMSLKPGDLTASDRIPDTALRDALYTATRDLTGKEFEQALARFAREHPVFKGIRRVRVREPLNVIAIRDREGRAYKAYKGDSNARYDVWRLPDGKWVHDIVSMFDAHRPQASERRPHPAARKVLSLRQNDLIAIERNGGPREIVXVVKFSTIGTLALAAANEAGALKARDAAPPEVDPFKYIYAQGNSLKKMKARQVRVDLLGRVFDPGPRE

SEQ ID NO: 18566 - protein, 1053 aa, unidentified
  REGION 1..1053: note = Cas Enzyme sequence
MRRLGLDIGTNSIGWCLIEDDRRIVDIGVRIFSDGRDPKSGTSLAVDRRAARAMRRRRDRYLGRRTAFLKTLVAHGLLPADADQARLVAERDPYTLRKRALYETLEPYEIGRALFHLNQRRGFKSNRKAERKAKSGEEGKIAGGAKALDQAMAEAGADTLGEFLADRQVKRVRLSSQNQEYDFYPLRRHVEYEFARIWEEQAKHHPELLTDAARAALHRILFFQRPLKEQEVGYCTFAGLAGVPSDERRLPKAHPLFQQRRLYEEVNQLRIVSAGAVERSLTRDERDALILKLQDKRKVSFQSLAKVIRLGEGERFNKESENRKDLIGDEVRAELGDKKRFGSRWLHFSLDEQVRIIERLRNEEDPDALHQWLQAEYGLDPERAEAVAGARLPEGYGRFGLTATTRLLDALKGDVVTYDKAAEAAGFHHSDHRTGQMLERLPYYGEILTREIAPGKEEYGDPLERRYGKITNPTVHIGLRQLQKLVNAIIAVHGRPDQIVVELARELKLNEKQKDEHKRRIKQDTEAAIARGKKLTAEGFADTGANRMLLRLWEELNPANPLDRRCPYCGEPISIRQLFSGEADVDHIIPYSISLDDSPGNKVVAHRNCNRIKGNKTPWQCWGHSERWETISAQVARLHKSKQWRFAPDAIERMERDGGFLARQLTDTQYLSRIAGKYLRSLYPTADAGRVDVIPGRMTAMLRRLWGLNSLLPDHNFVENEHSNAPKNRLDHRHHAIDAAVAAVTSLGLMQRIAHSAARAEAKDLDRLFEDLPQPWQGFREELGERLARVTVSHKADHGRKRRPSKDRDVTAGRLHNDTAYGFTGEFAADGKTPIVVHRVPLMSLKPGDLTASDRIPDTALRDALYTATRDLTGKEFEQALARFAREHPVFKGIRRVRVREPLNVIAIRDREGRAYKAYKGDSNARYDVWRLPDGKWVHDIVSMFDAHRPQASERRPHPAARKVLSLRQNDLIAIERNGGPREIVRVVKFSTIGTLALAAANEAGALKARDAAPPEVDPFKYIYAQGNSLKKMKARQVRVDLLGRVFDPGPRE

SEQ ID NO: 18567 - protein, 1125 aa, unidentified
  REGION 1..1125: note = Cas Enzyme sequence
VAIGSLQVSALRWRLGLDLGTNSLGWAALSLNSENPPRRDGLLDMGVRIFSDARDPQSKESNAATRRGPRGARRNRGRYLLRRASFLGALIETGLLPADEAGRHALEKTDPWILRARALSEPLTLHEVGRALFHLQQRRGFKSNRLTDRGSDEKGAVESGAERAREEMNARGAETLGELKGRPRQSVQEENRELPKGARRAMPLARVRAESEGSKLAYSYYPLRSMIEAEFDAIWEAQARHHPDAMTDAARLSLRGILSFQRPLKPQPVGRCTFESEEERAPSALPSVQRLRIYQELNNLRVSRHPGEPHLPLTPDERDKLAESALSRPKLSLTQMRKALGLPSTATFSIEAGGRDYLDGDKTHDIITANRKSNGGNWPGWADLLPHEQEALVEVLLGRVAPDKGSHPAVVKTHERVVARIAEGLGLTEDHARQLLEAKDDETLIAFLSERYGLEWSGAARIVSLRLPDGHGRLSRTAGAKILAQLEAPDENGQLRTYDRAVPDAGYGHHSLRGTGEIFERLPYYGVVLEQSVAFGTGDPEDIEEKRIGKLANPTVHVALNQLRKVVNALIDRFGPPEQIVVELSRDLPLGAVEKNRLEKRQRDNRQENKRRAERLTEFGVANNYNNRLFLRLWDELDALGRKCPFSGEHLSQDLLIRSMRGSGELEIEHILPFSRTLDDSFNNKVLALREANRRKGSLSPWEAVARGIFDRETIEHSLRDFPPAKAWRFGPDAMDRFENEERDFLDRQLNDNKYISRLAAQYLRSLGSDVWVINGRLTADLRHHWGLNAVLAGHNRAPADSEAEEVKKNRNDHRHHPVDAFVIACTDRAMVKAAADEARKVEDELAAGRREDRRLLTGIPDPFDGYLLAVKEAVGRIIVSHKPDHGIQGKLHEDTNYGVVRTQTGETRLATRKPITGLTPGEIRNIGDDRIRRELVALTEGLGDKERKQALLEYCERTGHKRVRVHKVQASFERIEHGPDSKGKRHIRAVIPGDNYCMDIVETPDGKWHGVAVSRFQAHKADWQRNWRKVHPDARLVMRVRNGDLIKLDHDGEEKVMRVVRLNPSGNRIYLAAANEAGDYQRRHDDPDDDFRWDLAGIGGLKSRKARLVRVTPDGQLIDRGPPS

SEQ ID NO: 18568 - protein, 1085 aa, unidentified
  REGION 1..1085: note = Cas Enzyme sequence
MAFNTPWRLGIDLGTNSLGWAALKLNSDQTEITGLLQSGVRIFSDGRNPKDKQSNAAKRREPRSARKNRDRSMRRSARLMRELVEYGLMPKDKNARKKLEGGKGIPLEDSDPWILRYRALSEEISPYQFGRIIFHLHQRRGFKSNRKTDRADAESGKVHDATKRTLEKLDAAGARTLGELFGKPRYEAILHNAEAAKGQRKPQPLARVRKSGTGAKWQYDYYPTRTLILDEFKILWEAQKQYHPDLTHSAAYERLSDTIERQHPLKSPPVGKCTLIPTEPRAAKALSSSQCARILQEVNALRLMQTGKAQRSLSLEQRDLIANRLLHPTSKTAKVTFAQLKKLLGLSVYDSFSIETEKRKDLQGDETAAKLMQADRWGPSWFDLDLSTRDDIINELINVEDEEQLVTWLCKTHKLDRDQAYRVADCPLPAGYGNLSQLALAQILPPLFADVTVYSDAVQQAGLGSHSQFGTGEIFDKALPYYGRILDRSVAVTTGEVNDPDEKRYGKVANPTVHVALNQIRAVINDLMARFGAPEQIAIELARDLPLSAKGKSDLEKTQKANQDANDKRRRILDQQGIHDTYENRLRLRLFEDLEALGKRCPFSGEQISLTDLFSDKIEIEHILPFSRTFDDGYANKTLATRKANRDKKNQTPFEAFGHSPDGYNWEDISLRAAELPKNKSWRFGPDAMDRYTNFEGGFIARQLTDTQYISRLAKTYLESIHGGQGYKGAKNRVYVVTGRLTADLRHIWGLNSVLRGHNEPEAEAQRKNRHDHRHHALDAIVIACTDPALLKAAADKAKQNEHIYSGKLMAGLEEPWAGFRTDVEQSIRDIIVSHKPDHGIQAAMHNDTAYGIPKGEAGKADKKGVRTVVTRKPLDSDSFKSPGDLNKIRDDLIRNHLLEETYGLSGTDFKQALLLAAHAMTPPVYKVRIEEKLRVIPFKDASGKDYKAYKGDGNYCYDIWMSEKGKWTGEVISTYQAYQLARTDENWWQTLEGQDGQKLLMRLRKNDYLQIIHNDRQLIVQISQLTQGQIALAEHIEANVDARTRDKNDPLKFIFKSPGSLQKANTKYVTVSPSGVLNIHATGA

SEQ ID NO: 18569 - protein, 1057 aa, unidentified
  REGION 1..1057: note = Cas Enzyme sequence
MSNANRAYRLGIDVGSNSLGWFIVWLSDDGQPIGLGPGGVRIYPDGRDPQSKTSNAVDRRVARGARRRRDRYVKRRTSLMSLLVMHGLMPVEETGRKALEKLDPYALRAKALDETLPAHHVGRAIFHLNQRRGFLSNRKTEKGDNESGAIKLAAGKLQQMMQESGARALGEFLHRRHIVREPVRARNRSSGAKAEYDFYPTRQLLLDEFDGIWKRQAPHHPSMNEEARTAIHSAIFFQRPLKQPPVGKCSLDPATSNDDVEGFRCPWAHPLAQRFRIWQEVRNLAIVETGKPSRPLGKEDGDRIALGLFQNGKLSFDKLRGDLKLPSEARFNLESEKRDHLKGDETAAALAAKKYFGKTWRSFGLERQIEIVTRLLEEVDERTLVEWLVENTGIDEATADRIASAFLPDSHSRLGLRAIRKILPHMESGLNYADAAKAAGYDHALLPTGELSLNGRLPYYGEWLQDDVLGSGDPRDKNDKRWGRFPNPTVHIGLGQLRRVVNALITEHGAPSEIAVEMTRAFKLSPKKLAEVEKAQAENQRKNEKRADEIRSLGQAVNARNLLKLRLWEEQNPYDPLDRRCPYTGEVINIAKLLSDETDIDHLIPFSDSWDDSAANKIVCMRYANRAKGKRTPYEAFGTSPMIDGRRYEWDAISLRAAAMKGKDWRFGPDARQRYDSQGGFQARQLNETGWLARVGKHYLAAVADPYKIHVLPGKLTAMIRGKWGLNDLLPDHNYSDAKNRKDHRHHAIDAMVAALTDRKLLHKMSSAYDDERQKIEIPLPWPTLRADLDAKLKAMTVSHKPDHGMQGQLHEDTAYGAVREPEKEDGANLVYRKSFLALNEKEIDRIRDRRLRGLVQAHVAREKREGKDLKAALQSFGERKDIPGLPNGVRHVRLTKSEKPEYLVALRNKSGKPYKAYSAGENAFVDVFEMPGGKWAGEAMSVFEANQKDAKLGWREKYPDARFVMRVFKGDLISLDYRGQKTIMVAHRLDAAANRFKLAPHNETGNLDERHNETNDPFRWLMASYNTLKGMGAERVRADELGRLWRVKPEEAARSL

SEQ ID NO: 18570 - protein, 1053 aa, unidentified
  REGION 1..1053: note = Cas Enzyme sequence
MKTTASRRYRLGIDAGSNSLGWFVVWLDHNGEPVGLGPGGVRIFPDGRDPKSKESNAADRRVARGMRRRRDRYLKRRGNLMALLIEHGLMPTDETARKALESLDPYELRARALDETLPPHHIGRALFHLNQRRGFLSNRKTEKSDKESGAIKTAAGNLQKVLHESGARTLGEFLQRRHQVREPVRTRNRSTGAKAEYEFYPMRQMLRDEFDAIWNRQAPHCPSMTEEVYETILDAIFFQRPLKQPPVGKCSLDPATDKDDLEGLRCSWAHPLAQRFRIWQDVRNLAVTETGQTSRPLNKVDGDKIALALIQNAKLSFDEIRSLLKLPPEAKFNLESEKRDSLPGDRTADELSKKKYFGKAWRSFPLDRQIEIVKQLEDQPEEEALVAWLVESAGLDKDTAERVASALLPDSHCRLGLRAIRKILPFMAGGMNYPDAAKSAGYDHALLPTGELSPTGRLPYYGEWLQDDVLGSGDPRDSNDKRWGRFPNPTVHIGLGQLRRVVNALIAEYGPPAEIAVEMTRDFKLTPRKLAELEKDQADNQRKNERRATEIRRLGQAVNARNLLKMRLWEEQGTVVKECPYTGETIGIERLLSDDTDIDHLIPFSDSWDDSAANKIICMRHANRFKGNRTPFEAFGTSNGSPYDWSAIVQRATALPNGKRWRFGPDARNHFDKLGGFQARQLNETGWLARVAKDYLAAVTDPSKILVLPGKLTAMIRAKWALNDLLPDHNYSSAKNRLDHRHHAIDALVAALTDRKLLHRMSSAYDEERQKIEVPLPWPALRGDLESRLKVMTVSHKPDHGLQAQLHEDTAYGTIREPEMEGGANLVYRKDFRDLNAKEIGRIRDRRLRTLVEAHVEREGREGKDLKSALLSFAERKDIPGLPNGIRHVRLTKAEKPEYLVPIHDKSGKAYKMYSAGENAFVDILRSPEGRWVARATTVFQANQKDQRPSWQSEGSATGFVMRVFKGDMLRIDHEGRSKTVKIVRLSPSNNVLYLVEHNDAGVFQARHDDPDDPFRWIFANFDRLREWDAKPVRVDELGRLWHVRHEQARHEL

SEQ ID NO: 18571 - protein, 1038 aa, unidentified
  REGION 1..1038: note = Cas Enzyme sequence
MVWLNGEGVPAGLGPGGVRIYPDGRNPQSKTSNAVDRRLARGARRRRDRYLQRRKKLMALLIEYGLMPADEAARKELERLDPYELRAKALDEALPAHHLGRALFHLDQRRGFLSNRKTEKGDKEAGVIKEAAGKLQAAIESEHARTLGEFLYRRHRDRDPVRARNKSTGTKAEYDFYPTRQMALDEFNLIWDAQAPHDPAMTPEARAAIGDAIFFQRPLKQPLVGKCSLSPANDAKDVEGFRCPWAHPLTQRFRIWQEVRNLEITEMGKNSVRLTKDQGDLVARALFQNNKLPFDKIRGLLKLPPEAKFNLESEKRSDLLGDQTAAKLSGKDFFGKTWRSFSLAHQIEIATRLLETEDETRLIAWLTAEAALDSETAACVATVFLPNGHCRLGLRAIKKIIPLMESGMNYPEAAKAAGYDHAQLPTGEQSPTGYLPYYGEWLQDDVLGSGDGRDKNDKRWGRFPNPTVHIGLGQLRRVANELIREYGPPTEVAVEMTRAFKLSPLQLAKLEKEQAENQRKNDARRKEILAQGQADNARNVMKMRLWEELNPKDPLDRRCPFTGEVIGIRRLLSDEVEIEHLIPFQDSWDDSAANKIVSMRYANRAKGKHTPFKAFGDSPTIDGHHYDWDDIAQRAASLPKGKRWRFQPDARDRFNAIGGFLPRQLNETGWLARIAKHYFGAVTGPHRINVLPGKLTAMIRGKWGLNTLLPDHNYSDAKNRKDHRHHAIDAMVAAMTDRSLLHRMSSAYDEERDKIEVPLPWPSLRDDLDAKLKAMTVSHKPDHGLQAQLHEDTAYGAIKEPENEGGNLVYRKPFLTLNGQEIERIRDRRLRALVTAHIDTEKAEGKDLKSALQSFAARCDVPGQPNSIRHVRLVKPEKPEYLVSVRDKAGKPYKSYSAGEIAFVDIFEVHDGNWRGESMSMFKANQKNATMEWPAKFPSARSVMRVFKGDLIALDYNGRRTVMTVRRLEPSLNRIRLAAHNEAGNLDQRHADPADPFRWLMASYSTLKSMNAERVRVDELGRVWRVRPLEASRPAPPA

SEQ ID NO: 18572 - protein, 1060 aa, unidentified
  REGION 1..1060: note = Cas Enzyme sequence
MTKHDFPYRLGLDVGSNSLGWFVVRLDGEGRPVGLGPGGVRIYPDGRDLQSKSSNAVTRRIARGARRRRDRYLKRRTNIMSLLVAHGLMPADLAERKALEALDPFELRLRALDQELPAYHVGRALFHLNQRRGFLSNRKTEKDDSESGAIKEAATRLQAAIEAAGARTLGEFLHWRHRERAPVRTRNRSTGAKAEYEFYPTRQLVEAEFNAIWEKQAQYHPAMTPAARVAIGGDRQVNSIFFQRELKQPPVGKCALDPAHDGGDAEGFRCPWAHPLAQRFRIWQEVRDLTIEHVGRKPVPISKEDGDKVALALLQNNKLSFDKIRSLLKLPSESRFKLESDKRAELKGDETAAKLSHKAMFGKAWRGVSLPRQIEIVERLLAEEDEACMVAWLSVEAGLDHMAAVRVARAFLPDGHCRLGLRAIRKLVPLMEAGNTKYQAEVAVYGKPDATGEVSPTGYLPYYGEWLPDDVLGSGDPHHPKEKRWGRFPNPTVHIGLGQLRRVANALIREYGPPAEIVVEMTRDFKLSPRQVSEVEKEQAENQRKNDARRADLAGLGQPVNARNLLKMRLWEELNPKDPLDRCCPYTGEKISIQRLLSEEVDIDHLIPFSLSWDDSAANKTVCMRYANRAKRKQTPFEVFGDSPEIDGRQYDWEQIAARAAGLPRNKRWRFRPDALKQFEAKGGFQARQLNETGWLARSAKQYLSAVTAPNKIWVLPGKLTALIRGKWGLNNLLPDHNYSDAKNRKDHRHHAIDAMVAALTDRSLLQRMASAYDEERERIEVPLPWETLRDDLDTRLKALIVSHKADHGIAAQLHEDTAYGAVKDPQREGANLVYRKDFRLLNENEVEKIRDHRLRDLVKAYVASEKAVGKDLKSALRSFAVRGDIPGVPNGIRHVRLLKPEKPEYLVSICDQAGKPYKSYSAGENAYVDIIEALDGKWWGKAITVFQANRANGAGGASSPTDPDARLVMRVCKGDLIALHRDGKRVVMRVHRLDAAANRFKLAGHNESGNLDQRHADTADPFRWLMASYSTLKTMRAERVRVDELGRVWRVQAQQPPAR

SEQ ID NO: 18573 - protein, 1072 aa, unidentified
  REGION 1..1072: note = Cas Enzyme sequence
MTASASKPYRLGLDLGTNSLGWFAVWLERDGAAWRPVGLGPGGVRVFPDGRDPQSGTSNAVDRRMARGARKRRDRFADRFFGRRTELIDALIQHGLMPADEKERKALESLDPYELRAKALDGPLPAHHVGRALFHLNQRRGFLSNRKAEKKEDDKGAIKQASTKLKEAMEAEKARTLGEFLWRRHQKRESVRARNIASGPKAAYEFYPTRDLFRIEFDCIWNAQAGHHVAMTDDARDEIARIIFFQHDLKPQPVGKCTLDPAKAPLKEDPEGYRCSWAHPLAQRFRIFQEARNLEIRETGKAGQKLSKEDGDKVALALLQNNKVSFDKIRALLKLPEEARFNLESERRDHLKGDELAEKLANKNLFGKAWRGFMQERQIAVAEKLLGEADEKLLVAWLESECGVDAATAGKIADARLPESHCRLGLRAIKNLLPAMEKELDADGRSGVNYPEAARRVYGDHSKQPTGEILDRLPYYGEWLPDAVVGSGDERSTKEKQFGQFPNPTVHIGLGQLRRLINALIKEFGPPEQIVIELARDLKRSQDEKRDEDARQAKNQKKNDDRKVKLTEIGIINVSGADLVKMRLWEELGELVKLCPFSGRPISLAQLMSSEVEVEHLIPYADSLDNSAANKTVCFTSANRLKGKQTPHEAFGSTPDWPAIAARATTLPGNKRWRFAPDARERLNRDGRDFLDRQLMETRWLSRLAHQYVSAVCDPRQVWVVTGQHTSLFRGKWGLNTLLPDHNFTTAKNRADHRHHAIDALVVALTDRSLLMKLTHGYDIDRDRIKIEPPWNTEKLRNDLEAILKRMVVSHKPDHGYQGKLHEDTAYGIVTNEEKDEKGKSLGNLVYRKALASLTENEIDRIRDRRLRDMVRSHVDAAAKNGVPLAKALLEFRDTVRDPHIKHGLKRVRLVKAEKPEYLVPIKDARTGKIYKSYSAGKNVFLDLIELPDGTWSGEAATFFQANQPTHALQWPAKFPGARLLMRLFKDDLLRIEYEGESRVVRVVRLEPSANRVRLAEHKETGVLQERHDNPDDPFRWIFGQYDRLKEWNAEHVRVDELGRVWRVQPKPLTKN

SEQ ID NO: 18574 - protein, 1088 aa, unidentified
  REGION 1..1088: note = Cas Enzyme sequence
MLSIREEKLKTTAPRPYRLGLDLGTNSLGWFTVWLERDGDGWRPTGLGPGGVRVFPDGRDPQSGTSNAVDRRTARGARRRRDRFVDRRKALMDALVRHGLMPADAKEQKALEALDPYELRAKAIDVTLPSHHVGRALFHLNQRRGFLSNRKAEKKDDDKGAIKQAASRLKEAMAADNARTLGEFLSRRHQHRYSVRARNRSSGAKAEYDFYPTRDLLVNEFEKIWEAQSKHHSSMTPKAHDEIEHIIFYQRPLKQPVIGKCTLDPAARPFDEDPEGYRAPWAHPLAQRFRIFQESRNLEIRETGWSAKKLAKDESDKIVLALLQPTNAKAELPFDKIRSLLGFPSEARFNLESDRRPMLVGDQTAARLSDRKRFGKAWRSLPLDRQIAIVEKLLNEQDEKALANWIEGKCEVDRETAARIADTPLPDGHCRLGLRAIKKLLPHMEAGLGYHEAAAKAGYDHAKLPTGEVLDRLPYYGEWLSDAVVGSGDARDRKEKQFGFFPNPTVHIGLGQLRRLVNGAIKEFGPPTEIAVEFTRALKLSPKEKIEVKREQRRNQDKNTARASELAQLGIEPNPRNLLKMRLWEELNPRDPLDRKCPFTGETISVSRLMSEEVEIEHLMPFKESLDDSAANKIVCVRHANRAKRKHTPFEAFGSSPMIDGFAYRWDGIAARAANLPRNKRWRFDQDAREKFDKMGGFIGRQLNETGWLARLAKQYLGAVTDPYQIWVVPGRLTSMIRGKWGLNSLLPDHNYAGVKDKAEDFLASTDDMEFSGVKNRADHRHHAIDALVAALTDRSLLWKIANAYDETRDRIITDPPWEGLRDELKAALDRMVVFHKPDHGREGKLHEDTAYGFVKEPEKEGANLVYRKPIENLNANEIERIRDRRLRDIVQQHVQSAAANGITLADALRQLHTKPDNSHIKHGLRHVRLLKPEKPEYLVPIKNRSTGEAYKAYSAGENFCVDIYELADGTWDGEAVRRFDANQKEYSSHWRTENPKPRFVMRVHKGDLLRLDHDGQSKVMVVHRLDAAAGRFKLAPHNETGNLDRRHATANEIDPFRWLMASYGTLKRVGATPVRVDELGRVWRIKP

SEQ ID NO: 18575 - protein, 1083 aa, unidentified
  REGION 1..1083: note = Cas Enzyme sequence
MISRPYRLGLDLGTNSVGWFLVWLDHDGERWRPAGLGRGGVRVFPDGRDPQSGTSNAVDRRTARGARKRRDRFADRYFGRRSELMAALVRHGLMPEDAKERKALEALDPYELRAKALDGPLPAHHVGRALFHLNQRRGFLSNRKADNKDDDKGAIKQAASKLKEAMQSEGARSLGEFLRHRHQKRETVRARAHLQGTKASYDFYPTRDLLQAEFNAIWVDQARRHPQMTGEARDEIARIIFYQRPLKQPPVGKCSLDPAAEPFDKDPEGYRCPWAHPLAQRFRIYQEARNLEVGQTGGTKTKLRKEQGDLVALALLQNREVKFDKLRTLLKLPAEAKFNLESERRIALDGDATAARLSHKSLFGKSWRSLDIDRQITIVEKLLSEPDEIALTLWLKGKCDLDPETAERVADTPLPEGHCRIGLRAIKKLLPLMENGLRYDEAAKEAGYDHAKLPTGELLEKLPYYGQWLSDAVVGTGDARDNKERQFGQFPNPTVHIGLGQLRRLVNGLIGEFGAPTEIAIEFTRALKLSPEEKRRVQAEQRKNQELNQKRIEKIREALDNPNFDPSPRDLLKMRLWEELGPADDRHCPYTGEVIGVRRLLSDEMDIDHILPFKMTLDDSAANKTICMRYANRAKRKQTPHDAFGSNPTINGFNYRWDEIAARAAMLPKNKRWRFDADAREQFEKRGGFLNRQLNETGWLARLAKQYLGAVTNPYDIWVVPGRLTSMIRGKWGLNSLLPDHNYAGVQDKADEFLAATDDMEFSGVKNRADHRHHAIDGLVAALTDRSLLWKMANTYDEEREKIEIPTPWDKEKLREDLKSALDRMVVSHKPDHGVQGKLHEDTAYGLVKEPEREGANLVYRKPVEALNENEIGRIRDRRLRDIVRAHVTAEKANGVGLADALRKLPGRFGDPHMKHGLRHVRLLKPEKREYLVPVRDRRTGQSYKAYSAGENFCIEIFETADGEWNGEAIRRFDANQKDYAPRWRGEFPGAKFVMRIHKGDLIRLEHNGKNEIMVVHRLDAAARRLKLAPHNETGNLDRRHTTSNDIDPFRWLMASYNTLRQRGAVPVRVDELGRVWRVQARH

SEQ ID NO: 18576 - protein, 1036 aa, unidentified
  REGION 1..1036: note = Cas Enzyme sequence
GWFVIWLDEDGKPCGLGPGGVRIFPDGRDPQSKTSNAASRRVARSMRRRRDRYLKRRTRLMDQLCEFGLMPLDETERKSLEQCDPYELRAAALDRPLPLHHVGRALFHLNQRRGFKSNRKTDGGDAESGPIKEAVSKLERTMEAEGARTLGEFLWRRQRERRGIRARSNGTATKVAYDHYPSRAMLVNEFDALWTAQAPHHPEMTDDARDALRETIFHQRPLREQPVGKCALDPARDLEDVDGFRLPRAHPLAQRFRILQEVNNLEYGEVGRESIKLDNEQCRMLVLALSERNKLSFDRARTLLNLPEGARFNLESDKRKDLKGDETAAKLSHRDLFGRQWRSMERARQCTVVERLLAAQDENELVAWLRVETGLDKARAQRVSDAALPNGHSRLGHRAIARLLRHMETGLRYDEAARLEYGSHSERRTGEVVDRLPYYGAWMPDAVTGSGDVRDGNLKRWGRLPNPTVHIGLGQLRRVVNALAKGYGQPTEAVVEMTRGFKLSPDEVRRIEREQAENQVKNQERDDIIQSHGHAPNARNRLKMRLWEELNTDDPLDRRCPLTGEMISIRRLFSEEVEIEHLIPFSKSWDDSAANKVVAMRFANRAKDQRAPFEAFGDSPTINGCRYVWEAIAERAANLSRNKSWRFAPDAMQRFEERGGFLARQLNETGWFARLAKGYVEGLTGPDKVWVVPGRLTEMIRAKWDLNSLLPDHNFTDRKNRADHRHHAIDALVAGLTDRSLLQAMANAYDGQRERIMVPEPWEGLREDLGRTLDAMTVSHRPDHAASDKLHEATAYGLVKDPCREDGNLVYRKDLARLSKREVGLIRDLRLRGMVEHHVKRERAKGKSHADALASFNVAHEGHPHVRQGVGRVRILKPEKPEYLVTVGDPEGRAYKAYSAGENAFVDIFETPDGKWHGEATTVFQANRPDHLPRWQDRDEVTFVMRIRKGDFVALDYEGRRQAMVVHRLDASSGRFKLAAQNEAGNLDKRHTDPADPFRWLMASYNPLKKHGAERVRVDDLGRVWRILPEEAVRAL

SEQ ID NO: 18577 - protein, 1035 aa, unidentified
  REGION 1..1035: note = Cas Enzyme sequence
WFVIWLDEDGKPCGLGPGGVRIFPDGRDPQSKTSNAASRRVARSMRRRRDRYLKRRTRLMDQLCEFGLMPLDETERKSLEQCDPYELRAAALDRPLPLHHVGRALFHLNQRRGFKSNRKTDGGDAESGPIKEAVSKLERTMEAEGARTLGEFLWRRQRERRGIRARSNGTATKVAYDHYPSRAMLVNEFDALWTAQAPHHPEMTDDARDALRETIFHQRPLREQPVGKCALDPARDLEDVDGFRLPRAHPLAQRFRILQEVNNLEYGEVGRESIKLDNEQCRMLVLALSERNKLSFDRARTLLNLPEGARFNLESDKRKDLKGDETAAKLSHRDLFGRQWRSMERARQCTVVERLLAAQDENELVAWLRVETGLDKARAQRVSDAALPNGHSRLGHRAIARLLRHMETGLRYDEAARLEYGSHSERRTGEVVDRLPYYGAWMPDAVTGSGDVRDGNLKRWGRLPNPTVHIGLGQLRRVVNALAKGYGQPTEAVVEMTRGFKLSPDEVRRIEREQAENQVKNQERDDIIQSHGHAPNARNRLKMRLWEELNTDDPLDRRCPLTGEMISIRRLFSEEVEIEHLIPFSKSWDDSAANKVVAMRFANRAKDQRAPFEAFGDSPTINGCRYVWEAIAERAANLSRNKSWRFAPDAMQRFEERGGFLARQLNETGWFARLAKGYVEGLTGPDKVWVVPGRLTEMIRAKWDLNSLLPDHNFTDRKNRADHRHHAIDALVAGLTDRSLLQAMANAYDGQRERIMVPEPWEGLREDLGRTLDAMTVSHRPDHAASDKLHEATAYGLVKDPCREDGNLVYRKDLARLSKREVGLIRDLRLRGMVEHHVKRERAKGKSHADALASFNVAHEGHPHVRQGVGRVRILKPEKPEYLVTVGDPEGRAYKAYSAGENAFVDIFETPDGKWHGEATTVFQANRPDHLPRWQDRDEVTFVMRIRKGDFVALDYEGRRQAMVVHRLDASSGRFKLAAQNEAGNLDKRHTDPADPFRWLMASYNPLKKHGAERVRVDDLGRVWRILPEEAVRAL

SEQ ID NO: 18578 - protein, 1037 aa, unidentified
  REGION 1..1037: note = Cas Enzyme sequence
IGWFVIWLDEDGKPCGLGPGGVRIFPDGRDPQSKTSNAASRRVARSMRRRRDRYLKRRTRLMDQLCEFGLMPLDETERKSLEQCDPYELRAAALDRPLPLHHVGRALFHLNQRRGFKSNRKTDGGDAESGPIKEAVSKLERTMEAEGARTLGEFLWRRQRERRGIRARSNGTATKVAYDHYPSRAMLVNEFDALWTAQAPHHPEMTDDARDALRETIFHQRPLREQPVGKCALDPARDLEDVDGFRLPRAHPLAQRFRILQEVNNLEYGEVGRESIKLDNEQCRMLVLALSERNKLSFDRARTLLNLPEGARFNLESDKRKDLKGDETAAKLSHRDLFGRQWRSMERARQCTVVERLLAAQDENELVAWLRVETGLDKARAQRVSDAALPNGHSRLGHRAIARLLRHMETGLRYDEAARLEYGSHSERRTGEVVDRLPYYGAWMPDAVTGSGDVRDGNLKRWGRLPNPTVHIGLGQLRRVVNALAKGYGQPTEAVVEMTRGFKLSPDEVRRIEREQAENQVKNQERDDIIQSHGHAPNARNRLKMRLWEELNTDDPLDRRCPLTGEMISIRRLFSEEVEIEHLIPFSKSWDDSAANKVVAMRFANRAKDQRAPFEAFGDSPTINGCRYVWEAIAERAANLSRNKSWRFAPDAMQRFEERGGFLARQLNETGWFARLAKGYVEGLTGPDKVWVVPGRLTEMIRAKWDLNSLLPDHNFTDRKNRADHRHHAIDALVAGLTDRSLLQAMANAYDGQRERIMVPEPWEGLREDLGRTLDAMTVSHRPDHAASDKLHEATAYGLVKDPCREDGNLVYRKDLARLSKREVGLIRDLRLRGMVEHHVKRERAKGKSHADALASFNVAHEGHPHVRQGVGRVRILKPEKPEYLVTVGDPEGRAYKAYSAGENAFVDIFETPDGKWHGEATTVFQANRPDHLPRWQDRDEVTFVMRIRKGDFVALDYEGRRQAMVVHRLDASSGRFKLAAQNEAGNLDKRHTDPADPFRWLMASYNPLKKHGAERVRVDDLGRVWRILPEEAVRAL

SEQ ID NO: 18579 - protein, 1056 aa, unidentified
  REGION 1..1056: note = Cas Enzyme sequence
MQSKNRPYRLGLDLGSNSIGWFIIWLDDNKMPCGLGPGGVRIFPDGRDPQSRSSNAATRRSARGMRRRRDRYLKRRDRLMEQLIGFGLMPTNEAERKELAACDPYALRASALDHRLPVHHVGRALFHLNQRRGFKSNRKTDGGDHETGPIKEAVGNLEKALETKRARTLGEFLWWRHQARQGVRVRRGGVGQSDVIYDFYPSRAMLEAEFAAIWQAQAPYHPEMTDKARHMLHATVFFQRPLHKQWPGKCTLDPAKEPDDVDGFRLSRAHPLSQRFRILQEVNNLQISEAGQGSARLSPSQCTTLTRTLICQNKLSFDRARAILELPLAMRFNLESDRRRYLKGDETAAKLSHADLFGKQWRALSGSQCCAIVEKLLATQDESTLVDWLMAEAGLDRAAALRVSAATLPAGYMRLGIRAIKRLLPHMEAGLRYDEAAAVEYHSHSEKRTGEVVARLPYYGAWMPDVVTGTGDERDSNQQRWGRLSNPTVHIGLGQLRRIINAITKELGPPREAIVEMTRSFKLSPDRMRELEREQVTNQKKNEQRDQQIADCGLTPNPRNRLKMRLWEELAPDDPMDRSCPFTGEKISYQRLFSDDVEIEHLIPFSKSWDDSAANKVVALRVANRDKGQNTPFEAFGHSPTLGVRHYDWDAIAARAANLPQNKSWRFAPDAMDRFGEENGFMNRQLNETGWFARLAKDYIKGVTGPDNVWVVPGRLTEMIRAKWGLNNLLPDHNFTDRKNRADHRHHAVDALVVGLTDRSLLQAMARVNENSCDQITVPQPWPTLREDLRKKLDSMTISHRPDHAASGKLHAATAYGTAQKPDPTGANLVSREPLTALTDSKIKHIRDVRLRRMITTHVAAESAKGSNLKKALESFNTAYAGDPHVKEGIRRVRVLKSEKLEYLVDVSHGERPHRKVYSAGENAFVDIFKTSDGKWHGEATTVFAANKPCHRPRWRDKDDAFFVMRVRKGDLIILDHEGARQVMVVHRLEAAAKRFRLAAHNQAGNLDKRHADDTDPFRWLIASYSTLKKKRAVRFRVDELGRGWRVSPKEAARTL

SEQ ID NO: 18580 - protein, 1056 aa, unidentified; identical to SEQ ID NO: 18579
  REGION 1..1056: note = Cas Enzyme sequence

SEQ ID NO: 18581 - protein, 1078 aa, unidentified
  REGION 1..1078: note = Cas Enzyme sequence
MHGGVPRAYRLGLDLGSNSIGWFMVMLDTTESRRKPVSLGPGGVRVFPDRRDRHSGSSNAVDRRAARGMRRRRDRLLARQKALIAALTEHGLMPTEENQRKALEALDPYELRSAALNEPLPLHHLGRAIFHLAQRRGFLSNRKAERKDDEKGAIKEAAAKLRKEMEKVSARTLGEYLWARHRQRKSVRARNIATGSKADYEFYPTRALIEAEFNAIWEAQAAHHPMNREARDAIHRTIFFQRPLKQPPVGKCSLDPATQPFELDPEGYRVSWAHPLAQRFRILQEVRNLDVGETGGPRRRLTKEEGDTIALALLQNDKVSFDKMRVLLKLPAEARFNLESERRTELKGDETAERLAHRSRFSKAWRNFSLDRQCTIVERLLAGADEEALVDWLQTECKIERAVAEEITDAPLPESHCRLGLRAIRKLLPHMDAGLNYPDAAKAAGFDHSKQPTGEMLGRLPYYGRWLPDAVLGSGDPRDLKEAQFGRFPNPTVHIGLGQLRRIVNDLIDDWGEPTEIVIEFTRSLKLSPDEKKDLLREQRQNQAKNAERIAKLRETLGQAEFDPSPRDLLKVRLWEELNPRDPLDRKCPFTGETIGLKRLMSHEVEIEHLIPYQLGLDDSPANKTVCLAEANRAKGRLTPFQAFSSSPTIAGIHYDWEAIIQRATALPRNKRWRFDPDAHEKYKEMGGFLGRQLNETGWLARVAKQYLSAVCDPNAIWVVPGRLTATLRRQWGLNSLLPDHNYGGVQERDETFRAATDELEFSGVKNRTDHRHHSIDALVVAMTDRSLLQRMASSYDDRRDKIDVQEPWQGFRDQVKSRLNQMTVSYKPDHGRQGKLHEDTAYGLVKEPEKEGANLVRRKDLVALTENEIDMIRDRRLRDMVRGHVTKAREAGVDLASALRSFRDNVRDPHIANGLRRVRLLKVEDSEYLVPIANRSDGTVYKTYSAGENFCVEMYEMPDGRWRGEAIRRFDANQSSYQPRWRKLHPDASFVMRVHKGDLLSLDHDGKRQVMVVHRLDAAAGRFKLAAHNETGKLDRRHAAANDIDPFRWLMASYGTLKKAGAERVRVDPLGRIWRVR

SEQ ID NO: 18582 - protein, 1087 aa, unidentified
  REGION 1..1087: note = Cas Enzyme sequence
MQMAAGGPGGRSLGFALLVKEKSQMATRLGLDIGTNSIGWCLIEDDTRIIDLGARIFSDGRVPKSGESLAVGRRMARGMRRRRDRYLGRRSAFLDALVTYGLMPADKAEARKVAELDPYYHRVRALDEKLEPYEIGRALFHLNQRRGFKSNRKAERREGETDGKIASGAKALDAAMEESGARTLGEFLYRHDTKRVRMGGENKDYDFYPQRHHIEEEFQAIWEKQAEYHADLLNGPARAAIHRILFYQRPLKEQIVGVCTFLTDEKRLPKAHPLFQERRLYEEVNHLEITTPGETSRKLTLDERDRLVRELREKKTIAFSSLAKKLKLDTGQSFNKASESRTHLAGNEIYATMSNKKLFGNRWAHFDIDRRWLIIDRLLSEENPETLRSFLADECELDKDQIVEAEKAAHRLPEGHGRLGPTATLLILEELKSEVITYDEAIRRVAEKDRRFKHHSDFRTGEILPKLPYYGELLTREIPPGTQDPADPPEKRWGKITNPTVHIGLRQVEKLVNAIIRVHGRPDEIVVELGRELKLNEQQKDDFNRRIRDNTRAAEARSAKLIEEGFPDTGANRMLLRMWEELNPANPLDRRCPYCGERIGMRALFSSEADVDHILPYSRTLDDSVSNKIVSHKNCNRQKGNKTPYEKWGETERWDTITEQVARLHKGKQWRFQPDAMERYEGEKDFLARQLTDTQYLSRMTGKYLSSLYADASEGSVYVLPGRMTAMLRRLWGLNSLLPDHNFVENEHSNAPRNRLDHRHHAIDAAVIAVTTRALLNEIAHAAGRAESDDLDRMFKDLPQPWEGFREELGEKILKVTVSHKADHGRKGQPSKHHDITAAQLHNETAYGLTGDYAADGKTPIVVHRIPLSSLKPGDLTNPERIPDETLRDALYRATEGLTGKEFEKALAEFSEKGWQPDKNGKPVFKGLRRLRVREPLSVILITDKSGRAYKGYKGDSNARFDVWRLPGGKWVSDIVSMFDAHQTGEDDRRPHPAAKKILSLRQNDMMAIEHEGNPALIVRVVKFSGNGQIALAADNEAGALKARDAAPKDEDPFKYILSSAGGLKKRKARQVRVDPLGRVFDPGPRE

SEQ ID NO: 18583 - protein, 1105 aa, unidentified
  REGION 1..1105: note = Cas Enzyme sequence
MAGWTTTLGLDLGTNSLGWAIIETRGEPGETYEGRIVASGVRIFSQSEMAGRDSQSKASLAVARRQARGARRRRDRYLKRRQRLVDLLVDLGLMPADKAARAELVKNHGDGKTGDLSSSVYALRARALDEALSPHEIGRAIFHLNQRRGFKSNRKADSNDPEQGVISEGMRALDEKMAEAGARTIGEWLHMRRLQGLPVRARIAPDGEGYAFYPSRGALEREFDRIMARQTLFHPDLLTDAVIRELREVIFHQRPLRPVKPGKCSYNPLEERLPKAHPLFQKFRLLKELNELEIVGEDQKHIKLTPDERNALALQLRTNLNRQGKVPFSKLRNTLKLGREVRFNKETDNRSDLEGDVISFRLSRPECFGNRWADLPLEMQAAITEKLRTEPDYNILMNWLKTEAGLDEAHARAVADTPVPDGFGRLGQSALTALIDALENEVGEGGFVITETEAAKRVYGRTNSEADPNRKGVDQLPKYQEVLARHIPPGTGEPDDPYDDFMGRITNPTVHIALNQLRRVVNALIRTYGKPDRIAIEVGRELKMNDRERDEVNRRIARNTKAAIERGVKLTETFRQLDTGYNRLRLELWEDLNQKPENRVCIYCGKAIAGHMLFNGETDIDHILPYSKTLDDSKANRILCCTSCNREKKNRPPSSVPQWRGRYEEILARVTTLPKNKQWRFGEDAMARFGEEEGFLARQLTDMQYISRLALTYLAHLYDYEEVDLDGIYKRHARVRALPGRMTEMLRRQWSLNELLHGHNLIGADMAKPKNRLDHRHHAIDAIVIACTSRALIQRLATASAAAEERGAERVVERIDPPWSSFREDVRAAVSAIVVSHKPDHGTVSREGYAKGRGQTAGKLHNDTAYGHTGEKDASGTDIVVRRIAITDIRSPADIMKIRTNAHGHSELRDRLYEATRGLEGKAFEQALLDFVKGDAKFRGIRHVRITEVANPVWITHGGGRHKKGYLPGGNDRFDVWELADGRWDAEVVTTFDAHRPGFVPRMRLENHNARKIMSLKKGDMVAYDEPDSGKRIIAIVRKFDQRNKQLYLDPHNEAGDLDRREKEKTYKPLRPRPNPLKKYKPRQVRIDEIGQVLDPGPWWEKQGD

SEQ ID NO: 18584 - protein, 1050 aa, unidentified
  REGION 1..1050: note = Cas Enzyme sequence
MVMRRLGLDIGTNSIGWCLVEDEGESSQIVDIGVRIFSDGRDPKSGASLAVDRRAARAMRRRRDRYLRRRAAFLKALKQYGLLPAQENEAKLLADRDPYELRARALNERLDPYEVARALFHLNQRRGFKSNRKAERKSKDSEDGKIASGAKALDQAMAESGAETLGQFLAGRDTKRVRMGSDAQGYDFYPQRRHVEYEFDTIWQRQRPHHPALLTYEAKAALHRILFFQRPLKEQDVGVCTFVHSERRIAKAHPLFQERRLYEEVNQLEITTPGEPSRKLKLDERDRLILKLRGVKAASFDSLGRLLKLEPGQSFNKASETRTQLAGDEVHAVMADRKRFGDRWVHLSRDEQWTVVERVMEEEDPDALHAWLVGQWGLSKEQADAVGRANLPEGFGRLGPTATARILDELKKDVCTYSEAVERCGWHHSDDRTGEILARLPYYGELLTREIPPGSFDPADPPEKRWGKITNPTVHIGLRQLEKLVNAIIDVHGRPDQIVVELARELKLNEKDKEEHNRRIRRDTAAAESRGRKLEEEGVSNTGANRALMRIWEELNPANPIDRRCPYCGEPIGMRMLFSGEADIDHIIPYSRSLHDSAGNKVVAHRSCNRAKGNRTPYEKWGHDPERWGIISAQAARLHKSKQWRFGPDAMARVEKDGGFVARQLTDTQYLSRLAGCYLASLYPTKEEGSVYVIPGRMTAMLRRLWDLNSLLPDHNYGAVENRHSNAPKNRLDHRHHAIDAAVTAVTTRSLLMEIARASASAEDKDLDRLFEDLPQPGPKFREQLYDKLQRVTVSHKPDHGRKGLPPKSRDVTAGRLHNDTAYGLTGETAADGKTPIVVHRVPLASLKPADISNSDRIADPVLRAELHRATDGRAGKDFEAALAKFGKERNVRRVRVREPLNVIPIRNKQGRAYKAYKGDANARFDVWRLPNGRWVADIVSMFDAHRRDAADRRPHPAAKKMLSLRQNDMLAIEKDGAERQLVRVVKFSTIGTIALAAHNEAGALKARDAAPNDLDPFKYILSSAGGLKNLKARQVRIDPLGRIFDPGPR

SEQ ID NO: 18585 - protein, 1061 aa, unidentified
  REGION 1..1061: note = Cas Enzyme sequence
MKRLGLDIGTNSIGWCLIEDDARVIDIGVRIFSDGRDPKSGASLAVDRRAARAMRRRRDRYLGRRAAFLKALKRYGLLPADESAAKLLADRDPYELRARALDERLEPYEIGRTLFHLNQRRGFKSNRKAERKTKDANDGKIASGAKALDLAMAESGAETLGQFLAGRDTKRVRMDSAAQGYDFYPQRRHVEYEFDTIWARQQPHHPALLADEARDALKRILFFQRPLKEQEVGVCTFRHDERRLPKAHPLFQERRLYEEVNQLEITTPGAPNRKLTMDERDRLIMILRDKREVGFSTLAGGKGLKLQPGQSFNKASESRTGLKGDEVYAVMADKKRFGDRWPHLDRDRQWAIIERIINEEDPDNLHAFLTGECGLTEEQATATARAPLPELYGRLGPTATARILDELKKDVITYDEAVRRAGWHHSDDRTGEILPQLPYYGELLTRDIPPGSQDPNDPPEQRWGKITNPTVHIGLRQLEKLVNAIIKVHGRPDQIVVELARELKLNEKDKEEHNRRIRRDTAAAQLRSAKLQGEGIPDTGANRMLLRMWEELNPGEVLDRRCPYCGGQIGIRQLFSEADVDHIIPYSRSLDDSVGNKVVAHRNCNRIKGNKTPYERWGHDEERWETIAAQVARLHKSKQWRFGPDAMERVEKDGGFIARQLNDTQYLSRLAGRYLSSLYPTKEEGRVYVVPGRMTAMLRRLWALNDVLDDHKIVENKNSNAPKNRLDHRHHAIDAFVVAVTSEALLHAIAKAAGRAQDKDLDKMFEGLPEPWPGYLPELRAKLLTTVVSHKPDHGRKGVPAKNHDVTAGRLHNDTAYGLTGDVAADGKTPIVVHRVPLMSVKPADISDPDRIPDPELRAALHRATDGLSGKAYEAALAAFAKAHPQFAGIRRVRVREPLNVIPIHDGNGRAYKAYKGDANARYDVWQLPNGKWTHEIVSMFEAHQRPQELTDEEKAAGKKVQPKRPHPAAKKVLSLRQNDMLAIERNGGAPEIVRVVKFSTIGAIALAPHQEGGALKARDAAPQDVDPFKYIYSSGGGLKNLKARQVRIDPLGRIFDPGPR

SEQ ID NO: 18586 - protein, 957 aa, unidentified
  REGION 1..957: note = Cas Enzyme sequence
MFMRRLGLDIGTNSIGWCLVEEEGESSRIVDIGVRIFSDGRDPKSGASLAVDRRAARAMRRRRDRYLGRRAAFLQTLKRFGLLPADESEAKVLADRDPYELRVRALDERLEPYEIGRALFHLKQRRGFKSNRKAERKSKDNEDGKIASGARALDQAMAESGAETLGQFLAGRETKRVRMGSDAQGYDFYPQRRHVEHEFDTIWERQRPHHPALLTDEAKAALHRILFFQRSLKEQEVGVCTFVHSERRLAKAHPLFQERRLYEEVNQLGITTPGEPSRKLKPDQREKLILKLRGVKAASFDSLGKLIKLEPGQSFNKASETRTQLAGNEVHAVMADKKRFGDRWPHLSRDEQWTIVERVMEEEDPDALHAWLTGEWGVSEDQAAAVARAQLPEGYGRLGPTATARILDELKKDICTYSEAVERCGWHHSDDRTGEILARLPYYGELLTREIPPGSFDPADPPEKRWGKITNPTVHIGLRQVEKLVNAIIDVHSRPDQIVVELARELKLGEKEKEEHNRRIRRDTAAAEQRGRKLEEEGFSNSGANRALLRIWEELNPANPIDRRCPYCGQPIGMRALFSGEADIDHIIPYSRSLDDSASNIPGRMTAMLRRLWDLNSLLPDHNYGAVENRHSNAPKNRLDHRHHAIDAAVTAVTTRGLLMEIARASARAEDKDLDRLFEDLPQPWSGFREELHDKLQRVTVSHKADHGRKGLPAKSRDVTAGRLHNDTAYGLTGTVAADGKTPIVVHRVPLTSLKPADISNSDRIADPLLRADLHRATDGRSGKDYESALAKFAKDRNIRRVRVREPLNVILIRDKAGRAYKAYKGDANARFDVWRLPNGRWVADIVSMFDAHSRNSADRRPHPAAKKMLSLRQNDMLAIEKDGAERQLVRVVKFSTIGVIALAAHNEAGPLKARDAASNDLDPFKYILTSAGGMKNLKARQVRIDPLGRIFDPGPR

SEQ ID NO: 18587 - protein, 1056 aa, unidentified
  REGION 1..1056: note = Cas Enzyme sequence
MAYRLGLDIGTNSVGWTALTIDADGQPNGVLGQGVRIFSDGRNPKDGSSLAVQRRVPRGMRRRRDRYLDRRDDLMEALIAVGLMPPDEAERKGLETLDPYEFRAKALHDPLTPHELGRALFHLNQRRGFKSNRKTDKDADNSKIQPKIDELRHRISQSGAMTLGEYLHKRRLKGKMVRARPEAGFYPDRALYEDEFNFIREGQTPHQSLRPEQWDQLEDIIFYQRPLKPVDPGWCLLEDGERRAHRALPLAQEFRMVQDANNLRILVPGEPAKRLTQEQRDRMLKDLRTKKELKLEQFVKLLKLPSGARINLLDENRKVLKGDETASRLKDLFGKTWPDMKIARRTEIVHTLIETEKAEDIQRIAQAEWGLDELAAKKLATTSLPEGYARLSEKAITKLLPIMEEQGLNYSEAVAEVPEYGHHSDFRPDAALDTLPYYGAILTRQVVGGDVTKPKDDAVAHYGRIANPTVHIGLGQLRRVTNALVKVHGKPKEIVVELARDLKMNKEEKDNARKTNRENEIKNRRREEQIVASGGILSAHLQRKLRLWEEQVFGSINVCPFTGDPISFALAISDATEIEHILPFSKTLDDSMANKVLCLREANRAKRDRSPHDAFYSNPKIGKYQYDYAAILLRAEALPPNKRWRFHVDAMERFVNEKEFLDRQLNETKYLSRIARTYLAHLYNEKAEGRLCVRAIPGRLTAMLRGKWGLNALLGDHNRAGGDASDGPARKNRDDHRHHAIDAFVIAMTDQRLLKAISDLNSEADRKRLIESVPLPWDGFTPDALRPHLERIVISHKPDHGALGDKSKTTGSLHNDTAYGLIAPGKRGNWKVVSRSALKGVTKKAELEGIRDSALRAALETLWDDVEKSGGKPGDFAKRAEEEGVVLGGRKMKVRRARMTEELNVVQIKDRKTGKPYKAYKPDGNAFADIYQLPNGRWTAVVVQRFDANQPDFDPVTFRPHPAAKKIIRLHIDDMVALEDGGRRRILRVVKMSGQTITMADHLEGGALKARDADKNDIFKYTSRSASGLKDVGFRKVGVDEIGRLTDPGPRKSSAR

SEQ ID NO: 18588 - protein, 1088 aa, unidentified
  REGION 1..1088: note = Cas Enzyme sequence
VSTHPPRTYRLGLDLGTNSLGWFVVWLERRGDHWQPTGLGAGGARVFPDGRDPQSGTSNAVDRRAARSARRRRDRFADQYFGRRTELMEALVRHGLMPADTKERKRLEALDPYELRANALDSPVPAHHIGRAIFHLNQRRGFLSNRKADKKEDDKGAIKQGAGRLKEAMRSEKSRTLGEFLWHRHRKREGVRARNTASGPKAAYDFYPTRDLLKFEFDAIWVAQAPHHPSMTDAAREEIDHVIFNQRPLKQPPVGKCSLDPATEPFEKDPEGYRCPWAHPLAQRFRIYQEVRNLEVGEAGRTMTKLTKEQGDIVALALIQNKEVKFDKLRTLLKLPAEAKFNLESERRVVLDGDETAARLSHKALFGKTWRGLDVDRQIAFVEKLLSEPDEIDLVRWLEGKCDLNGETAEKIADAALPDSHCRLGLRAIKKLLPLMIAGLGYHDAAAAAGYDHAKLPTGEVRDKLPYYGEWLSDAVVGSGDRRDTNEKRFGRLPNPTVHIGLGQLRRLVNGLIDEFGPPTEIAIEFTRALKLSPQQKADYQRDQHRNQEKNAARAKDLAEHGLPATPRNLLKMRLWEELNPRDSLDRKCPFTGEQIGLARLMSDEVEIEHLAPFKESLDDSAANKTVCMRYANRAKRKQWPFKAFGSNPTIDGFTYRWDEIAARAALLPKNKRWRFDANAREQFEKRGGFLNRQLNETGWLARFAKQYLGAVTNPYDIWVVPGRLTSMIRGKWGLNSLLPDHNYAGVQDKAEDFLAATDDMEFSGVKNRADHRHHAIDGLVAALTDRSLLWKMANAYDDERERIEIPTPWDKEKLREDLKAALDRMVVSHKPDHGIQGKLHEDTAYGFVKEPEKEGANLVYRKPIEALNENEIERIRDRRLRDMVRAHIAAEKANGVALADALRKLHAKTDDPHIKHGLRRVRLLKPEKPEYLIPVHDRRTGAPYKAYSAGENFCVEIFETADGKWNGEAVRRFDANQDGHGPRWRQEHPHAKLVMRVHKGDLIRLENGGKSEIMVVHRLDAAARRFKLAPHNDTGNLDRRHATDNEIDPFRWLMASYGTLKSMGAIPVRVDELGRAWRIQTEALTKA

SEQ ID NO: 18589 - protein, 1049 aa, unidentified
  REGION 1..1049: note = Cas Enzyme sequence
MKKETNRPYRLGLDVGTNSLGWFMVWLNEAGEPIGLGPGGVRIFPDGMTNDKKASNAAERRLARGQRRNRDRYLERRRTLMSTMIDGGLMPKDEAARKALVDLDPYDLRARAITEKLPLHHIGRALFHLNQRRGFKSNRKSDGANDEKGAIKEASSRLREAMAAANAQTLGVFLNGMHREREGVRVRNTSSGNKATYDFYPTRDLLVDEFEAIWRQQSKHHSQLTDTVRERVCDTIFFQRPLKSPPIGKCTLDPAQNPGDADGFRLAKAHPLSQRFRIWQEVRNLTVGETGSTPRDLTKEEADTIALALLQSNAVTFDKIRKLLRLPEGARFNLESERRKELLGDQTAKRLGAKKLYGKTWRGFPLERQIEIVERLLSEQNEEALIEWLVFETGVDRDLAEQIADAPLPDGYGRLGHRAVAAILPYMQAGMRYHDAALAAGYDHAKAPTGEILDRLPYYGEWLQDQVIGTGDHRDKKEDRWGRFPNPTVHIGLGQVRRVVNALIKKYGPPEQIVVELARNLKNSKKQKDEIEKQQKSNQRKNDRRRDQIKAAGHNVNHDTLLRMRLWEELNEDDVLDRRCPFTGEVISIKRLFSPEVEVEHLIPFQTSWDDSAANKTLCLRDANRAKGKKTAHDAFGHSPMINGRAYDWVEISARAANLPGNKKWRFEPDADKRFEEQGGFLARQLMETSWLARLTRHYLSCVTNPNEVWVIPGRLTAMIRGKWGLNSLLPDHNFKNAKNRADHRHHAIDAVVAGLTDRGLLQGMSRAYDDARDKIEVPLPWETFRDDLDAVLKRMIVSHKPEHGREGKLHEASAYGLNRHQQEGEGNLVYRKALTDLNGSEIARIRDDEIRTTLQAYIDENKTEGQKLVEVLAAFGNRTDLPFAPHGIRHVRLTKKEKLEYLVPIRDKEGAAYKAYSSGENLFVELYETSDGKWHGEPVTVFQANQKGFKPRWHSQFPEAKFIMQIYKGDLLRLEREGESQIFKVYQLEASANRFKLALHNEAGSLGTRHNDPDDPFRWLIASYNPLHTMGAQKVRVDALGMPWKHQP

SEQ ID NO: 18590 - protein, 1075 aa, unidentified
  REGION 1..1075: note = Cas Enzyme sequence
LFLQLEVGIMLRLGLDIGTNSIGWCLIEYDKTHPIGQRIVDIGVRIFSDGRDPKSGASLAVDRREARAMRRRRDRYLGRRSAFLETLIHYGLMPQDQDEARLVAEKDPYILRKMALDEALTPHEIGRALFHLNQRRGFKSNRKADRTSKDGEDGKIATGAKALDAAMTEANARTLGEFLAGRTEKRVRLNGESQSYDFYPQRRHIEAEFTAIWEAQAAHHAQLLTPEARDALSRVLFFQRPLKAPEVGYCTFAGMNGVPADERRLPKAHPLFQLRRLYEEVNNLRIVAPGEADRPLTRDQRDTLILKLLDKKMVSFDALAKAIKLPEGERFNKDSENRKALIGDEVRAEMADKKRLGNRWLHLSLEDQLRLIDHIQNEEDPDALHAWLQAEFHLDQATAEAVAGARLPEGYGRYGETATRRLLEALKSDVLNPKEASKKAGFDRRNEDSEEVRVLPYYGQLLTREISPGKQEYGDADERRYGKITNPTVHIGLRQLQKLINALIAVHGRPDEIVVELARELNLSEEDKKKHEQRIRKDTQAAIARGEKLEQEGFANTGANRALMKQWEELNPSNPVDRRCPYCAEPISIHMLFSGEADIDHIIPYSRSLDDSAGNKVVAHRHCNRAKGNKTPYERWGHDEDRWEMISNQITRLHKSKQWRFGPDAMERIEKDGGFIARQLTDTQYLSRIAAKYLSSLYTLDEGRRVYVATGRMTSLLRRVWGLNSLLPDHNFVENEHSNAPKNRLDHRHHAIDGAVMAVTTRSMLQKIATAAGRAENLDLDRLFEGLEPPWEGFRDQLRDRLMAVTVSHKPDRGRKGKPSKHRDVTAGRLHNDTAYGLTGQVAADGKTPIVVHRVPFMSLKPADIADPLRIPDETLRTALWEATRDLSGKAFEQALAAIARDGIDKRDKNGNRLFKGLRHVRVREPLTVIQIRDKAGKPYKAYAGSSNDHYNVWRLPDGTWQHRVVSTFNAHQKDYTDARPHPAAKKVLCLRQDDLIAVERNGKPREIMRVIKFTLNGQMALVPHNEAGKLAERHKNPDDGLEIINPTVSGLRKMKARQIRIDPLGRVFDPGPRE

SEQ ID NO: 18591 - protein, 1109 aa, unidentified
  REGION 1..1109: note = Cas Enzyme sequence
MGLRFSFDIGTNSIGHAIWRTGHDPAGVFGEDAPLELLHSGVRVFKDGRNPKDGKSLAEMRRIPKSARIRRDRFVKRRGALIDALVGSGLMPADGKARKELEALDPYRLRAEGLDRELSLHELGRALFHLNQRRGFQSNRKADRRQGKDDDKGKIATASKALAERLEAENARTFGEFLWRRQRGQAGDPARPRDPGRKPTRIRLEGEGAKALYAFYPTRWMLKNEFDQLWAKQALFHPEVLTDALRGQLRDHVIFYQRDLKPPKIGWCTVVEGEQRLPKALPSVEAREVYERLGHLRLFTPSGGERPLTVAERNAVVSVLLYEPKLTFKKLRTALRLGSDVTINFEEAGEKDLKGSLTAARLVKPDHFGPAWRTLSWNGRDAFVRLLLDEADEDRLIRRLMQEYKLNDAQARECAGVPLADGYSRFGATANAAILDALVSESDDGGFVVPYSEAVRRAGVKAGFAWHHSDERDGVILDTLPYYGATLQRHVLPGSFDPVDRRDEARYFGRISNPTVHVGLNQLRKVVNTLIAMAWEQGWSADGHPDQIVIELARDLKLSHEKKDRLAVENRRNREANEKRRELIGEVATNNNERAEDLDTPVNRVKLRLFEEQKTAGDGVALCPFSLRPIPITRLFSDEIEIEHLLPWSRSLDDSMPNKVVCYRDMNRLKRGRTPHEAFSGDARWAEIEANAATLPKNKRWRFGSDAMDRFDEAALGRIDRREREAMGLGSGFLARQLNETKYLSRLARAYLGRICDPDAIYVTPGTLTGLLRGKWGLNTILDAGNVKNRDDHRHHAVDAAVIGAMTRGLINHLAHEAARRETSDFESALERIPWPFEDFREAVRRGIDAIAVSHKPEHGKGGALHEDTAYGLVHSDKEAASIGNLVRRKPVVDLTVKEVDAIRDPTLRATAQAAVAGFRDDKGKLRKGEEKAFAAALAEFAAAQSMRRVRVGKEDRSVVAIADRRTGEFYKAVVPGENHHIDIVALRDGTWRGFAASVFEVNQKGWRPEWERDKIGGKLVMRLHKGDMVEIDDKDGVRRIKTVVRISPSNGVLYLAAHNEGGDFQKRHDDTDDAFRWDFAGIAGLRDRNCVAVTIDPAGRVIRRASNV

SEQ ID NO: 18592 - protein, 1072 aa, unidentified
  REGION 1..1072: note = Cas Enzyme sequence
MAGYRLGIDIGVNSLGWCAFALDGEDRPAGILGVGTRLFTDGRDPKTGTSLAVDRRRARGLRRRRDRYLLRRADLVKALVRHGLMPDTAEARKELERLDPYELRARALDEEIPLHEFGRALFHLHQRRGFKSNRKTDKAADKDAGKIKVAVSELRARINETGTRTLGEYLFRFHKENAPIRARLRGEGAKAAYDMYPERAMLEAEFERLWESQSRFHRELTDAARDDVRRIMFRQRPLRPVDPGKCALDPSDQRAPWALPDAQRFRILQELANLRTLSPDFTERFLTVDQRDTLLAALEQKPKLTFKAMRRLLKVQTDGAFNLESERRDHLLGNETNVALAKKGRFGGRWRELPADKRDEIVETLLAEADEDRLLAIAQERWGLDAEAAQAVADAPLPDGYVRLGRRALSRVVPAMLSESVEVTDPGTGEVFRAPITYDRAAVVAGYHHSDHRPGELLSALPYYGEALERAVAFGTGDPADPDEVRYGRIANPTVHIGLNQLRRFVNSLIEAHGAPAEVVVELARELKLSAKRKKEIDKLQGDNTKANQQRKQKLTELGLPDNPQNLLRLRLWEELAPEPHDRRCVYTGAVIAPNLLFDGRTDIDHILPFAKTFDDSAANKIVCIAGANRDKGRRTPYEAFGHRADWPEIAARAESLPKNKRWRFAPDALDRLKLKARGDLPAEALADMELAGGFLARHLTDTQYLSRLVREYLGHVCRSERVWVVPGRLTALLRAKWGLNGILSDSNLKNRADHRHHAIDAAVVALTDRSTLQKVASAAEDSRNRVLERLDEPFAGFREELRNMVFASVVSLRPDHGTGGRLHEDTGYGIVADPGAEGGFTLVSRKAFSELNENEVARIRDPYLRARVVAHVDAAKAAGGGKLSKPDLKKALAEFAETDAEYGPRANGRRGIRRVRLGKVEADFLVMRDGDGRPYKALVPGENHHVDIWQLPDGTWQGVAVSVFEANRPNGGGDKRPHPAARRIMRLHKGDFLKLEHDGIERVMRVVRLEQKAGRLRLAEHHEAGNLQERHDDNEDPFRWAFVQFNHLRSRHARKVQVDMLGRVRDLGPPP

SEQ ID NO: 18593 - protein, 1067 aa, unidentified
  REGION 1..1067: note = Cas Enzyme sequence
MNTNEQRPYRLGLDLGTNSLGWFVVWLQKDSAGWHPMGLGPGGVRVFPDGRDRQSGTSNAVDRRMARGARKRRDRFVDRRNRLMEALVRHGLMPPTEMEQKALETLDPYELRAKALDEALPAYHVGRALFHLNQRRGFLSNRKAEKNEDDKGAIKQGATRLDQAMEADNARTLGEFLWRRHQRRESVRARNIAAGPKAVYNFYPTRDHYRREFDAIWDTQAKCRSSMTSDARAQIENEIIFFQRDLKQPPVGKSSFDPATAPYEKDPEGYRCPWAHPLAQRFRIFKEVRNLEIHETGKAGKKVAKEDGDKVALALLHNNKVSFDKIRALLKLSQEAKFNLESERRDHLKGDELAERLANRNLFGKAWRSLPLDRQITIAEKLLGEPDEKTLVSWLQGKCGLDAATADKVANAHLPDGHCRLGLRALKKLRPIMENDVADDGCSGVQEHDAVRRIYGDHAKLPTGEILDRLPYYGEWLPDAVVGTGDDRSKKEKRFGQFPNPTVHIGLGQLRRLVNALIKEFGAPEQVVVELARDLKRSQEEKREEEARQAKNQEKNDERKMKLAEIGIINVSGADLMKMRLWQELGDIAKTCPFSGRPISLTQLMSADVEVEHLIPYSDSLDNSAANKTVCFTSANRLKGKQTPYEAFGSTPEWPAISARASTLPSNKRWRFAPDARDRLKRDGRDFLDRQLMETRWLSRLARQYMSAICNPNQVWVVTGQHTGLIRGKWGLNTLLPDHNFTTAKNRADHRHHAIDALVVALTDRSLLQRIASVYDDKRDRIEVPLPWRTLRDDLNAALKRITVSHKPDHGHQGKLHEDTAYGAVKQEEKDDHGKSFGNLVYRKPLAALTHNEIEKIRDRRLRDMVRAHVDAAAKNSVSLTKALLDFRDNVRDPHIKNGLKRVRLVKSEKQDYLVPVKDARTGAVYKSYSAGKNVFIEIFEHPDGTWHGEAATFFQANQLSYTLQWPTEFPSSRRVMRLFKDDLVRIEYEGETRIVRVVRLEPSANRVRLAEHKEAGALQDRHDNPDDPFRWIFGQYDRLKEWKAERIRVDELGRAWRIQSEALTKH

SEQ ID NO: 18594 - protein, 1067 aa, unidentified; identical to SEQ ID NO: 18593
  REGION 1..1067: note = Cas Enzyme sequence

SEQ ID NO: 18595 - protein, 1091 aa, unidentified
  REGION 1..1091: note = Cas Enzyme sequence
VSIFLETIFKEFLSMRYVLGLDLGETSLGWSVIETKDGTPFRFVDFGVRIFSDGRDAKTKEPLAVARRTARGMRKRRDRFVMRRETLMNRLIKYGLMPADEAERKVLVNDVKNNKERNDQYNPYFLRAKALDEQLTPYELGRALFHINQRRGFKSNLKTDKNDKEAGAMKEAIKETRQRMTEAGARTLGEYLYLLNKDKASTQDFVPVRAKSVVIKGKASYPLYPDRAMYEDEFRQIMAKQGLLKEIEDDLFHVIFDQRPLKQPEIGFCQFEEGERRAYCAFPAYQQGRLLQQINQLKILYDDDERFLTPEERAVLYRYGAHDFSALDKKKKLLTWAAAKKLLKPFGVNPKVSFNLESEKRKGLDADTTAAQLSDEKCFGAAWFSFDKTKQNEIVALLLNAQDESELIEELKDKYALSPEQAEAVAQVSLEDGTASLSLKALEKINPFLLQGQPYHQAVESAGYTFSLKTKDKLPEYYDKFINPETGEIYNELPYYGQALPKQVICGTNAAADKNEPEKYFGKINNPTVHIALNQVRKLVNALVERYGHPESIVVELARELKLGKKAKDDLNKLQTENTKDNDRIAKELERLGVKNSYDNRMKYKLWEDSADDPSQRCCPFCGKPISVERLFSDEFEIEHLLPFARSYSDARTNKVISCRACNREKGNRSPWEAFHADEKRWNEILGRVERFSTKHDENRNRAKKFREDAFQDLDDVLARMLTDTQYMAKAARQYLCFAAHPSKVYGIPGRLTSQLRHHWGLESLFPEDQKDRTDHRHHALDAFIVACTGRGTLQKYATERNDYSAEMPQEKAPHLPYPDFRLRELQDAFDRMVISHKPDHGNPQKAIRSGKTVAKLHEETYYGFAGEGDKKGTWKLIQRLPVSEFKTEADLDVIIDQSGTADKIRALLDGKDKSEHEAIIQKYFADRNTRKVRTYRERNKDVVLPFKDKNGKPYRYAIYGGNAYAEIYCPDRGKNAGKWQIEIIPNYCAHQKGFVPNWRHTDAHAKLIMRLHIDDMVAYEKDGKTIIARVKKMGSGKVYVRENRIAKEEGDKLSWAAYASGMQERNLRKITVTIDGRVIDPKRPKGQKDG

SEQ ID NO: 18596 - protein, 1206 aa, unidentified
  REGION 1..1206: note = Cas Enzyme sequence
KRILGLDIGTNSLGWTVVDRDEYDNYTLVKHGGLIFQEGVKIEKKVESSKAAERTGYRSLRKHYFRRRLRKIEVLRVLIKHNLCPYLSEELLHAWHVHKTYPKTDDFMLWQRTSDNDDKNPYYYRHLCLHQKLDLERQDERYILGRAFYHLAQRRGFLSNRLDSTPEQETGKVKTGISDLTREMEVAGCEYLDDYFYQIYSDPNNHERIRMRYTDREQHYKKEFHAICEMQQLSQDLVTELDKALYFQRPLKSQRKGVGKCTFEPKCLRCAESHPDFEEFRMLSFINNIKIKTPHDLELRCLSLEEKAKVQNLLYHNIKSNFVFEDIAKVLAGKGQYQYIKEIGDKPYKFNYRMTQGVPACPTTAQLIKIFGDDWKDAIAETYRLNNTRFGQKSVAQMVDDMLNVLSTFSSDSKLQLWAEKNLQLNEEQCKKFAGIKLSHGFASLSLKAIHKILPFLRQGYIYSHAVEWANIPTIVCEEIWNNIDKQRFIVRNIQDMLLFQDQCTKDFCIKDFLLNNFELNTGAVDKLYHPSMIETYKDAEQKDGIYQLGSPRTNAIRNPMAMRSLHEMRKVVNKLLKDKFIDFNTEVHIEYARGLNDANMRKAIADYQRGQDKKHQNYEKSIKDLYFQETGKNIDPTETDIRKFELWEEQSHKCLYTGAEIGIADFLGDNPKYDIEHTIPRSIGGDSIMENLTLCDSRYNRDVKKAKMPSELANHEEILTRIEGWKKNYESLTYQIDKCRTHAGMSKEQKDPIIQKRHRLKIERNYWKDKYERFTMTEAPGDFSRRQGAGIGLISKYAGLYLKSLFHDPKNRNKSRVFTVKGTTTAEFRRMWGLQSEYEKKCRDNHYHHCIDAITIACIGKKQYEDMASFYHDEELYDDGRGKKPQFRKPWPTFTEDVLNLEKSLIIVHDTPNNIPKKARKYVRTANGKFLAKGDCARGSLHKETYYGAIERDGKIEYVVRKALTSFEKEADIDNIVDDTVREIVRNAVRGKTFKEAIAQPIYMNKEKGILIKKVRCKAPKVLKIFSVKPCRDTSFHQYKKDIYVANDRNYMMAIYEKGADKKIGFEIVKNIEAANFYKKSMDREDYPCLVPQIKNGAKIKYCLKCGMAVLLYQNDAEEIDFNNMEDIIKRLYYITGLSLSESYGMVTLTHAQEARDKLDIQKGAFKMGEVYRPKINLRQTQFQGLIEGVDFNISILGDIKPLNK

SEQ ID NO: 18597 - protein, 1239 aa, unidentified
  REGION 1..1239: note = Cas Enzyme sequence
MPNFWSIFTENLQTYLMKTRILGLDTGTNSLGWAVVDRDENNQYTSICRGDLIFTEGVKQEKGIEFSLAAERTSYRASRRHYFRRRLRKVEVLKVLVKHKLCPPLSDEALNRWHTKKEYPLDEDFILWQRTSEADNKNPYHDRHICLHHKLNLKDSQTDRYTLGRALYHLTQRRGFLSNRLDQNEEAEETGKVKSAISELSKKMKEAGCEFLGDYFYLLYRTEGNRVRIRSRYTDREKHYLQEFKEICRVQELDEDLAKALEKTIFFQRPLKSQRQGVGKCTMEKGHSRCAVSHPLYEEYRLLCYLNNIRIKTPSDDRLRPLNAEEREKITPLFYQKSNFDFKKIAKKLAGKTPFGWIRDEEDWPYQFNYRMTQEAPACPTTAQLIKVFGEDWKAALAETYTMSTKQDGTLKTEDEICTDIWNVLYSFSSKEKLKEFGLKKLQLNEVQAKAFSEIRLTRDFASLSLKAIRKILFFLRTGEDYSKAIFLANIPTIVGEEIWNDIERRSRLLYKVDLALRPQEERDAEEHRTIAERIKAAVAAEVPDAPIDLLYHPSMIEAYPDAKRNERFDCYQLGSPKTNAVRNPMAMRSLHMVRKVINHLLRKHIIDEKTEIHIEYARELNDANKRQAIADWQRELSKRHTAYAQNIQKLYKEETGSEIEPTKTDILKYQLWEEQKHVCLYTGKKIGVADFLGANPKFDIEHTIPRSRGGDSTQENLTLCESKFNRDTKRDKLPTELANYEEILARIEHWKKQCYALKLKRDGIRTHSGLEKSIKDSKIRRRHLVGLEYGYLKGKYDRFTMKEVPEGFSRRQGAGIGLISKYAGLFLKSLFKDPKNPNRSNVYVVKGAITAEFRKLWGLQQADEAKSRDNHTHHCIDAYTIACIGPCEYAALAAYYRSDEEFKYGRRREKPQFEKPWPTFTEDLLKLQEELLIVHQTTDKLGKRDRRKVKTPRGKFLTGGDSARGRLHQETYYGAINYDGNIKYVVRKPLDSLTEKDLDKIVDETVMGIVKGAVEAKGSLKEALADGIYMNKEKGILIKRVRIFTPLAEPLALRSLRDQSRKEHKRQVYVTNKGNYMMGIYEGLVKGKQKREIELVNNIEAAEFFRKRNNQSQGLPLMPEKSAKDFPLKQTLKIGTLVLLYETSPSEIDFSDPKDVAKRLYKVVGMNYHDGKGSAGLISLRYHQEARPAKEFCFKKGAYKNGEVFRPAIILRHTQFNALVEGQDFDLDIAGKITLKRP

SEQ ID NO: 18598 - protein, 1168 aa, unidentified
  REGION 1..1168: note = Cas Enzyme sequence
MKKRILGLDTGTNSLGWAVVDRDEYNNYQLIKRGDLIFQEGVKIEKGTETSKASDRTKHRALRKQYFRRRLRKIEVLKVLVKYNLCPYLSNEQLHEWHIHKIYPKSDDFMLWQRTNDNEDKNPYYYRHLCLHKKLDRNVIEDRYILGRALYHLAQRRGFLSNRLDNSEDQNEKGAVKVGITELTKEMEKSGCEYLADYFYKMYSDPDNHERLRKRYTDREEHYEKEFYAICKMQNLSDELVDELNKAIYFQRPLKSQRQGVGKCTFEPRKPRCADSHPDYEEFRMLCFINNIKVQGPYDLQLRSLNTDEKEKIRHCFYRKSKPNFSFEDIAKILAGRNNYQYFKDKGDKAYKFNYRMTQGVPGCPVTAQLIKIFGNDWKNAIAESYLRMKTKKGQKTVDNVVNDVWNVLSSFSSKDKLKDWAANNLQLDDNTAEAFSKIKLSHNFAALSLKAIHKILPFLQKGMIYSHAVEMANIPSIVGYQVWNDDEKRNFIVENVEVFLEDKDQPTKDFCIKGFLQDNFDLKPGITDKLYHPSMIDVYQDAKKVNGIYQLGSPRTNAIRNPMAMRSLHEIRKVINQLLKEKIIDNNTEVHVEYARELNDANKRKAIAAYQLSQDKKHKKYAEEIVKLFKEEKGQTITPNKNDILKFQLWEEQGHLCLYTGKQIGIEDFLGNNPKFDIEHTIPRSVGGDFTLENLTLCESKFNREVKGAQLPSQLSNYQDILSRIEKWKEQYISLTKQIDKCTTFSGMAKDNKDKIIQRRHYLQIERNYWRGKYERFTMTEVPEGFSLRQGAGIGLISKYAGLYLKSLFHDSNDRHKSNVFTVKGTTTAEFRKMWGLQDNYEKKSRNNHCHHCIDAITIACIGKYEYSKMAEYYHKEELYDEGKGIKPQFKKPWKTFTQDVLSLGNNLIVVHSTPDNMPKKAKKYIKTKQGKLLTQGDCARGSLHNETYYGAIEKDGEIKYVIRRPINSFEKETDLNSIVDDTVKDIIMAAVQGKNFKEAINQPIYMNTEKGILIKKVRCYASGVTKPLSIRTMRNLSQKDYKQNYHVTNDVNYCMAIYEGLVKNKIKRDFEIVNNLEASEYFKKSTDRNDFPYLLPTTSLKHNFPFKSLIKIGTLVLLYEKDQNEINFDNLKDINKRLYKVTGLSSMTVHGSNYGVINSSFGSKKN

SEQ ID NO: 18599 - protein, 1492 aa, unidentified
  REGION 1..1492: note = Cas Enzyme sequence
MKHILGLDLGTNSVGWALINDEQKQIIKAGSRIIPMDAATMGNYESGNLQSPASQRTTFRGTRRLYQRAELRRERLLRILHILNFLPPHFEEQIDFAEHPGQFKNHGEPLLPYKKDKNGKNEFIFQGSFSEMLDDFSKNQPEMVSEGKKVPYDWTIYYLRKKALSRPVTKNELAWIILNFNTKRGYYQLRGKDEELKSDKNEEYKSLKVKLVEDLGSDTKKKGFNWYQITYENGACQRKSSPIPPRHIGEQVDLIITTTYNKDGSTKTDKEGNPLIKVRDPKEDDWTLMKKRTESHIENSGGTVGTYIYDYLLANPFVKIRGKFVHTIERKFYKDELIEILNKQTEFLPELKDKELLEKCIDELYHHNENHRESLKNKGFTNLFVNDIIFYQRPLKSKKSEIGNCPFEYYSFKDPQTKERKIQHIKCISKSNPIYQEFRLWQFVQNLKIYAREKEIDGRLQTDVDVTSEFLKSPDDICKLYDWLKERKDINQEELLHSPIFNLDSNYRWNYVEEKKYPCNPTHFGIQKALKEVKGTPTLNTGQEMQLWHILYSVEDRIDLDKALHHFAERNRIDSDSFTNALIDTEPYPAEYGAYSEKATKKLLQLMRTGKYWSSNDIDKQTKERISNIINGLVDKNISNRTREKSIRLQNINDFQFLPLWLACYIVYDRHSESNDTKIWEKPEDIDSYLHKDFKPNSLRNSIVETVLREALKVTKDIWTTYGTIDEVHIEMGRDLKQPKEKRIKDMKRNLQNQRVNLRIRYLLQEFADPKYNIESVRPNSPGQQELLKIYEDNALNSDQNVPEDILDIVDHLGSPTKPISQAETMKYRLWLEQKYCSPYTGQTIPLSKLFTPAYEIEHIIPQSRYFDDSLSNKVICESEVNKAKGRMLGYEFITKQGGSIIPGSQGKDFKILDKIQYEKFVKQHYSRNHGKMKKLLMEDIPDAFINRQLNDSRYMARKALEIFSHLVREQNNDEEAISKNIIATNGSITDRLKKEWGIKDVWNQIITPRFERMNQITGTHNYGEWICKNGKRYFQINIPPSISMGFSKKRIDHRHHAMDAIIIACTTRNHINYLNNSMAVSKQKDQRNDLKHLLCTKKSTDDKGNYIWQFNKPWPTFTQDVHKELNSIIVSFKQNLRVINRMSNYYWHYINGQKVCSKQVKGDSWSIRKSLHKATVSGAVRLPERKTVKFAIALKNIHQICDKKKRHIIQDVIKSYSHYDEKTILKYFKDRKYIIEDYDFSKLEIYTLPQEAKWAATRINIDASFDQKAINSITDSGVRNILSSHLKKYNDANGKEHPEKAFSPEGLQDMNLHLKELNQGKAHKPILKVRKYEALGNKFNIGIRGSKDKKYVEADKGTNLFFAIYEDEEGNRTYDSIPFNIAVEHLKNLEDIAPQRKEDGSKLLFTLSPNDLVYLPEEGEHVDKNHLCKDRIYKMVSSSGKQSFFIPCNVATTIEDKKEFSPLNKMEKSINGVMIKRSCIKINVNRLGDIL

SEQ ID NO: 18600 - protein, 1219 aa, unidentified
  REGION 1..1219: note = Cas Enzyme sequence
MKKRILGLDTGTNSLGWAVVDRDEYNNYQLIKRGDLIFQEGVKIEKGTETSKASDRTKHRALRKQYFRRRLRKIEVLKVLVKYNLCPYLSNEQLHEWHIHKIYPKSDDFMLWQRTNDNEDKNPYYYRHLCLHKKLDRNVIEDRYILGRALYHLAQRRGFLSNRLDNSEDQNEKGAVKVGITELTKEMEKSGCVYLADYFYKMYSDPDNHERLRKRYTDREEHYEKEFYAICKMQNLSDELVDELNKAIYFQRPLRSQRQGVGKCTFEPRKPRCADSHPDYEEFRMLCFINNIKVQGPYDLQLRSLNTDEKEKIRHCFYRKSKPNFSFEDIAKILAGRNNYQYFKDKGDKAYKFNYRMTQGVPGCPVTAQLIKIFGNDWKNAIAESYLRMKTKKGQKTVDNVVNDVWNVLSSFSSKDKLKDWAANNLQLDDNTAEAFSKIKLSHNFAALSLKAIHKILPFLQKGMIYSHAVEMANIPSIVGYQVWNDDEKRNFIVENVEVFLEDKDQPTKDFCIKGFLQDNFDLKPGITDKLYHPSMIDVYQDAKKVNGIYQLGSPRTNAIRNPMAMRSLHEIRKVINQLLKEKIIDNNTEVHVEYARELNDANKRKAIAAYQLSQDKKHKKYAEEIVKLFKEEKGQTITPNKNDILKFQLWEEQGHLCLYTGKQIGIEDFLGNNPKFDIEHTIPRSVGGDFTLENLTLCESKFNREVKGAQLPSQLSNYQDILSRIEKWKEQYISLTKQIDKCTTFSGMAKDNKDKIIQRRHYLQIERNYWRGKYERFTMTEVPEGFSLRQGAGIGLISKYAGLYLKSLFHDSNDRHKSNVFTVKGTTTAEFRKMWGLQDNYEKKSRNNHCHHCIDAITIACIGKYEYSKMAEYYHKEELYDEGKGIKPQFKKPWKTFTQDVLSLGNNLIVVHSTPDNMPKKAKKYIKTKQGKLLTQGDCARGSLHNETYYGAIEKDGEIKYVIRRPINSFEKETDLNSIVDDTVKDIIMAAVQGKNFKEAINQPIYMNTEKGILIKKVRCYASGVTKPLSIRTMRNLSQKDYKQNYHVTNDVNYCMAIYEGLVKNKIKRDFEIVNNLEASEYFKKSTDRNDFPYLLPTTSLKHNFPFKSLIKIGTLVLLYEKDQNEINFDNLKDINKRLYKVTGLSSMTVHGSNYGVINIRYHQEARQAKDLKSKNGTFVNGEDYRPSITILHTQFNALVEGFDFKINILGEIEPINR

SEQ ID NO: 18601 - protein, 1203 aa, unidentified
  REGION 1..1203: note = Cas Enzyme sequence
MEKILGIDTGTNSLGWAIVEKRDEEYKLLEKGVNIFQEGVKIEKGIELSKAAERTEHRSTRVRYYRIKIRKIRLLKILSDHQLCPSVSSQELSLWRHRNIYPKNELLLQWESTDDEADKNPYTFRYKCLTEKLDLTDPTQRYILGRALYHINQRRGFLSNRKSEDSEEDGTVKTGINDLTQAIENAGCKYLGEYFYHLYHKGEKIRNHYTARNEHYLKEFKAICEKQQLDDSLVKELENAIFFQRPLKSQKGLVGHCVFEPKKTKCPASHPLFEEFRMLQFVNNIKIQTPHDNELRPLNEEEREKILPKFFRKTKTSFAFEDIAKELAGKNKYAYYKDPKGKPYLFNYHMDTSVSGCPLTAGLKDIFGEDWINSVSEVYDKAEGKSQQQIMNDIWHVLFDFSDKEHIEAFGRNHLQLNEEDAKKFSNIKVHSDYASLSLKAICKILPYLRMGLIYPIATFFGNLEEVIPADIWGIKENRKQIIAELLTAISDKDNNPADERTTEQCIKDYLTIHLKVSKETTNKLYHPSMIESYPHVPENENKLGSPRINSVRNPMAMRSLFRMRHVINTLLAEGKIDRDTTIHIEFARELNDANKRQALYRYNRENENERKKAKDEIIKLYKEATNKDIEPTDTDILKYLLWEEQKHKCIYTDEEIGISDFIGENPKYDIEHTIPRSVGGDSTMMNLTLCNSKFNREIKQTSLPSQLSNHEDILLRIEEWKKKYEDLDKRIRKTRTSSSMSKEQKDRKIQERNYLKLRRDYWYGKYQRFVMSNVPEGFSRRQGANIGVISKYGRLYLKSYFNKVFVVKGLATSDFRKIWGIQDIYSKKERVNHVHHCIDAIVIACIGPGEYNKLAEYYHDEENHKWYGASKGRFDTPWPTFATDINKIQQEIIVAHHTADNMAKKGKHKILLKGKKVWANGDTARTSLHLDTYYGAIEQDGVVKYVVRKPLDENFKESDVKNIVDETVKEIVQNAINEHGNLKKAIAAGIWMNKEKGIAIKKVRCFTPSVTRPLHIRQQRDLSPKEYKQQFHVMNDTNYAMAIYIGRDKKGKEKRAFEMINNLDASRYFRSSNDKEAVGHNLVPLSKKDYPLTYVLKKGTMVLLYGNTPEEIQECTKEELIKKLYKITGLSSTVINGCDYGSITMQHSQEARPSGELKAKNGAYKNQENFRSKITMYHTQIKALVEGYDFNINDIGEIKMLR

SEQ ID NO: 18602 - protein, 1200 aa, unidentified
  REGION 1..1200: note = Cas Enzyme sequence
KILGIDTGTNSLGWAIVEKHEDGYKLLHKGVNIFQEGVKIEKGIESSKAAERTEHRSTRVRYYRIKIRKIRLLKLLSDNALCPPVSSEELALWRNRNIYPKNELLLQWESTDDEKYKNPYTCRYKCLNEKLDLNDTTQRYILGRALYHINQRRGFLSNRKSEDSGDDGTVKTAIDDLSKAIEDAGCEYLGEYFYKLYHKGEKIRNHYTARNDHYLKEFKAICEKQQLDSFLIKKLEDVIFFQRPLKSQKGMVGHCVFESKKTKCPASHPLFEEFRMLQFVNNIKIQTPKDDSMRPLCEEERKIVFSKFFRKSKSVFDFEDIAKELAGKNNYAYYKKPMGKPYLFNYQMDLSVSGCPITAGLMDIFGENWLESICEVYDKANGKTDLQIMNDVWHVLFDFADKEHIVEFGKKHLQLSDEEAKKFGGIKVHSDYASLSLKAIKKILPYLRLGIIYSIATFFGKLEDIVPEELWSVEDKRQQIIDELLSVISNKDNNPADTRTTEQCIKDYLISHLGVNEEDTDKLYHPSMIESYPHVPDGVNKLGSPRINSVRNPMAMRSLFRMRHVINTLLAEGKIDRDTTIHIEFARELNDFNKRQALYRYNREKEKERQKAKEEIIKLYKEQTGNDIEPTDVDILKYLLWNEQSHKCIYTDEEIGIADFLGKDPKYDIEHTIPRSVGGDSTMMNLTLCNSKFNRDIKQTSLPSQLSNHEDILLRVENWKEKYEDLDKRIRKNRTIAGMAKEAKDRRIQERNYLKLQRDYWYGKYQRFVMTEVPEGFSRRQGSGISVISKYGRLYLKSFFNRVFVVKGRATSDFRKIWGIQEVYSKKERVNHVHHCIDAIVIACIGPVEYNKLAEYYHDEENSRWYGASKAKFDSPWSTFAADINKIQQEILVAHNTIDNMAKKGKHKILLKGEKVWADGDTARASLHLDTYYGAIERDGEIKYVVRKALDDSFKVSDVKNIVDDTVKEILLAAIKEHGNLKNAIKGGIWMNKEKGIAIRKVRCFAPSVTRPVNIRKQRDLSPKEYKQQYHVMNDGNYAMAIYIGHDKKGKEKRAFEMINNLEASKYFKNSNDKESVGFNLVPLSKKDYPLAYVLKKGTMVLLYENSPEEIEECTKQDLVKRLYKVTGLSSMVVSGCDYGTITMQHSQEARPSGDLKLQKGAYKVHEEFRSKIFMYHTQIKALVEGYDFTINDIGEIKML

SEQ ID NO: 18603 - protein, 1200 aa, unidentified
  REGION 1..1200: note = Cas Enzyme sequence
MERILGLDTGTNSLGWAIVNKHDDGHYELLDKGVDIFQEGVNREKGVESSKAAARTEKRALRVRYYRIRLRKIKLLHILSENHLCPPLSNEELSLWRHKKIYPKNELFMEWQATDDRTGKNPYHDRFVCLTQKLDLTNLQNRYMLGRALYHINQRRGFKSNRKDLTKEDKDAGTVKEGISVLSQEIKAAGCTYLGEYFYHLYEKGEKIRKHYTAREEHYLKEFTAICERQELDAELIGKLEHAIFYQRPLKSQKGLVGHCVFEPKKTKCPVSHPLFEEFRMLSFINSIKIQTPSDAVMRPLNDEERTKIKSLFYRKSKRNFDFADIAKKLAGKSKYAYYRGGNAPFLFNYFKDSNVSGCPVTASLRDLFGDDWLDSVKEVYDRVDGKTDLQIINDIWSALFFYTDKDKLAEFGKRHLQLSDDDAKKFGAIPLDDGYAALSLKAITKILPYLRSGMIYSHAAFMGNLEEVLPSGIWDDSVRREEVIQELIRTISSYSRHSDDRTLEQCLKDHLSVKYGVSDERLEKLYHPSMIEMYPKVPLDENKLGSPRNNALRNPMAMRSLFQMRHTINQLLKEGKIDRNTTIHIEFARELNDANKRIALAQFTRDNQKEHDNCRKKIIELYRDATGQTIEPTETEILKYQLWEEQNHICLYTGKQIGITDFIGPDPSYDIEHTIPRSKGGDSTRMNLTLCSSKFNRDVKKTMLPTELPDHELILHRIENWKKKYEDLDSQIRKIRTWSGMEKEQKDKKIQRRHLLQLQRDYWYGKFHRFEMTDVPEGFCRRQGVDISVISKYGRLYLKFFFDRVFIVKGLATSDFRKIWGIQDIYSKKERVNHVHHCIDAVVIACMGPGEYSKLAAYYHDEENHEWYGMSKPHVDLPWPSFVTDMKDIQNEIFVVHHTNDNMAKQGRRVRRKDGTMSVPCDSARVQLHLDTYYGAIEQEGNIKYVVRKALDANFKESDIKNIVDDSVREKVLDAVKRLGFKEAMASTIWMNEDKHIPIRKVRCLVPSVTRPLSIRQHRDRSEKEYKRTYHVANNSNYAMAIYVGRDQRGKEKRAMEIVNNIDTAKYFKASFDRVAFGDTFIPLKKNDLPLAFVLRKGTMVLLYENDSDEVRECTHEELVRRLYKVTGIATMVIHGNTYGVIELTYHEEARPSTEVKGKNGAYKAGEELRPKIIMLHTQFKGIIEGVDFILSDTGEIKI

SEQ ID NO: 18604 - protein, 1203 aa, unidentified
  REGION 1..1203: note = Cas Enzyme sequence
MEKILGIDTGTNSLGWAIVEQQGEGYKLVDKGVNIFQEGVKIEKGIESSKAAERTTHRSARVRYYRIKVRKIRLLKILSDYHLCPPVTSAELSQWRLRNVYPDNELLHQWEGTDDKSDKNPYTYRYKCLTEQLDLTDTTQRYILGRALYHINQRRGFLSNRKSEDGDGEGAVKSGISDLTKEMEAAGCHYLSEYFYHLYHKGVKIRGHYTARNEHYLNEFDAICEKQHLSEELAKKLKNVIFFQRPLKSQKGLVGHCVFEPKKTKSPASHPLFEEFRMLCFVNNIKIKTPQDDELRPLTEEERKKILPKFYRKSKPDFDFEDIAKELAGKGKYAYYRDPQGKPYLFNYRMDTSVSGCPVTAGLRDIFGEDWVNAICEVYDKAKGKTLLQIVNDIWHVLFDFSDKEHLIEFGKKHLQLSDEEAKKFGNIRLSSEYASLSLKAIGKILPYLRGGMIYSLSAFFANLGEVVPADIWQEESNRPQIINGILEAIARRDSNELDHRTTERCIKDYLIAQYEVTEKETDKLYHPSMMEAYPRVPEGVNQLGSPRISSLRNPMAMRSLFRLRHVINTLLAEGKIDRDTTIRIEFARELNDANKRQALARYVKENENERKKARAEIVQLYKGETGKAIEPTDTDILKYQLWEEQDHRCIYTDEQIGIADFLGPNPKYDIEHTIPRSAGGDSTKMNLTLCNSRFNREVKQTLLPSQLANHQEILLRIAGWKERYEELDKRIRRIRTSSSMTKQQKDQKIQARNLLKLRRDYWYGKYQRFVMTKEPEGFSRRQGTDISIISKYARLYLKSFFNRVFVVKGLATSDFRKIWGIQDIYAKKERVNHVHHCIDAIVIACMGSVGYSRLAQYYHDEENHKWYGSAKGHLAAPWETFQEDMNKIQREIIVSHSTQDNIGKSGRRRIRLKGKKVWVDGDAARASLHNDTYYGAIERDGKIKYVVRKALDDSFKESDVDKIVDDTVRGIVKEAISACGSLKEALAQGIWMNKEKGIPILKVRCFTPSVTRPLNIRHQRDVSAKEYKRQYHVTSETNYAMAIYVGHDKRGKEKRAFELVSNLDACDYYKESNNKEVQGYHLVPPTKNGYPLTYLLKKGTMVLLYENTPDEIRDCTKAELVRRLYKITGFSSMVVGGNEYGTLTMLHSQEARPSSSIKTKNGAYKQNEEFRSSIAMLHTQLKALVAGRDFEINDLGEIKWLK

SEQ ID NO: 18605 - protein, 1175 aa, unidentified
  REGION 1..1175: note = Cas Enzyme sequence
LDKGINIFQEGVKIEKGIESSKAADRTSHRSARVRYYRIKVRKIRLLKVLSDNHLCPPVTSDELSQWRLKNIYPNNELLRQWEQTDDKADKNPYTYRHRCLTEELDLTDLTQRYILGRALYHINQRRGFLSNRKSEDGDEEGKVKSGINDLTKDMENMGCHYLGEYFYRLYQKGEKIRCHYTARNEHYLSEFKAICQMQHLDKDLVKKLEDVIFFQRPLKSQKGLVGHCVFEPKKPKCPISHPLFEEFRMLSFLNNIKIQTPKDESLRPLTEEERKKILPKFYRKSKPTFDFEDIAKELSGKNKYAYYKTPKGKPYLFNYHMDTSVSGCPVTADLRDIFGDDWMNTICEVYDRAQGKTRLQVINDIWHVLFDFSEDEHLMSFGKERLQLSDEEAKKFANIKVSSEYASLSLKAICKILPYLRKGMIYSLSVFFANLGEVLPSEIWQDEANRHEIEEGILNAISDKDNNASDDRTTERCIKDYLIANWGVAEEECNKLYHPSMIESYPHVPDGVNKLGSPRIDSIRNPMAMRSLFRLRHVVNSLLAEGKIDRDTTIHIEFARELNDANKRQALATFVKENENDRKKAYAEIVKLYKEETGLTIVPTDTDILKYQLWEEQNHRCIYTDEQIGIVDFLGPNPKYDIEHTIPRSVGGDSTKMNLTLCNSKFNREVKQTLLPSQLSNHEEILLRVEGWKERYEALDKRIRKMRTSSSMSKEQKDKRIQERNLLKLRRDYWYGKYQRFVMTDVPEGFSRRQGTDISVISKYGRLYLKSFFNRVFIVKGLATSDFRKIWGIQDIYTKKERVNHVHHCIDAIVIACIGPGEYSKLAEYYHDEENHEWYGSSKGHIVAPWKTFQEDMNKIQKEIIVSHNNADNIGKSGKHRKLIKGKKVWVDGDSARASLHNDTYYGAIERDGKVKYVVRKALDDNFKDKDVDNIVDGTVRDIVKQAVQHYGSLKEAIAQGIWMNKEKGIAIRKVRCFTPSVTRPLNIRHQRDVSSKEYKQQFHVMNDTNYAMAIYVGQDKKGKERRAFEIVSNLDACNFFKESNDKKVVDNHLFPLSKNDFPLTYVLKKGTMVLLYENTPEEIAECSKEELVKRLYKVTGISSMVVDGRDYGTIVLLHSQEARPSGEVKAKNGAYKQNEEFRSSIKLLHTQFKALIAGRDFEINDLGEIKWLK

SEQ ID NO: 18606 - protein, 1218 aa, unidentified
  REGION 1..1218: note = Cas Enzyme sequence
MESNEKKRILGLDTGTNSIGWAVIDRLGDQCLLVDSGVHIFTEGVKEEQGKEVSKAAERTSYRAMRRGFYRRKLRKIRLLRILSELGWCPALSPELLSQWRLKKVYPATPEFMQWLGTDDDNAITPYRFRVICLHEKLDLTQEAQRYILGRALYHIAQRRGFRSNRKDQSNDDEKGKVKEAISGLSQKIKDEGCEYLAEYFEKLYKEGKRIRNQYTSRDNHYVEEFHAICRRQELDEDTVNRLEHVLFDQREPRKHTVGHCLFEPTKSRCKITHPDFEEMRMLQTLNQIRMKTPDDDMLRPLWDEERKAIIPLFQRKSKSNFYFDDIAKKLAKPYIKRYGEKCYGYYKTDGDKDILFNYPMDMGISGSPFTAGMVAALGPDWKAVIDARYAKGEGKKIDDKVNDVWHALSFFDNDEKLEVWLETNLGIEADTAKKVAGIKMVSAYASLSHKVIRKILPYMREGMIYSYAVMLANIDAVLPAYVRDNDDMRKAAVDMAVECLNEYDKKACECTMYQWLKNFLAEKYHIDHKTLNRLYHPSDLETYPHVRPDEQDRMRLGSPRISSIRNPMAMRSLHRIRHVVNALLDKGMIDRDTEVHIELGRELNDANMRAAIRRQNNANKQIKAKAAAEISKHFKNFGSSESDMTKALLWAEQVRDIDILKCKLWNEQHAICLYTGKQIGLSDIFGPNPKYDIEHTIPRSRGGDSAMENLTLCDSRFNRDVKKTKLPSELANADEVMQRVAFMKEKADDLQKQIRRCCTNAYMDKSIKDRIIQKRHFLEMQQAYWRNKYRRFEMTEVPEGFSRRQGATAGIVARYARLFLKSLFDDVSIVKGAATADFRKAWKLQSEDEEKSRENHTHHQVDAVVIACIDRGDYQRLAASYHLNGYADRERPSVPEPWEGFVDDMRRIQAGTLISYDFTDNAPKQVRRRIKFTGSHHIKGPKPSHISESDTARLRLHMDTNYGAIERDGEVKYVVRNSIGSLKQKDIKDIVDSVVRQKVQEAYDAKGDAAFSEPIWMNEAKGIQIKKVRCFAPDVKNPLNVRKNRDISRHEYKRTGHFLNDGNYCIAIYEQILPEGSTTKAKRSFLIVNNLAAVSYFKISNRAELYPSVDENGYRLKAVLHQGDSVLLYEKSPEEIYNASAAELCRRLYIITSMEADGRINFKQAQLSQSGRKKKEDDKLGFFCPYMRINAKSLNALIQNQDFTIDVIGKIKFLKHD

SEQ ID NO: 18607 - protein, 1214 aa, unidentified
  REGION 1..1214: note = Cas Enzyme sequence
METNKKKRILGLDTGTNSIGWAVVDRLGDQCALVDSGVHIFTEGVKEEKGNEVSKAAERTSHRAMRRGFYRRKLRKIRLLRILSELGLCPYLSPELLSQWRLKKIYPATPEFMQWLGTDDDNAITPYRYRVICLHEKLDLTQEAQRYILGRALYHMAQRRGFRSNRKDQSNDDEKGKVKEAISDLSHKMKEEGCEYLAEYFEKLYNKGKRIRNQYTSRDNHYVEEFHAICRRQELDEDTIKRLEHVLFDQRPLKSQKHTVGHCLFEPSKSRCQMSHPDFEEMRMLQTINQIRMKTPDDDMLRPLWEDERELIVPLFLRKSKSNFDFEDIAKELAKPYIKRYGKKCYGYYKTDGDKDILFNYPMDMGIAGSPFTAGMVAALGSDWEAVIDAQYVKGDDKGLDDKVNDVWHTLSFFDNDDKLEAWLETNLGLDADTAKKVAGIKMVSAYASLSHKVIRKILPFMRGGMLYSYAVMLANIDAVLPAYVRDNDYMRQAAVDMAVGCLNEYDKKTCECTMYQWLKNFLAEKYHIDHKTLNRLYHPSDLETYPHVLPDDQGRMHLGSPRISAIRNPMAMRSLHRIRHVVNALLDKGLIDHDTEVHIELGRELNDANMRAAIRQQNKHNESERAKAKVVLKDYGVNNVSDDDIAKYILWEEQGKKCLYTGKQIGFECIFGPDPKYDIEHTIPRSRGGDSTMENLTLCDSRFNREVKKTKLPSELANADEVMQRVAFMKEKADDLQKQIRRCRTNASMDKSQKDRIIQKRHSLELQQVYWRNKYRRFEMTEVPEDFSRRQGATAGIVARYARLFLKSLFDDVSIVKGAATADFRKAWKLQSVDEKKSRDNHTHHQVDAVVIACIGRGDYQRLAASYHLNGYADRERPSVPEPWEGFVDDMRRIQAETLVSYDFTDNAPKQVRRRIRFTGSHHIKGHKPSHISESDTARLSLHMDTNYGAIEHDGEVKYVIRKPITELTSQSDIERIVDPIVREKVQAATRGLDKAPEIKTALANPIWMNEAKGIQIKKVRCFTPDVTRPLNVRKNRDISRHEYKRTGHFKNDGNYCIAIYEQVLPQGSTAKAKRSFRIINNLAAASHFKVGNRANRAELYPPVDENGYRLKAILHQGDSVLLYENSPEEVYNATAAELCRRLYVVTMIKTDGRINLKHSQQAKAKEGLAGDYKTGEVLRPYILVSSSKFKALIQNRDFTIDVLGKIKFLKHD

SEQ ID NO: 18608 - protein, 1209 aa, unidentified
  REGION 1..1209: note = Cas Enzyme sequence
MESNEKKRILGLDTGTNSIGWAVIDRLGDQCSLVDSGVHIFTEGVKEEQGKEVSKAAERTSYRAMRRGFYRRKLRKIRLLRILSELGWCPALSPELLSQWRLKKVYPATPEFMQWLGTDDDNAITPYRYRVICLHEKLDLTQEAQRYILGRALYHIAQRRGFRSNRKDQSNDDEKGKVKEAISGLSQKIKDEGCEYLAEYFEKLYKEGKRIRNQYTSRDNHYVEEFHAICRRQELDEDTVNRLEHVLFDQREPRKHTVGHCLFEPTKSRCKITHPDFEEMRMLQTLNQIRMKTPDDDMLRPLWNEERKAIIPLFQRKSQSNFDFEDIAKKLAKPYFKRYGNKCYGYYKTDGDKDILFNYPMDMGISGSPFTAGMIAALGPDWKAVIDAQYAKGEGKKLDDKVNDVWHALSFFDNDDKMEVWLETNLGIEADTAKKVAGIKMVSAYASLSHKVIRKILPYMRGGMIYSYAVMLANIDAVLPAYVRDNDDMRKAAVDMAVECLNEYDKKTCECTMYQWLKNFLAEKYHIDHKTLNRLYHPSDLETYPHVRPDEQDRMRLGSPRISSIRNPMAMRSLHRIRHVVNALLDKGIIDRGTEVHIELGRELNDANMRAAIRRQNKLNESERAKAKAELEKYGINNVSETDIDKYLLWDEQKKKCLYTGNQIGIEDIFGPNPKYDIEHTIPRSRGGDSTMENLTLCDSRFNRDVKKTRLPSELANADEVMQRVAFMKEKADDLQKQMRRCRTNAYMDKSIKDRIIQKRHFLEMQQAYWRNKYRRFEMTEVPEGFSRRQGATAGIVARYARLFLKSLFDDVSIVKGAATADFRKAWKLQSEDEEKSRENHTHHQVDAVVIACIGRRDYQRLAASYHLNGYADRERPSVPEPWEGFVDDMRRIQAETLISYDFTDNAPKQVRRRIKFTGSQQSEDSKTSYAYDTARLCLHKDTNYGAIKRDGEVKYVIRKPITELKSQGDIERIVDPIVKEKVQAATRGLDKAPEIKAALANPIWMNEAKGIQIKKVRCFAPDVKNPLNVRKNRDISRHEYKRTGHFLNDGNYCIAIYEQILPEGSTTKAKRSFLIVNNLAAVSYFKISNRANRAELYPSVDENGYRLKAVLHQGDSVLLYEKSPEEIYNASAAELCRRLYIITSMEADGRINFKQAQLSQSGRKKKEDDKLGFFCPYMRINAKSLNALIQNQDFTIDVLGKIKFLKHD

SEQ ID NO: 18609 - protein, 1217 aa, unidentified
  REGION 1..1217: note = Cas Enzyme sequence
MESNEKKRILGLDTGTNSIGWAVIDRLGDQCSLVDSGVHIFTEGVKEEQGKEVSKAAERTSYRAMRRGFYRRKLRKIRLLRILSELGWCPALSPELLSQWRLKKVYPATPEFMQWLGTDDDNAITPYRYRVICLHEKLDLTQETQRYILGRALYHIAQRRGFRSNRKDQSNDDEKGKVKEAISGLSQKIKDEGCEYLAEYFEKLYKEGKRIRNQYTSRDNHYVEEFHAICRRQELDEDTVNRLEHVLFDQRPLKSQKHTVGHCLFEPAKSRCQASHPDFEEMRMLQTLNQIRMKTPDDDMLRPLWDEEREAIIPLFQRKSKSNFDFEDIAKELAKPYIKRYGKKCYGYYKTDGDKDILFNYPMDMGISGSPFTAGMAAALGPDWKAVIDAQYAKGEGKKLDDKVNDVWHALSFFDNDDKLEVWLETNLGIEADTAKKVAGIKMVSAYASLSHKVIRKILPYMRGGMIYSYAVMLANIDAVLPAYVRDNDDMRKAAVDMAVECLNEYDKKTCECTMYQWLKNFLAEKYHIDHKTLNRLYHPSDLETYPHVRPDEQDRMRLGSPRISSIRNPMAMRSLHRIRHVVNALLDKGIIDRSTEVHIELGRELNDANMRAAIRRQNKLNESERAKAKAELEKYGINNVSETDIDKYLLWDEQKKKCLYTGNQIGIEDIFGPNPKYDIEHTIPRSRGGDSTMENLTLCDSRFNRDVKKTRLPSELANADEVMQHVAFMKEKADELQKQIRRCRTNASMDKSQKDRIIQKRHSLELQQTYWRNKYRRFEMTEVPEDFSRRQGATAGIVARYARLFLKSLFDDVSIVKGAATADFRKAWKLQSIDEKKSRDNHTHHQVDAVVIACIGRGDYQRLAASYHLNGYADRERPSVPEPWKGFVDDMRRIQAETLISYDFTDNAPKQVRRRIRFTGSHHIKGPKPSHISESDTARLRLHMDTNYGAIEHDGEVKYVVRNSIGSLKQKDIKDIVDSVVRQKVQDAYDAKGDVAFSEPIWMNEAKGIQIKKVRCYAPNVTRPLNIRKHRDISRHEYKRTGHFINDGNYCIAIYEQDLPEGSTAKAKRSFRIVNNLAAASHFKLGNRTNRTELYPLVDENGYRLKAVLHQGDSVLLYEKSPEEIYNASAAELCRRLYVVSGISSMVFTKSRSYGVLQLRHSQNASKSEKGKNGAYIVGENLRPTITMLHTQLNALIQNQDFTIDVIGKIKFLKHD

SEQ ID NO: 18610 - protein, 1206 aa, unidentified
  REGION 1..1206: note = Cas Enzyme sequence
MESNEKKRILGLDTGTNSIGWAVIDRLGDQCSLVDSGVHIFTEGVKEEQGKEVSKAAERTSYRAMRRGFYRRKLRKIRLLRILSELGRCPTLSPELLSQWRLKKVYPATPEFMQWLGTDDDNAITPYRYRVICLHEKLDLTQEAQRYILGRALYHIAQRRGFRSNRKDQSNDDEKGKVKEAISGLSQKIKDEGCEYLAEYFEKLYKEGKRIRNQYTSRDNHYVEEFHAICRRQELDEDTVNRLEHVLFDQREPRKHTVGHCLFEPTKSRCKITHPDFEEMRMLQTLNQIRMKTPDDDMLRPLWNEERKAIIPLFQRKSQSNFDFEDIAKKLAKPYFKRYGNKCYGYYKTDGDKDILFNYPMDMGISGSPFTAGMIAALGPDWKAVIDAQYAKGEGKKLDDKVNDVWHALSFFDNDDKLEVWLETNLGIEADTAKKVAGIKMVSAYASLSHKVIRKILPYMRGGMIYSYAVMLANIDAVLPAYVRDNDDMRKAAVDMAVECLNEYDKKTCECTMYQWLKNFLAEKYHIDHKTLNRLYHPSDLETYPHVRPDEQDRMRLGSPRISSIRNPMAMRSLHRIRHVVNALLDKGIIDRGTEVHIELGRELNDANMRAAIRRQNKLNESERAKAKAALKEQGINNASETDIDKYILWDEQHKKCLYTGKQIGFCDIFGPDSKYDIEHTIPRSRGGDSTMENLTLCDSRFNRDVKKTRLPSELANADEVMQRVAFMKEKADDLQKQIRRCRTNASMDKSQKDRIIQKRHSLELQQTYWRNKYHRFEMTEVPEDFSRRQGATAGIVARYARLFLKSLFDDVSIVKGAATADFRKAWKLQSTDEKKSRDNHTHHQVDAVVIACIGRGDYQRLAASFHLNGYADRERPSVPEPWEGFVDDMRRIQAETLISYDFTDNAPKQVRRRIRFTGSHHIKGPKPSHISESDTARLRLHMDTNYGAIEHDGEVKYVVRNSIGSLKQKDIKDIVDPVVRQKVQEAYDAKGDIAFSEPIWMNEAKGIQIKKVRCYAPNVTRPLNIRKHRDISRHEYKRTGHFINDGNYCIAIYEQVLPEGSTAKAKRSFRIVNNLAAASHFKLGNRTNRTELYPPVDENGYRLKAVLRQGDSVLLYEKSPEEIYNASAAELCRRLYVVTMIWTDGRVNLRYSQYTRAGKGVAGDYKTGELLRPHIMVSSSKFKALIQNQDFTIDVLGKIKFLKRD

SEQ ID NO: 18611 - protein, 1056 aa, unidentified
  REGION 1..1056: note = Cas Enzyme sequence
MAAGEEGSGGQSLTLGLDLGPTSIGWALIDEGREQVIATGVRVFPEGVDRDTAGGEKSKSQTRREKRGIRRQIQRRARRLRILRGALAEAGLLPTDAAEQDLALRDDPYPLRRRALDERLEPYQIGRVFYHLAQRRGFLSNRKSDRAKDSDSGVVKEGIAALQASMGDEHSRTLGEYLAGLAAEDERVRGRYTHRDMYQAEFDAIWEAQRAHHPALFTDEVKYGSQGPKTYPDDPDRQRQRATESHLQRYGLHGIIFFQRRVYWPASVIGRCELERGQKRCQRADRLAQRFRILQDVNNLRYRDPLTGAEQQLTDVQRQALLDYLMAGRARSFDHIRKHLAKSGLPVDARFNLERGGKSQMKGHETDAAIASKKCLGKAKWQAVDEDTRDEIVTALTDERLTDQEMLELLERDCGCSAEDAEALLHANLPDGHMSLSRLAIEKLIPFMEQGMQLMGTDATNSALYAAGYLPLLVEEGDHTHLGPVPSGITNPIVRQGLHETRKVVNAILRRYGPPDQIRVELAREAKKSFAERDKILRDNRQRNREREEAAERLRDDIGIEQPKRNDILKYRLWQEAGGICVYCGQAIGAAQLKSGEANVDHILPRWRSLDDSYMNKVVCHRHCNEDKGDRTPREWLEDSDPARYQQVIALARRLPYAKQGRFSQRDLVLDDFVGRHLTDTAYISRQVKDYMQTLGVRVACSRGTISAQLRRFWGLNTILYPEGQGQKTREDHRHHAVDAAVVALATPSRLQRLAKVRGGQRNDDIEPPWASLRADLADSIAAINVSHKPRRRLSGALHEETFYGPTQKRPDDQRQPVEKRPWAKDWQEGEHLFVRRKPVSEIKNAKHLTAVRDRAIRDCLAAHLRAQGVDPHDSKPYPKGVFEGEHEPSMPSGIPIRKVRLVEHLTTARAASDSRSFQHVQPGSNHHICYYETTDKRGKPKWVAKVTTMWDAALRVRRDGLPPVDTSDCELGRFVMSLSIGESFTIRGDEGQEQLLVVRKIRQLDGLLYYREHTDARKAADLNADKLYISCDRLRGLQARKVTVDALGRMRRSGD

SEQ ID NO: 18612 - protein, 1234 aa, unidentified
  REGION 1..1234: note = Cas Enzyme sequence
MPNFWSIFTENLQTYLMKTRILGLDTGTNSLGWAVVDRDENNQYTPICRGDLIFTEGVKQEKGIEFSLAAERTSYRASRRHYFRRRLRKVEVLKVLVKHKLCPPLSDEALNRWHTKKEYPLDEDFILWQRTSEADNKNPYHDRHICLHHKLNLKDSQTDRYMLGRALYHLTQRRGFLSNRLDQNEEAEETGKVKSAISELSKEMKEAGCEFLGDYFYLLYRTEGNRVRIRSRYTDREKHYLQEFKEICRVQELDEDLAKALEKTIFFQRPLKSQRQGVGKCTMEKGHSRCAVSHPLYEEYRLLCYLNNIRIKTPSDDRLRPLNAEEREKITPLFYQKSNFDFKKIAKKLAGKTPFGWIRDEEDWPYQFNYRMTQEAPACPTTAQLIKVFGEDWKAALAETYTMSAKQDGTLKTEDEICTDIWNVLYSFSSKEKLKEFGLKKLQLDEVQAKAFSEIRLTRDFASLSLKAIRKILFFLRTGEDYSKAIFLANIPTIVGEEIWNDIERRSRLLYKVDVALHPQEEDDAEEHRTIAERIKAAVAAEVPDAPIDLLYHPSMIEAYPDAKRNERFDCYQLGSPKTNAVRNPMAMRSLHMVRKVINHLLRKHIIDEKTEIHIEYARELNDANKRQAIADWQRELSKRHTEYAKNIQKLYKEETGSEIEPIKTDILKYQLWEEQKHVCLYTGKKIGIADFLGANPKFDIEHTIPRSRGGDSTQENLTLCESKFNRDIKRDKLPTELANYEEILARIEHWKKQCYALKLKRDGIRTHSGLEKSIKDSRIRRRHLVGLEYGYLKGKYDRFTMKEVPEGFSRRQGAGIGLISKYAGLFLKSLFKDPKNPNRSNVYVVKGAITAEFRKLWGLQQADEAKSRENHTHHCIDAYTIACIGPSEYAALAEYYRSDEEFKYGRRREKPQFEKPWPTFTEDLLKLQEELLIVHQTTDKLGKRDRRKVKTPRGKFLTGGDSARGRLHQETYYGAINYDGNIKYVVRKPLDSLTEKDLDKIVDETVKGIVKGTVEAKGSLKEALADGIYMNKEKGILIKRVRIFSDVSEPINLKQLRDVSTKEYKRHIHLRKDENYLFAIYEGIDKKKNKKQTETATVDYLDAAKFYKDSKRRDKANSLVGDYSKKNKLPLKCILKKRQMVLFYEHSPEEIRFKDKKDLSRRLYIVTSIAKDGRVKFLHHQAATATGIQSSPIPFTNDGEHQLYYRLSASNIKVLVAGIDFDINILGEITPKL

SEQ ID NO: 18613 - protein, 1082 aa, unidentified
  REGION 1..1082: note = Cas Enzyme sequence
MSDGYRLGLDLGTNSIGWFLYGLNGDNVDSVIDGGVRIFADGRDPKSGTSLAVDRRAARAQRRRRDRFLRRKAALMKRMAEVGLMPSDPGKAKELERLDPYQLRAEGLDGGLPLTHFGRALFHLNQRRGFKSNRKTDRGDNESGKIKDATARLDQAMMAKGARTYGEFLHMRRAAAEDPKQVPSVRTRLSVARRDNADKAEAGYDFYPDRKHLSEEFQKLWTEQARHHDVLTDELRDEIGLIIFHQRPLKTPEVGLCLYTDEKRIPSAHPLNQRRILFETVNALRVAARGEPSRALARDERDQIIHALDNKKHTKNLSGMAMKLKALGQVIRLRPEQSFTLETANRDAIKCDPVRASLSHPDRFGPRWSTLDDDTQWEVVRRIRAVQSDSDFKGLVGWLVEAHELDRDHAEATANAPLPEGYGRLGLTATSRILSALRADVLTYSNAVAACGWHHSDGRTGEVLENLPYYGEILDRHVIPGTYDENDDEITRFGRITNPTVHIGLNQLRRLVNKIITVYGKPDQIVVEVSRDLKLSEDQKREVQREIKKNTDAAIARGEKLEEMGVPNTGANRMKYRLWEDLGPAIGPRCCPYTGKPISAAMIFTPEVDIDHILPFSRTLDDSFANRTLCLKEANRAKTNKTPWEVWGNTPQWDAISANLKNLPGNKAWRFAPDAMERFEGENDFRARALKDTQYLSSIARTYLNALHDGGDKKSHVWVVPGRLTEMLRRHWGLNGLTALTDSDKQTVKGKNRTDHRHHAIDAAVVAATDRSLIQKIAKVAKTDEMAGAEEVARSIDPPWQGFRDDVGAQIARIIVSHRADHGRIDPALRRKGCDSTVGQLHNDTAYGIVNGDTVVSRKPLLSLKPGDIAVTTRGANIRDPDLQKHLERVTRGLDGKEVEKALSDFAAAEELPDGSPNPYHGLRRVRLEESLQSSARIEIPDQHGKSVKAYKGDSNHCYEIWQLPDGKIKAQVVTTFEAHQSGFEKKPHPAARRILRAFKRDMVRLVRNDKTVTGYVQKLDPANGLFIAPHTEANADSRHRAKADDFKFFQLSAGSLVKANARRVFVDEMGRVRDPGPPKLC

SEQ ID NO: 18614 - protein, 1004 aa, unidentified
  REGION 1..1004: note = Cas Enzyme sequence
RAALVAETQDAKEGEQANDVYALRARALDEKLPLHHIGRALFHLQQRRGFKSNRKTDRKDNDKGAIALGADRLVLEMREDNARTLGEFLAKRRGHDPSARGNVRVRIDIDTNDEPAKDGKPTKPGYNFYPQRAMLEHEFECIWNAQAAYWPDVLTDERKAHLFRVMFYQRPLKAPIVGRCSFNPSEQRLAKAHPLFQAFRLYKEVNELGLVMPDESERKLTLDERNALITKLRGVRSASFGALRKTLKLSERGARFNKEGEARDKLLGDEIYSVLSDKAIFGNRWAKLSMERQWEIIEKLREEPDPFALHTWLVENAGLSEEQAREAADVSLPEGYGRLGPTALAAMLEELKAEVITEAEAAKRAGYDHALARVGEAVDLLPRYQDILERRIPPGTNDPDDDYDIRKGRITNPTVHIALNQLRAVTNRLIARYGKPERIHIELARELNQSEEQKREATSRNAKNRREAERRSAILKEFGQPDNGFNRQLLKQWEELNPENPLERRCIYSGTVITPTMLFSGAVDIDHILPWSRTLDDSQANRLLCTREANREKRNHAPAEVPQWTDRYDDILARAQRLPLNKRWRFGHDAMARLEKDRDFLDRQLTDTQYLARLAHDYLGSLYPDEEPDGDGVVGRRNHVVVVTGRMTEMLRRRWGLNGILPDHNFADPTKAKNRKDHRHHAVDAAVIGTISRSLLKRIADAAREGENQGAEDVIRTIQPPWPSFREDLKAVVDRIIVSHKPDHGTLPKPGERGHTAGQLHNDTAYGLAKDDDGNPIAVHRKPFLALEPKDLPFIRDPQLRGWLEANTAKLSGKDFTARLMKLRKLDGHPFKRIRRVRMVERLALIPIYDATGRAYKGYKGDANFRYDVWEMPDGKWRHDVVTMFDAHRPDMDWQARRPHPAARKVLSLKQNDMVAYEQPSVGFVIGRVVKFNTAGQIYFASHLEAGALKARDADPDDPFKYFSKSANGLRDVKARQVRVDEAGRVFDPGPRDRSSHGQKAQPG

SEQ ID NO: 18615 - protein, 1217 aa, unidentified
  REGION 1..1217: note = Cas Enzyme sequence
MKKRILGLDTGTNSLGWAVVDRDEYNNYTLVKHGGLIFQEGVKIEKKVESSKAAERTGYRSLRKHYFRRRLRKIEVLRVLVKHNLCPYLSDELLHAWHVHKTYPKIDDFMLWQRTSDNDDKNPYYYRHLCLHQKLDLERQDERYILGRAFYHLAQRRGFLSNRLDSTPEQETGKVQKGISDLTREMKAAGCEYLGDYFYQIYSDPNNHERIRTRYTDREQHYKKEFHAICEMQQLSSELVAELNKALYFQRPLKSQRKGVGKCTFEPKCPRCAESHPDFEEFRMLSFINNIKIKTPRDLELRCLSLEEKAKVRSLFYRVSKPNFDFEDIAKALAGKGQYQYIKDVSDKPYKFNYRMTQGVPACPTTAQLIKIFGDDWKDAIAESYRLNNTRFGQKSVAQMVDDMLNVLSTFSSDSKLQLWAEKNLQLNEEQCKKFAGIELSHGFASLSLKAIHKILPFLRQGYIYSHAVELANIPTIVGEEIWNNIDKQRFIVRNIQDMLLYQDQCTKDFCIKDFLLNNFNLNPGAVDKLYHPSMIETYKDAEQKEGVYQLGSPRTNAIRNPMAMRSLHEMRKVVNKLLKDKIIDSNTEVHIEYARGLNDANMRKAIADYQRGQDKKHQNYEKSIKDLYFQETGKNIDPTETDIRKYELWEEQSHKCLYTGAEIGIADFLGDNPKYDIEHTIPRSIGGDSIMENLTLCDSRYNRDVKKAKMPSELANHEEILTRIEGWKKNYETLTYQIDKCRTHAGMSKEQKDPIIQKRHRLKIERNYWKDKYERFTMTEPPSDFSRRQGAGIGLISKYAGLYLKSLFHDPKNRNKSRVFTVKGTTTAEFRRMWGLQSEYEKKSRDNHCHHCIDAITIACIGKKQYEDMASFYHDEELYDDGRGKKPQFRKPWPTFTEDVLNLEKSLIIVHDTPNNMPKKARKYVRTANGKFVAKGDCARGSLHKETYYGAIERDGEIKYVVRKALSSFEKEADIDNIVDDTVREIVRNAVRGKTFKEAIAQPIYMNKEKGILIKKVRCFAQGITRPLNIRQQRDISLKEYKQTFHVANDTNYCMAIYEGLVKNKIKRDFELVKTLDAVTYFKDSTCTVEFPTLVPSKTNAELPLKSIIKIGTMVLLYENTPAEIDFSDKIDLARRLYKVVGLSSMVISGYAYGIMLLRYHQEARQTKDLKSKNGRYKNGEQYRPLIGLLHTQFDVLVEGFDFHINALGDIELLNR

SEQ ID NO: 18616 - protein, 1210 aa, unidentified
  REGION 1..1210: note = Cas Enzyme sequence
MKKRILGIDTGTNSLGWAVVDKNDKGEYSLVKKGSLIFQEGVKIEKGIESSKASDRTLHRALRKQYFRRRLRKIEILKVLIDFRWCPPLSSDALHKWHTQKIYPMDDAFISWQRTNDNYEENPYYYRHVCLHEKLDLKDKSSCYILGRAMYHLAQRRGFLSNRLDQGNEDESGKVSEGISSLSKSMEKTGCIYLGDFFYKIYKEKGNTERIRNRYTDREEHYKKEFYAICEKQNLSEEQISRLEKALYFQRPLKSQRKGIGKCTFEPSKSRVSDSHPSFELFRMLSFVNNIKVKGPHDIESRQLTTGEFEKIKPLFFRKSKSQFDFEDIAKTIAGKNNYQYIKESDDKSYKFNYRMTQGVSGCPTIANLKSIFGENYAYAIAERYILSDGKSQEQMVNDVWNVLFSFSDKKKVEQWGKEKLQLTDEEAEKFSKIRLTHSYTSISLAAIRKILPWLERGLIYSHAVLMAKVPDIVGTETWKKRGEEITKELMSLIANFNPRDISMQGTLDYCIKDILKDMCELKPGMVDLLYHPSMIDTYPDAKKNAQGIYQLGSPKTNAVRNPMAMRSLHQLRKVINALLLEGTINNETEVHIEYARELNDANKRKALAQWNKDRETIRKKYYDDIRRLYKEECGKDIEPTDDDITKFQLWTEQKRICLYTGKSIGIQDFIGPNPSCDIEHTIPRSVGGDSTLENMTLCFSFFNRDIKKAKLPTQLSNYDEIMIRLEDWRKTIEKLQKDVDRVKTHSGMDKNTKDRLIQKRHRLKIELKYWQGKYKRFQMEEVPEGFARRQGVGIGLVGKYAGLYLKSLFHKADDRTKSNVRVVKGTTTAEYRKMWGIQNEYEKKSRDNHVHHCIDAITIACIEPGEYNATAKYYQQLEEYERENAPKPTFPKPWPTFTEDIKAIADEMLVVHSTPDNMPKHARKYVLTSNGKKLAKGDVARGSLHNDKYYGAIEHDGEIRYVLRKSLQELKEGDVENIVDDSVREIIKKAIAEKGFKRAMEEDVFMNKEKGIKIKKVRCFTPTVTDPLHIRTHRDVSHKSYKQQFHVTLDGNYCMAIYEGIFKGKTKRSYEIINMLDAASYYKESADLTKLYPIAPEEKSGLKYRCLVRTGTQIILLQTDDEDINLMDKKELTKRMYFVAVMQKDGRIVLRYNQEAREATILKKERKAGAYKIGESYRSEISLSLSDFHALVEGADFKINVLGEITLLK

SEQ ID NO: 18617 - protein, 1210 aa, unidentified; identical to SEQ ID NO: 18616
  REGION 1..1210: note = Cas Enzyme sequence

SEQ ID NO: 18618 - protein, 1219 aa, unidentified
  REGION 1..1219: note = Cas Enzyme sequence
MKKRILGLDTGTNSLGWAVVDRDEYNNYQLIKRGDLIFQEGVKIEKGTETSKASDRTQHRALRKQYFRRRLRKIEVLKVLVKHNLCPHLSNEQLHEWHVHKIYPKSDDFMLWQRTNDNEDKNPYYYRHLCLHKKLDGNVIEDRYILGRALYHLAQRRGFLSNRLDNSEDQNEKGAVKVGITELTKEMEKSGCEYLADYFYKMYSDPDNHERLRNRYTDREEHYEKEFHAICKMQNLSNALVDELNKAIYFQRPLKSQRQGVGKCTFEPRKPRCPDSHPDYEEFRMLCFINNIKVQGPYDLQLRSLTTDEKEKIRYCFYRKSKPNFDFEDIAKVLAGKNNYQYFKDKGDKAYKFNYRMTQGIPGCPVTAQLIKIFGDDWKNTIAESYLRMETKNGQKTIDNAVNDVWNVLYSFSSKDKLKDWAKENLQLDDDTAKSFSKIKLSHNFAALSLKAIHKIIPFLRKGMIYSHAVEMANIPSIVGYQVWNDDEKRNFIVENVEVFLEDKDQPTKDFCIKGFLQDNFDLKPGITDKLYHPSMIDVYQDAKKVNGIYLLGSPRTNAIRNPMAMRSLHEIRKVINQLLKEKIVDNNTEVHVEYARELNDANKRKAIAAYQLSQDKKHKKYAEEIVKLFKEETGQTITPNKNDILKFQLWEEQGHLCLYTGKQIGITDFLGNNPKFDIEHTIPRSIGGDFTLENLTLCESKFNREVKGAQLPSQLSNYQDILPRIEKWKEQYISLTKQIDKCTTFSGMAKDNKDRIIQRRHYLQIERNYWRGKYERFTMTEVPEGFSLRQGAGIGLISKYAGLYLKSLFHDSNDRHKSNVFTVKGTTTAEFRKMWGLQDNYEKKSRNNHCHHCIDAITIACIGKYEYSKMAEYYHKEELYDEGKGIKPQFKKPWETFTQDVLSLGNNLIVVHSTPDNMPKKAKKYIKTKQGKLLAQGDCARGSLHNETYYGAIEKNGEIKYVIRRPINSFEKETDLNSIVDDTVKDIIMTAVQGKNFKEVINQPIYMNKEKGILIKKVRCYASGVTKPLSIRTMRNLSQKDYKQNYHVTNDVNYCMAIYEGLVKDKIKRDFEIVNNLEASEYFKKSTDRNDFPYLLPTTSLKHNFPFKSLIKIGTLVLLYEKDQNEINFDNLEDINKRLYKVTGLSSMTVHGSNYGVINIRYHQEARQAKDLKSKNGTFVNGEDYRPAITILHTQFNALVEGFDFKINILGEIEPINR

SEQ ID NO: 18619 - protein, 1188 aa, unidentified
  REGION 1..1188: note = Cas Enzyme sequence
MGIDVGLKSVGLAAIAIDDSSCNPLDAIPMKLLSVMSVVHDGGIDPDGAKTDTSRMSSAGVARRARRLRKRATARKKNLQKLLEKYGFDFERANAIGDLAFSKDPYFSWYAREQAASSYIPNETQRNLAIAISLMAIGNHRGWRNPYSSINMLKGQSLKPSSFYLEFANELMELNRIPTNTDINSEHRLTPAQLVVRANLLSPDVNFRGNPANRSKNRRDRSVNLGITLIPLGKLHQSDYYYEARTILEMQHVDETAKNEFLTELFSQINPKDVGAAASKVARDDLQPSLARASKASLEFQRFRILTTLQNIRIKTNDSTRRLSADELVSAYEYLCSEDASLDADLSWDDVALHISPSLKRSDLTGVGGITEDGEPISSKRPPVLTTQSLIVRAGKKEALRDVSQWWARASDDEKEMFINFLGNVGASAECQTNEEIMARNSVDEEMSRLEEDSLAELEKISIPAGRAKYSINTMRRLNHRMLHDNLDLHDARMREFGVASDWKPSAEELGTPTGNPAVDRTLRIVSRWVRACVDKWGIPESVNIEHVRGGFMSPKAAREYDKKLEFRYKENKKIREEIVKALSEEGSEGLLSNEYVRRSDIRKWQALQRQNCQCAYCGRRISFFTAQMDHIVPRKGAGSTNTLDNLVATCANCNKEKSNTLYSVWATAEQRKATIERVKHWNRDSYFANGKEFEQYKRAVIARLNQTVEDEPIDNRSIESVAWMARCLSEQIEGYLIERSAADSDPGRKNSVHVYRGWITAEARRASGIENELPWLGGASGKTRLDRRHHAIDAAVIAFLRPAVAQVLVERDSMRRASLDLGRDNDWKTYCGGLEEHSIYLNWRDNQMTALGMLLCRAMLSDKIAVTSPLRLKLSRGKVHEDTVQKAVYLRVGDAMTSEAIDKALSPAVWGALTHQPDYDPATGLAENNSRVLNVHGKVLPHDSKIGFMSDKAKLMKREYALRCPVRGGYANLGDSIHHARIFRIPGSRGKGFRFAMMRVAEIDLARYRDADLFSVQLPMQSISVRFADDSLKAALRDGTAEYLGWLVVNDELVINPDASLFSPKGKQAINLFMRAFPGTRHFKVTGFPQRSKIKIEAQMLSSEGLPDLSSIEDDAERSRIIEDVYGGLAWTDDEVDTIRKAFGDHAGLLLSVDVLFATKPLVVRRSTLGYPRWRSKSNMPLSWTVE

SEQ ID NO: 18620 - protein, 1150 aa, unidentified
  REGION 1..1150: note = Cas Enzyme sequence
MAVTLPKDDVRYKVGIDVGLNSIGFCAVEVDDDDYPIRLLNSLVFRHDAGIDPASRKAALTRKNVSGVARRNRRAKRETKKRLVALDRLLSEEFGWPLPNLEDYPDPYEPWHARARLLDGYIADDVKRKEMLSIAMRHIARHRGWRNPYMKPASLASLPYPSEFLTNLNQDVSRVIRQKFAAEATQGQLVDAFILGSLSLATTPELQVLEESEKDNSKNKPRDIVLGRVRGDKGVIEGKLHQSDNAEEIRRICATQEVPQDQVERLIEAVFKAKNPREVGAANKLVGHDELPGQKKYIRAERAHPAFQKFNIVATLTNLRINEAGSKRTLSPKELQMLTNYLSNVGPKDEVTWFDVAEKLKIDRSDLQGTARASYDGQAALKYPPKDVTSASIKQSKVKALKDWWKQASEDQRGQLIDYLSNSGGSHTPKTDDELDDLTKLTQSFSEKDLEELENISLPAGRAAYSLNSLTKLTQLMLEEGIDLHEARKRLFNVDDDWKPTPEPINSPVGNPAVDRVLKQVARWINAATERWGIPVSVNVEHVREGLVSEKVVRELIRDNEARHKKNMEVAEEIAKRLGLSGRALRSHTIKYFALRRQNCQCLYCGTKISFGTAEMDHIVPRTNGGSNNKRSNLAAVCRTCNASKSNIPFAVWVSSGKAGPVVSLEGAKERVNSLLLEKADLPEDYDDDSLIEFYSKNESKKFRKEIIARLESKKPDEEFDGRSLESVAWMAVELHERILGYYESLLKDASQKVPQVGVYRGEITAEARKASGFENRVELLGGKGKTRLDRRHHAMDALVIALMNQSVSKLLSWRMQLRDSQRISGMPETWKEFHGFNRGEYRRWNAWANAMRIAVELFNDALEKDEVHFSENKRLGVSLAKAHDDTIRSLCSYALGRDFSVELIDRAETPALWTALTKQPDFDVKNGLPEDSTRCITVNGKQFGPTDEVNFFASGAPAIKVRGGFAGIGDTIHHARIYRIDGKKTTYAMVRVFQTDLRRMEHEDLFTEPLKPSTISMRTASKTIRKALADGTATQIGWLVEGDEIHIETDRYPSGQIGSLLKEYPEASSWRVCGFPENAKIRLRPNLISEEGFDADISEDVVKLVSGKGWWVSPNTLLGNGPVTVIRRNALGEERWVSRAHLPVSVDLS

SEQ ID NO: 18621 - protein, 1001 aa, unidentified
  REGION 1..1001: note = Cas Enzyme sequence
MKPASLASLPYPSEFLTNLNQDVSRVIRQKFAAEATQGQLVDAFILGSLSLATTPELQVLEESEKDNSKNKPRDIVLGRVRGDKGVIEGKLHQSDNAEEIRRICATQEVPQDQVERLIEAVFKAKNPREVGAANKLVGHDELPGQKKYIRAERAHPAFQKFNIVATLTNLRINEAGSKRTLSPKELQMLTNYLSNVGPKDEVTWFDVAEKLKIDRSDLQGTARASYDGQAALKYPPKDVTSASIKQSKVKALKDWWKQASEDQRGQLIDYLSNSGGSHTPKTDDELDDLTKLTQSFSEKDLEELENISLPAGRAAYSLNSLTKLTQLMLEEGIDLHEARKRLFNVDDDWKPTPEPINSPVGNPAVDRVLKQVARWINAATERWGIPVSVNVEHVREGLVSEKVVRELIRDNEARHKKNMEVAEEIAKRLGLSGRALRSHTIKYFALRRQNCQCLYCGTKISFGTAEMDHIVPRTNGGSNNKRSNLAAVCRTCNASKSNIPFAVWVSSGKAGPVVSLEGAKERVNSLLLEKADLPEDYDDDSLIEFYSKNESKKFRKEIIARLESKKPDEEFDGRSLESVAWMAVELHERILGYYESLLKDASQKVPQVGVYRGEITAEARKASGFENRVELLGGKGKTRLDRRHHAMDALVIALMNQSVSKLLSWRMQLRDSQRISGMPETWKEFHGFNRGEYRRWNAWANAMRIAVELFNDALEKDEVHFSENKRLGVSLAKAHDDTIRSLCSYALGRDFSVELIDRAETPALWTALTKQPDFDVKNGLPEDSTRCITVNGKQFGPTDEVNFFASGAPAIKVRGGFAGIGDTIHHARIYRIDGKKTTYAMVRVFQTDLRRMEHEDLFTEPLKPSTISMRTASKTIRKALADGTATQIGWLVEGDEIHIETDRYPSGQIGSLLKEYPEASSWRVCGFPENAKIRLRPNLISEEGFDADISEDVVKLVSGKGWWVSPNTLLGNGPVTVIRRNALGEERWVSRAHLPVSVDLS

SEQ ID NO: 18622 - protein, 1091 aa, unidentified
  REGION 1..1091: note = Cas Enzyme sequence
MEKYIIGLDLGINNVGWSVVDAQTNKIKYLGVKQFEASDSAKDRRTQRNTRRRLKRRETRKTDILKILSNINFPNNLTIDTMLIETRCKGINEQISKQDITNILCYMATHRGYIPFGDEEVSFVDLDGKYPCEYYYEMFKSSTNNKYRALRNTVKNEENINEVKKMLETQRKYYPEITNETIENIVTTLQRKRKFWEGPGSINALTDYGRFKTPEDVVEYLDKKKENPEYEKYIFEDLIGKCSVIPNEKCVSQINFYAEKFNLLNDFINISFKSIEELNNKDDFYETQVKTYKLRESGLNKVFDYCMSKDTLTIKGLFKDLFATTIDNISGYRQDGHDPNKPEMSTMNTFRSIRKTFKECNANMDIFKPENTDLYNEIINYMMLVPGQVELINMLSTIMPLSENDKEALKKVFKSKKTNLKYHSLCEKILIRACNDMLSLQKNYMQVYKLKDYGKESRKEFVKRYEESNKGEKLMNPTFIDDIISSPQVKKTLRQSVKVINEIIKNEKSLPDVIVVESTKDTLNSEKMRKVYIDINKKQKALHDKAIKTLSSIGYSEKDISKKKIEKLMLYEEFDGLCPYCNNQITLKYLINGSDEIEHILPRSNSFDDSFDNRTVSCANCNKNKNNQTPLEFLKGNEKESFIERIKSNKNISEFKKENFLFAGDISKYRTRFFNRNLRDTAYATKEMINQINIFNLYLESKNKDEKIKTLSTPGQITHSIRKRYDLEKDRDTDIPYHHAIDASILALLPTTKIGSKVVMFQNDNKFFLNENNKDKMTEIGLELKYYDTSEGKIEYDDYIADFKNINDTSNIFMYSPEVKKEPNKGLFNANMYKVIKIDDKYYKIDQINDIYNLSDSDKKLLPKLFDDAKNETLLCKLQHKEFYEKLKNIYIKYSDSKNSPFEDYQREINNLSKEDKFDYLKHGLKMSENAPSVKRLRYYTPISEPYLIDKKSINKKDGTYLAFDSLAQAGIEVYYNETKNCFAFVPIPSVCYNLKTRKVNRKHKLYKRYKELNLKDYKVKYIVTLYNGNTIEVLKKDNTIIKGVVSSYHKTNDKIVLKNGSYFTKSDLEFSIIDYNPIGKSQKRLTKRIK

SEQ ID NO: 18623 - protein, 1091 aa, unidentified; identical to SEQ ID NO: 18622
  REGION 1..1091: note = Cas Enzyme sequence

SEQ ID NO: 18624 - protein, 1005 aa, unidentified
  REGION 1..1005: note = Cas Enzyme sequence
MEKYIIGLDLGINNVGWSVVDAQTNKIKYLGVKQFEASDSAKDRRTQRNTRRRLKRRETRKTDILKILSNINFPNNLTIDTMLIETRCKGINEQISKQDITNILCYMATHRGYIPFGDEEVSFVDLDGKYPCEYYYEMFKSSTNNKYRALRNTVKNEENINEVKKMLETQRKYYPEITNETIENIVTTLQRKRKFWEGPGSINALTDYGRFKTPEDVVEYLDKKKENPEYEKYIFEDLIGKCSVIPNEKCVSQINFYAEKFNLLNDFINISFKSIEELNNKDDFYETQVKTYKLRESGLNKVFDYCMSKDTLTIKGLFKDLFATTIDNISGYRQDGHDPNKPEMSTMNTFRSIRKTFKECNANMDIFKPENTDLYNEIINYMMLVPGQVELINMLSTIMPLSENDKEALKKVFKSKKTNLKYHSLCEKILIRACNDMLSLQKNYMQVYKLKDYGKESRKEFVKRYEESNKGEKLMNPTFIDDIISSPQVKKTLRQSVKVINEIIKNEKSLPDVIVVESTKDTLNSEKMRKVYIDINKKQKALHDKAIKTLSSIGYSEKDISKKKIEKLMLYEEFDGLCPYCNNQITLKYLINGSDEIEHILPRSNSFDDSFDNRTVSCANCNKNKNNQTPLEFLKGNEKESFIERIKSNKNISEFKKENFLFAGDISKYRTRFFNRNLRDTAYATKEMINQINIFNLYLESKNKDEKIKTLSTPGQITHSIRKRYDLEKDRDTDIPYHHAIDASILALLPTTKIGSKVVMFQNDNKFFLNENNKDKMTEIGLELKYYDTSEGKIEYDDYIADFKNINDTSNIFMYSPEVKKEPNKGLFNANMYKVIKIDDKYYKIDQINDIYNLSDSDKKLLPKLFDDAKNETLLCKLQHKEFYEKLKNIYIKYSDSKNSPFEDYQREINNLSKEDKFDYLKHGLKMSENAPSVKRLRYYTPISEPYLIDKKSINKKDGTYLAFDSLAQAGIEVYYNETKNCFAFVPIPSVCYNLKTRKVNRKQN

SEQ ID NO: 18625 - protein, 1091 aa, unidentified
  REGION 1..1091: note = Cas Enzyme sequence
MEKYIIGLDLGINNVGWSVVDAQTNKIKYLGVKQFEASDSAKDRRTQRNTRRRLKRRETRKTDILKILSNINFPNNLTIDTMLIETRCKGINEQISKQDITNILCYMATHRGYIPFGDGEVSFVDLDGKYPCEYYYEMFKSSTNNKYRALRNTVKNEENINEVKKMLETQRKYYPEITNETIENIVTTLQRKRKFWEGPGSINALTDYGRFKTPEDVVEYLEKKKENPEYEKYLFEDLIGKCSVIPNEKCASQINFYAEKFNLLNDFINISFKSIEELNNKDDFYETQVKTYKLRESGLNKVFDYCMSKDTLTIKGLFKDLFATTIDNISGYRQDGHDPNKPEMSTMNTFRTIRKTFKECNANMDIFKLENIDLYNEIINYMMLVPGQVELINMLSTIMPLSENDKEALKKVFKSKKTNLKHHSLCEKILIRACNDMLSLQKNYMQVYKLKDYGKESRKEFVKRYEESNKGEKLMNPTFIDNIISSPQVKKTLRQSVKVINEIIKNEKSLPDVIVVESTKDTLNSEKMRKVYIDINKKQKALHDKAIKTLSSIGYSEKDISKKKIEKLMLYEEFNGLCPYCNNPITLKYLINGSDEIEHILPRSDSFDDSFDNRTVSCANCNKNKNDQTPLEFLKGNEKESFIERIKSNKNISEFKKENFLFAGDISKYRTRFFNRNLRDTAYATKEMINQINIFNLYLESKNKDEKIKTLSTPGQITHSIRKRYDLEKDRDTDIPYHHAIDASILALLPTTKIGSKVVMFQNDNKFFLNENNKDKMTEIGLELKYYDTSEGKIEYDDYIADFKNINDTSNIFMYSPEVKKEPNKGLFNANMYKVIKIDDKYYKIDQINDIYNLSDSDKKLLPKLFDDAKNETLLCKLQHKEFYEKLKNIYIKYSDSKNSPFEDYQREINNLSKEDKFDYLKHGLKMSENAPSVKRLRYYTPISEPYLIDKKSINKKDGTYLAFDSLAQAGIEVYYNETKNCFAFVPIPSVCYNLKTRKVNREHKLYKRYKELNLKDYKVKYIVTLYNGNTIEVLKKDNTIIKGVVSNYHKTHDNIVLKNGSYFTKSDLEFSIIDYNPIGKSQKRLTKRIK

SEQ ID NO: 18626 - protein, 976 aa, unidentified
  REGION 1..976: note = Cas Enzyme sequence
LIVLATRHMAHHRGWRNPWWSYQRLTESTSPTEQLTNTLAAAEARFGSQVNAAMTLGQLVSKVAAAGMPIRHTKAADTNPVGALLIDQVRQEDSLAELQLILKTQKVDPEAMNAICAAVFFQSKPTIPKDRIGKCDLQPDQIRAPIATLEFQEYRVRAAVGNLRIGREKRRLTEVEHDQAIDFLLTWRDEMRPRWRDLAEELEVAPRDLTDPSLDGQGGSNAPYDRTSSIVESKFKKTTKVGAWWLGASEVEHGELIDTICDLSGEDQEYATDSVADLLSLDDVLEDLNKLNDALETGRASYSRDTLRRLNAQMRDNRTDVHEARKAEFNVPDDWSPKRPSLDDPIEHPTVARVNALVRRFLTTAVQKWGMPDRIVIEHVREAFAGPTGLAEIKSEIRSNTWKREKTAELLKAQGIDHPNNSSIKRNECVERQNCICLYCGTTITLLNCELDHIVPRTGGGGSRRDNLVAVCRACNKSKGKMPFAVFAEHSKNPEIAVPAAQERVRNWQRSGMTNKSFRMLQSDVKKRLAMSADDEDFGDRSIESTAYAAREMRARIENFLDQQAARLQVERGQVVVFSGIVTSEARKAGGIDDMIRLRNFTRKSRFDRRHHAIDATVLTSMRLGVAKTLKDRANLHRDNRYTGKDPEWKEYRGASQGEQEAFTRWQNRMEGLGELIKAAIENDAIPVVRPLRLSPRVGSVHADTVEPLVRKEIGEAFTKDEILRIVDRSLFLRMSSLAGDGDLDTDPQRSAELRWAPDRSVDLFPSNAAYLAVRHGAVAIGGTVKYARVYAWRTKTGFDYGMVRMYVGEFPKIGFSGPGVDIFTAPLPPYSQAIRTANPRLRKRIESGEARQIGWVATDDELELAPSEFAIGDTKMALFMQQLPESRWLITGFFDPTKFSIAPSYLASEGIDESTAESVASVVKANRIPLGVNVVLASANCTIIRRTVTGAPRWHGDGLPRSWNVREAAEQAFSS

SEQ ID NO: 18627 - protein, 1105 aa, unidentified
  REGION 1..1105: note = Cas Enzyme sequence
MTTPLPPGGHMNIRIGIDVGERSLGLAAVEYDDDDGPIRILAAVSHIHDGGMDPDTSKSPKSRLATAGVARRARRLTRNRRKRLLMLNEVLNKYGYPVPASEVPQTHEAWKARARLVETYVKDAKERDQLIVLATRHMAHHRGWRNPWWSYQRLTESTSPTEQLTNTLAAAEARFGSQVNAAMTLGQLVSKVAAAGMPIRHTKAADTNPVGALLIDQVRQEDSLAELQLILKTQKVDPEAMNAICAAVFFQSKPTIPKDRIGKCDLQPDQIRAPIATLEFQEYRVRAAVGNLRIGREKRRLTEVEHDQAIDFLLTWRDEMRPRWRDLAEELEVAPRDLTDPSLDGQGGSNAPYDRTSSIVESKFKKTTKVGAWWLGASEVEHGELIDTICDLSGEDQEYATDSVADLLSLDDVLEDLNKLNDALETGRASYSRDTLRRLNAQMRDNRTDVHEARKAEFNVPDDWSPKRPSLDDPIEHPTVARVNALVRRFLTTAVQKWGMPDRIVIEHVREAFAGPTGLAEIKSEIRSNTWKREKTAELLKAQGIDHPNNSSIKRNECVERQNCICLYCGTTITLLNCELDHIVPRTGGGGSRRDNLVAVCRACNKSKGKMPFAVFAEHSKNPEIAVPAAQERVRNWQRSGMTNKSFRMLQSDVKKRLAMSADDEDFGDRSIESTAYAAREMRARIENFLDQQAARLQVERGQVVVFSGIVTSEARKAGGIDDMIRLRNFTRKSRFDRRHHAIDATVLTSMRLGVAKTLKDRANLHRDNRYTGKDPEWKEYRGASQGEQEAFTRWQNRMEGLGELIKAAIENDAIPVVRPLRLSPRVGSVHADTVEPLVRKEIGEAFTKDEILRIVDRSLFLRMSSLAGDGDLDTDPQRSAELRWAPDRSVDLFPSNAAYLAVRHGAVAIGGTVKYARVYAWRTKTGFDYGMVRMYVGEFPKIGFSGPGVDIFTAPLPPYSQAIRTANPRLRKRIESGEARQIGWVATDDELELAPSEFAIGDTKMALFMQQLPESRWLITGFFDPTKFSIAPSYLASEGIDESTAESVASVVKANRIPLGVNVVLASANCTIIRRTVTGAPRWHGDGLPRSWNVREAAEQAFSS

SEQ ID NO: 18628 - protein, 1131 aa, unidentified
  REGION 1..1131: note = Cas Enzyme sequence
MSERTKYRIGIDVGDRSVGLAAIEFDDDGFPLSNLAMVTYRHDGGLDPTTNKSPKSRKETRGVALRTMRMRRRKKSRLKDLDKTLRALGYVVPACEEPQTYEAWKSRALLATTKVEGAQELGEHLVRAVRHMARHRGWRNPWWTLNQLEIASTAPSDTFAKIRERAEKEWPGMVPEEATLGMIGALAASNNVLLRPRTYRKDQPRHSKKLNVLGQEPILVDKVRQEDLLAELRTICKRQNIEDQYEKLAQAVFEQTRPYVPLDRVGKDPLQPNKSRASRASLEFQRFRILDAVAHLRVRVGVSDRRALTDEEHDKAVHFLMGYSKKDVPTWGDVADEIGVEPAHLIAPVIDDVRLNKAPYDRSSTEFEQKMKKKTRARQWWDEANLESRSQLILLVSDPTDETMRLAEVSGLYEVFESWPDEEKEALEGLKVESGRAAYSTDTLNKLSDHMRLKRIDLHEARKIAFGVDDMWHPPLDRIDEPTGQPTVDRVLTIVRRFIFDCERAWGRPENVVIEHARTGLMGPAQRADVLNEIAKNRKKNDKIREDLRAGGINNPTRADIRRNAIVQDQESQCLYCGATIGVSYSELDHIVPRAGGGSSRRENLAAVCRACNDSKKDTPFAVWAKNTSRPVTLEGTIQRLRELKAFKRPKDRRMMDLIIRRLKQTEKDDPIDERSLASTSYAATAIRERIEQYFNEKAEKRDLAKVHIDVYSGSLTRESRRAGGIDKMVLLRGQSDKNRFDVRHHAIDAAVLTLLNRSVAVTLEQRRLIKQQREYSLEKSRRERDNVWRDFMGLGPAAQEKFAKWKKTAYVLADIIKEAISNDAIPVVNPLRLRPQNGSVHLDTVDGVLERTIGDAWTVDQVHRIVNPQIYLAFAGYLGKQKALEPDSSRVLALNDGRKLTAEDVIYVFPEKAASILTPRGVVKIGESVHHVRLYAWKNRKGKAEVGMLRVFGAEFPWLMRESGVKDVLRVPIHTGSQSYRDLSFTVRKNIEKGEAVEIGWLTQNEELEFNPESYLQEGGKDKLAKFLAFLPETRWRVDGFPMPDKLRIRPALLSREEIPEGVFGTEEQSLLEEALTKGLIIATKGLLSLPDVKVLRRNNLGIPRWRGGSYRPVSLDIQRAALAALDEQE

SEQ ID NO: 18629 - protein, 1131 aa, unidentified
  REGION 1..1131: note = Cas Enzyme sequence
MSEHTKYRIGIDVGDRSVGLAAIEFDDDGFPLSNLVMVTYRHDGGLDPTTNKSPKSRKETRGVALRTMRMRRRKKSRLKDLDKTLRALGYVVPACEEPQTYEAWKSRALLATTKVEGAQELGEHLVRAVRHMARHRGWRNPWWTLNQLEIASTAPSDTFAKIRERAEKEWPGMVPEEATLGMIGALAASNNVLLRPRTYRKDQPRHSKKLNVLGQEPILVDKVRQEDLLAELRTICKRQNIEDQYEKLAQAVFEQTRPYVPLDRVGKDPLQPNKSRASRASLEFQRFRILDAVAHLRVRVGVSDRRALTDEEHDKAVHFLMGYSKKDVPTWGDVADEIGVEPAHLIAPVIDDVRLNKAPYDRSSTEFEQKMKKKTRARQWWDEANLESRSQLILLVSDPTDETTRLAEVSGLYEVFESWPDEEKEALEGLKVESGRAAYSTDTLNKLSDHMRLKRIDLHEARKIAFGVDDMWHPPLDRIDEPTGQPTVDRVLTIVRRFIFDCERAWGRPENVVIEHARTGLMGPAQRADVLHEIAKNRKKNDKIREDLRAGGINNPTRADIRRNAIVQDQESQCLYCGATIGVSYSELDHIVPRAGGGSSRRENLAAVCRACNDSKKDTPFAVWAKNTSRPVTLEGTTQRLRELKAFKRPKDRRMLDLIIRRLKQTEKDDPIDERSLASTSYAATAIRERIEQYFNEKAEKLDLAKVHIDVYSGSLTRESRRAGGIDKMVLLRGQSDKNRFDVRHHAIDAAVLTLLNRSVAVTLEQRRLIKQQREYSLEKSRRERDNVWRDFMGLGPAAQEKFAKWKKTAYVLADIIKEAISNDAIPVVSPLRLRPQNGSVHLDTVDAVLERTIGDAWTVDQVHRIVNPQIYLAFAGYLGNQKALEPDPSRVLALNDGRKLTAEDVIYVFPEKAASILTPRGVVKIGESVHHVRLYAWKNRKGKAEVGMLRVFGAEFPWLMRESGVKDVLRVPIHTGSQSYRDLSFTVRKNIEKGEAVEIGWLTQNEELEFNPESYLQEGGKDKLAKFLAFLPETRWRVDGFPMPDKLRIRPALLSREEIPEGVFGTEEQSLLEEALTKGLIIATKGLLSLPDVKVLRRNNLGIPRWRGGSYRPVSLDIQRAALAALDEQE

SEQ ID NO: 18630 - protein, 1131 aa, unidentified
  REGION 1..1131: note = Cas Enzyme sequence
MSEHTKYRIGIDVGDRSVGLAAIEFDDDGFPLSNLAMVTYRHDGGLDPTTNKSPKSRKETRGVALRTMRMRRRKKSRLKELDKTLRALGYVVPACEEPQTYEAWKSRALLATTKVEGAQELGEHLVRAVRHMARHRGWRNPWWTLNQLEIASTAPSDTFAKIRERAEKEWPGMVPEEATLGMIGALAASNNVLLRPRTYRKDQPRHSKKLNVLGQEPILVDKVRQEDLLAELRTICKRQNIEDQYEKLAQAVFEQTRPYVPLDRVGKDPLQPNKSRASRASLEFQRFRILDAVAHLRVRVGVSDRRALTDEEHDKAVHFLMGYSKKDVPTWGDVADEIGVEPAHLIAPVIDDVRLNKAPYDRSSTEFEQKMKKKTRARQWWDEANLESRSQLILLVSDPTDETMRLAEVSGLYEVFESWPDEEKEALEGLKVESGRAAYSTDTLNKLSDHMRLKRIDLHEARKIAFGVDDMWHPPLDRIDEPTGQPTVDRVLTIVRRFIFDCERAWGRPENVVIEHARTGLMGPAQRADVLNEIAKNRKKNDKIREDLRAGGINNPTRADIRRNAIVQDQESQCLYCGATIGVSYSELDHIVPRAGGGSSRRENLAAVCRACNDSKKDTPFAVWAKNTSRPVTLEGTIQRLRELKAFKRPKDRRMVDLIIRRLKQTEKDDPIDERSLASTSYAATAIRERIEQYFNEKAEKLDLAKVHIDVYSGSLTRESRRAGGIDKMVLLRGQSDKNRFDVRHHAIDAAVLTLLNRSVAVTLEQRRLIKQQREYSLEKSRRERDNVWRDFMGLGPAAQEKFAKWKKTAYVLADIIKEAISNDAIPVVSPLRLRPQNGSVHLDTVDAVLERTIGDAWTVDQVHRIVNPQIYLAFAGYLGNQKALDPDSSRVLALNDGRKLTAEDVIYVFPEKAASILTPRGVVKIGESVHHVRLYAWKNRKGKAEVGMLRVFGAEFPWLMRESGVKDVLRVPIHTGSQSYRDLSFTVRKNIEKGEAVEIGWLTQNEELEFNPESYLQEGGKDKLAKFLAFLPETRWRVDGFPMPDKLRIRPALLSREEIPEGVFGTEEQSLLEEALTKGLIIATKGLLSLPDVKVLRRNNLGIPRWRGGSYRPVSLDIQRAALAVLDEQE

SEQ ID NO: 18631 - protein, 1135 aa, unidentified
  REGION 1..1135: note = Cas Enzyme sequence
MSEHTKYRIGIDVGDRSVGLAAIEFDDDGFPLSNLAMVTYRHDGGLDPTTNKSPKSRKETRGVALRTMRMRRRKKSRLKDLDKTLRALGYVVPACEEPQTYEAWKSRALLATTKVEGAQELGEHLVRAVRHMARHRGWRNPWWTFNQLEIASTAPSDTFAKIRERAEKEWPGMVPEEATLGMIGALAASNNVLLRPRTYRKDQPRHSKKLNVLGQEPILVDKVRQEDLLAELRTICKRQNIEDQYEKLAQAVFEQTRPYVPLDRVGKDPLQPNKSRASRASLEFQRFRILDAVAHLRVRVGASDRRALTDEEHDKAVHFLMGYSKKDVPTWGDVADEIGVEPAHLIAPVIDDVRLNKAPYDRSSTEFEQKMKKKTRARQWWDEANLESRSQLILLVSDPTDETMRLAEVSGLYEVFESWPDEEKEALEGLKVESGRAAYSTDTLNKLSDHMRLKRIDLHEARKIAFGVDDMWHPPLDRIDEPTGQPTVDRVLTIVRRFIFDCERAWGRPENVVIEHARTGLMGPAQRADVLHEIAKNRKKNDKIREDLRAGGINNPTRADIRRNAIVQDQESQCLYCGATIGVSYSELDHIVPRAGGGSSRRENLAAVCRACNDSKKDTPFAVWAKNTSRPVTLEGTIQRLRELKAFKRPKDRRMVDLIIRRLKQTEKDDPIDERSLASTSYAATAIRERIEQYFNEKAEKLDLAKVHIDVYSGSLTRESRRAGGIDKMVLLRGQSDKNRFDVRHHAIDAAVLTLLNRSVAVTLEQRRLIKQQREYSLEKSRRERDNVWRDFMGLGPAAQEKFAKWKKTAYVLADIIKEAISNDAIPVVNPLRLRPQNGSVHLDTVDGVLERTIGDAWTVDQVHRIVNPQIYLAFAGYLGNQKALDPDSSRVLALNDGRKLTAEDVIYVFPEKAASILTPRGVVKIGESVHHVRLYAWKNRKGKAEVGMLRVFGAEFPWLMRESGVKDVLRVPIHTGSQSYRDLSDTVCKHIEQGVAQEIGWVTQNDELEFDPDDYLQNGGKDKLAKFLSFMPENRWRIDGFQTSTKLRIRPALLSWEELPTRLYGKELAENQYALLEESLKTGLIIATKGLLSLESSKIIRRNNLGIPRWRGGSYRPVSLDIQRAALAALDEQE

SEQ ID NO: 18632 - protein, 1131 aa, unidentified
  REGION 1..1131: note = Cas Enzyme sequence
MSEHTKYRIGIDVGDRSVGLAAIEFDDDGFPLSNLAMVTYRHDGGLDPTTNKSPKSRKETRGVALRTMRMRRRKKSRLKELDKTLRALGYVVPACEEPQTYEAWKSRALLATTKVEGAQELGEHLVRAVRHMARHRGWRNPWWTLNQLEIASTAPSDTFAKIRERAEKEWPGMVPEEATLGMIGALAASNNVLLRPRTYRKDQPRHSKKLNVLGQEPILVDKVRQEDLLAELRTICKRQNIEDQYEKLAQAVFEQTRPYVPLDRVGKDPLQPNKSRASRASLEFQRFRILDAVAHLRVRVGVSDRRALTDEEHDKAVHFLMGYSKKDVPTWGDVADEIGVEPAHLIAPVIDDVRLNKAPYDRSSTEFEQKMKKKTRARQWWDEANLESRSQLILLVSDPTDETMRLAEVSGLYEVFESWPDEEKEALEGLKVESGRAAYSTDTLNKLSDHMRLKRIDLHEARKIAFGVDDMWHPPLDRIDEPTGQPTVDRVLTIVRRFIFDCERAWGRPENVVIEHARTGLMGPAQRADVLNEIAKNRKKNDKIREDLRAGGINNPTRADIRRNAIVQDQESQCLYCGATIGVSYSELDHIVPRAGGGSSRRENLAAVCRACNDSKKDTPFAVWAKNTSRPVTLEGTIQRLRELKAFKRPKDRRMMDLIIRRLKQTEKDDPIDERSLASTSYAATAIRERIEQYFNEKAEKLDLAKVHIDVYSGSLTRESRRAGGIDKMVLLRGQSDKNRFDVRHHAIDAAVLTLLNRSVAVTLEQRRLIKQQREYSLEKSRRERDNVWRDFMGLGPAAQEKFAKWKKTAYVLADIIKEAISNDAIPVVSPLRLRPQNGSVHLDTVDAVLERTIGDAWTVDQVHRIVNPQIYLAFAGYLGNQKALDPDSSRVLALNDGRKLTAEDVIYVFPEKAASILTPRGVVKIGESVHHVRLYAWKNRKGKAEVGMLRVFGAEFPWLMRESGVKDVLRVPIHTGSQSYRDLSFTVRKNIEKGEAVEIGWLTQNEELEFNPESYLQEGGKDKLAKFLAFLPETRWRVDGFPMPDKLRIRPALLSREEIPEGVFGTEEQSLLEEALTKGLIIATKGLLSLPDVKVLRRNNLGIPRWRGGSYRPVSLDIQRAALAVLDEQE

SEQ ID NO: 18633 - protein, 1131 aa, unidentified
  REGION 1..1131: note = Cas Enzyme sequence
MSERTKYRIGIDVGDRSVGLAAIEFDDDGFPLSNLAMVTYRHDGGLDPTTNKSPKSRKETRGVALRTMRMRRRKKSRLKDLDKTLRALGYVVPACEEPQTYEAWKSRALLATTKVEGAQELGEHLVRAVRHMARHRGWRNPWWTLNQLEIASTAPSDTFAKIRERAEKEWPGVVPEEATLGMIGALAASNNVLLRPRTYRKDQPRHSKKLNVLGQEPILVDKVRQEDLLAELRTICKKQDIEDQYEKLAQAVFEQTRPYVPLDRVGKDPLQPNKSRASRASLEFQRFRILDAVAHLRVRVGVSDRRALTDEEHDKAVHFLMGYSKKDVPTWGDVADEIGVEPAHLIAPVIDDVRLNKAPYDRSSTEFEQKMKKKTRARQWWDEANLESRSQLILLVSDPTDETMRLAEVSGLYEVFESWPDEEKEALEGLKVESGRAAYSTDTLNKLSDHMRLKRIDLHEARKIAFGVDDMWHPPLDRIDEPTGQPTVDRVLTIVRRFIFDCERAWGRPENVVIEHARTGLMGPAQRADVLNEIAKNRKKNDKIREDLRAGGINNPTRADIRRNAIVQDQESQCLYCGATIGVSYSELDHIVPRAGGGSSRRENLAAVCRACNDSKKDTPFAVWAKNTSRPVTLEGTIQRLRELKAFKRPKDRRMVDLIIRRLKQTEKDDPIDERSLASTSYAATAIRERIEQYFNEKAEKLDLAKVHIDVYSGSLTRESRRAGGIDKMVLLRGQSDKNRFDVRHHAIDAAVLTLLNRSVAVTLEQRRLIKQQREYSLEKSRRERDNVWCDFMGLGPAAQEKFAKWKKTAYVLADIIKEAISNDAIPVVNPLRLRPQNGSVHLDTVDGVLERTIGDAWTVDQVHRIVNPQIYLAFAGYLGNQKALDPDSSRVLALNDGRKLTAEDVIYVFPEKAASILTPRGVVKIGESVHHVRLYAWKNRKGKAEVGMLRVFGAEFPWLMRESGVKDVLRVPIHTGSQSYRDLSFTVRKNIEKGEAAEIGWLTQNEELEFNPESYLQEGGKDKLAKFLAFLPETRWRVDGFPMPDKLRIRPALLSREEIPEGVFRTEEQSLLEEALTKGLIIATKGLLSLPDVKVLRRNNLGIPRWRGGSYRPVSLDIQRAALAALDEQE

SEQ ID NO: 18634 - protein, 1096 aa, unidentified
  REGION 1..1096: note = Cas Enzyme sequence
VGYRIGIDVGDQSVGLAAVEYDANGKPLRILAAVSHIHDGGLDPETAKSPLSRVNTSGVARRTRRLLRKRRKRLVLLDRVLSELGVPVPVSEVPQTHDVWRYRDELSRAYEPDDAKRLFGVSMVVRHMARHRGWRNPWWTWSTLRDAVAPSANFVETRAGAVDRFGPHMAEMNTMGQMVMAMVATGESVRDTKRSKARETKPLMTHQVSQVDTLHELRLILSMQKFDDAAIEKICAAVFHQAAPHVPAERIGRCSILPEDVRAPRASLEFQEYRIRAAVGNLRFRNPDRALTGEQYDQVVKFLMQWRQEDRPRWSDVAELLEVSPRHLNDPSIDDMGGSGAVCDATSRDVEKHFKKKSAVRKWWDGASREDRAEFVDYVTDVTGNDTEPEAVGLAEILEDDNNLADIEKLTIRESGRAAYGRRALELMNVEMRTHRCDVHEARKRAFGFADDWQPPKPSFDDEIDHPGVARVNTIVRRFLMTATQKWGTPESVSVEHVRSAFMGPTGRAEYLGEVRRNTYRREQKAKELVQQGFERPSDADIRRLESLNLQQGMCLYCGKAISMKTCELDHIIPRAAGGGNTRDNLVAVCRECNNAKGRTPFAVWAKSRSNPDVKLEEARERVMAFNSEEYKGRRLFRLRADVSRRLGMETDDSDGMDRSIESTAYAAREMRRRIENFLGIDRSSIADDDAARVHVFQGLVTSEARKAGEIDGILKLRNISRSKRMDRRHHAIDAAVLTCVTPGAARTLKYRGELRNDSRMVGDDNDWRNWAGRTAGEIASFKAWQESMKALGSLLADAVAADRVPVVRPLRLTPRIGSIHKDTIEKLVSKPLSEAFGADDFERVVDPRLYVRLKDLADGADVLPADPLRHEKLELSSTYVVKLFPSSAAYIAVRGGAAKIGDSIKHARVYAWRTKDGFGYGMVRVYGAEFPAIGFLKSGVDILTAPLPRESQSMRHANPALVKRIESGEAKCIGWIAIDDELEIDAQHFSQGTGKISQFLKEADECHWTVTGFFDDTKISIAPALLASEGIDDLTPEAVSTVLKDNRIPTAVNVLLADASLKVLRRSVTGVPRWNTRGLPASWSPRDAALKAFAE

SEQ ID NO: 18635 - protein, 948 aa, unidentified
  REGION 1..948: note = Cas Enzyme sequence
MAETNYPGKAKNSRTMGELVSRIVGTGAPIRPTSKSLGNTVGALMATQVRQEDSLFELRLIFETQQVPDNVADSICAAVFFQTKPHIPRDRIGRCALQPDQLRAPLASLEFQQFRIRDAAANLRVGREKRRLTESEYDIVVEMLTHWRDDIRPRWRDIAEKLDISARDLVDSSLDGSGGTYAPSDRTSTAVEVKFKRNSTVGAWWTTASAAERSELISIITDLSSEDGDIFSDSLQEFLSQETVLDPLAGLNEALESGRAAYSQETLNKLNSIMRETRCDLHTARKVAFGVDDSWRPPLPNFNDSIEHPTVARVNTLVRRYLMNVVDKWGMPDRVIVEHVRGGFLGPSALAELKNEIRLNTFRRDGVANLLRVQGIEHPSRTEIKRNECVERQNCVCVYCGSTITLLTCELDHIVPRASGGSSRLDNLVAVCRSCNAAKGKQPFAVFANHAPNEAISVHEAQLRVKAWQRVGMTSKSFTRLKANVSQRLSLSADDETDERSLESTAYAAREMRARIETFLVEQGKRHEVSAGQVLVFSGAATSEARKAGGIDDRIRLRTMTRKSRFDRRHHAIDAVVLTSLNLAVARTLKERSWLQRDNQFTGKEPGWKEYRGTSAKDQSAFNAWRERIGALAELLEATIRLDNIPVVRQLRLAPRVGSVHADTVQPLAYKSIGDAFSQDEVLRLLDRSLYMRLQEIAEGGDLEFDERRSELQRWASERPVALFPTSAAYLPVRGGAVTIGGTIRFAQIYAWKTKDGFNFGMVRLYVGEFPRIGFGGPGNDFLTTTPPAHSQAMRTANSALRQRIQSGDARLIGWIAVDDEIEIEPTYFQTDGTKLGEFLTLFPEKHWLITGIAEPGKIGIAPSYLAYEGVVTAADMERGGARSEHETPAAVSEVLKANRIPMSVNVILGSPGCNVLRRTVLGRPRWTGDSLPTSWNVLAAAEEAFEK

SEQ ID NO: 18636 - protein, 1151 aa, unidentified
  REGION 1..1151: note = Cas Enzyme sequence
MAVTLPKDDVRYKVGIDVGLNSIGFCAVEVDDDDCPIRLLNSLVFRHDAGVDPASRKAEAGWVVRCGAAAAGRRGGGAKRETKKRLVALDRLLSEEFGWPLPNLEEYPDPYEPWHVRARLLDGYIADDAKRKEMLSIAMRHIARHRGWRNPYMKPASLASLPYPSEFLTNLNQDVSRVIGRKFASDATQGQLVDAFILGSLRLAATPALQVPEEPEKDSSKNKPRDIVLGRVRGDKGVIEGKLHQSDNAEEIRRICATQEVPQDQVERLIEAVFKAKNPREVGAANKLVGHDELPGQEKYIRAERAHPAFQKFNIVATLTNLRINEAGSKRRLSSKELQMLTNYLSNVGPKDEVTWFDVAEKLKIDRSDLQGTARASYDGQAALKYPPIDVTSVSIKKNKVKALKDWWKQASEDQRGQLIDYLSNSDRLDTPKTDDELDDLTKLTQSFSEKDLEELEKISLPTGRAAYSVNSLTRLTNLMLEEGIDLHEARKRLFNIGNDWKPAPEPINSPVGNPAVDRVLKQVARWIDAATERWGIPASVNVEHVREGLVSEKVVRELIRDNEARHKKNMEVAEATAKRLGLSGPVHRSHTIKYFALRRQNCQCLYCGTKISFETAEMDHIVPRTNGGSNNKRSNLAAVCRTCNASKSNIPFAVWVSSGKAGPGVSLEGAKERVNSLLLEKDDLQKEDDSLVEIYSKKESKNFRKEIIARLESKKPDEEFDGRSLESVAWMAVELHERILGYYENLLKDTGQKAPQVGVYRGAITAEARKASGFENRVELLGGKGKTRLDRRHHAMDALVIALMNQSVSKLLSWRMQLRDSQRISGMQETWKEFHGSNRDEYRRWNAWTNAMRIAVELFNDALEKDEVHFSENKRLGISLAKAHDDTIKSLCSYALGDALSAELIDRAETPALWTALTKQPDFDVKNGLPEDPTRCITVNGKQFGPTDEVNFFASGAPAIKVRGGFAGIGDTIHHARIYRIDGKKTTYAMVRVFQTDLRRMKHKDLFTEPLKPSTISMRTASKTIRKALAAGTATQIGWLVEGDEIRVETDRYPSGQIGGLLKEYPEASSWRVCGFPDDARVRLRPNLISEEGFDADISEDVVKLVSGKGWYVTLNIVLGNGAVTVIRRNTLGEERWVSRAHLPVSVDLS

SEQ ID NO: 18637 - protein, 1088 aa, unidentified
  REGION 1..1088: note = Cas Enzyme sequence
MLWGGAPPGRGGAKRETKKRLVALDRLLSEEFGWPLPNLEDYPDPYEPWHARARLLDGYIADDAKRKEMLSIAMRHIARHRGWRNPYMKPASLASLPYPSEFLTKLNEDTSRVIGRKFASDATQGQLVDAFILGSLSLATTPELQVLEESEKDNSKNKSRDIVLGRVRGDKGVIEGKLHQSDNAEEIRRICATQEVPQDQVERLIEAVFKAKNPREVGAAYKLVGHDELPGQKKYIRAERAHPAFQKFNIVATLTNLRINEAGSKRRLSSEELQILTNYLSNVGPKDEVTWFDVAEKLEIDRSDLQGTARASYDGQAALKYPPKDVTSASIKQSKVKALKDWWKQASEDQRGQLIDYLSNSGGSDTPKTDDELDDLTKLTQSFSEKDLEELEKISLPAGRAAYSLNSLTKLTQLMLEEGIDLHEARKRLFNVDDDWKPTPEPINSPVGNPAVDRVLKQVARWINAATERWGIPASVNVEHVREGLVSEKVVRELIRDNEARHKKNMEVAEEIAKRLGLSGRALRSHTIKYFALRRQNCQCLYCGTKISFGTAEMDHIVPRTNGGSNNKRSNLAAVCRTCNASKSNIPFAVWVSSGKAGPGVSLEGAKERVNSLLLEKADLPEDYDDDSLIEFYSKNESKKFRKEIIARLESKKPDEEFDGRSLESVAWMAVELHERILGYYESLLKDASQKVPQVGVYRGEITAEARKASGFENRVELLGGKGKTRLDRRHHAMDALVIALMNQSVSKLLSWRMQLRDSQRISGMPETWKEFHGFNRDEYRRWNAWANAMRIAVELFNDALEKDEVHFSENKRLGVSLAKAHDDTIRSLCSYALGRDFSVELIDRAETPALWTALTKQPDFDVKNGLPEDSTRCITVNGKQFGPTDEVNFFASGAPAIKVRGGFAGIGDTIHHARIYRIDGKKTTYAMVRVFQTDLRRMEHEDLFTEPLKPSTISMRTASKTIRKAIADGSATQIGWLVEGDEIHIETDRYPSGQIGSLLKEYPEASSWRVCGFPENAKIRLRPNLISEEGFNTDISEDVVKLVKGKGWYVALNVLLGNGVVTVIRRNTLGEERWVSRAHLPVSVDLS

SEQ ID NO: 18638 - protein, 1150 aa, unidentified
  REGION 1..1150: note = Cas Enzyme sequence
MAVTLPKDDVRYKVGIDVGLNSIGFCAVEVDDDDYPIRLLNSLVFRHDAGIDPASRKAALTRKNVSGVARRNRRAKRETKKRLVALDRLLSEEFGWPLPNLEDYPDPYEPWHARARLLDGYIADDAKRKEMLSIAMRHIARHRGWRNPYMKPASLASLPYPSEFLTNLNQDVSRVIRQKFAAEATQGQLVDAFILGSLSLATTPELQVLEESEKDNSKNKPRDIVLGRVRGDKGVIEGKLHQSDNAEEIRCICATQEVPQDQVERLIEAVFKAKNPREVGAANKLVGHDELPGQKKYIRAERAHPAFQKFNIVATLTNLRINEAGSKRTLSPKELQMLTNYLSNVGPKDEVTWFDVAEKLKIDRSDLQGTARASYDGQAALKYPPKDVTSASIKQSKVKALKDWWKQASEDQRGQLIDYLSNSGGSHTPKTDDELDDLTKLTQSFSEKDLEELENISLPAGRAAYSLNSLTKLTQLMLEEGIDLHEARKRLFNVDDDWKPTPEPINSPVGNPAVDRVLKQVSRWINAATERWGIPVSVNVEHVREGLVSEKVVRELIRDNEARHKKNMEVAEEIAKRLGLSGRALRSHTIKYFALRRQNCQCLYCGTKISFGTAEMDHIVPRTNGGSNNKRSNLAAVCRTCNASKSNIPFAVWVSSGKAGPGVSLEGAKERVNSLLLEKADLPEDYDDDSLIEFYSKNESKKFRKEIIARLESKKPDEEFDGRSLESVAWMAVELHERILGYYESLLKDASQKVPQVGVYRGEITAEARKASGFENRVELLGGKGKTRLDRRHHAMDALVIALMNQSVSKLLSWRMQLRDSQRISGMPETWKEFHGFNRDEYRRWNAWANAMRIAVELFNDALEKDEVHFSENKRLGVSLAKAHDDTIRSLCSYALGRDFSVELIDRAETPALWTALTKQPDFDVKNGLPEDSTRCITVNGKQFGPTDEVNFFASGAPAIKVRGGFAGIGDTIHHARIYRIDGKKTTYAMVRVFQTDLRRMEHEDLFTEPLKPSTISMRTASKTIRKAIADGSATQIGWLVEGDEIHIETDRYPSGQIGSLLKEYPEASSWRVCGFPENAKIRLRPNLISEEGFDADISEDVVKLVSGKGWWVSPNTLLGNGPVTVIRRNALGEERWVSRAHLPVSVDLS

SEQ ID NO: 18639 - protein, 1105 aa, unidentified
  REGION 1..1105: note = Cas Enzyme sequence
MMLVLTQLAVKPRRGGKIFLWGPPGAGGGAKRETKKRLVALDRLLSEEFGWPLPNLEEYPDPYEPWHARARLLDGYIADDAKRKEMLSIAMRHIARHRGWRNPYMKPASLASLPYPSEFLTKLNEDTSRVIRQKFAAEATQGQLVDAFILGSLSLAATPELQVLEESEKDNSKNKPRDIVLGRVRGDKGVIEGKLHQSDNAEEIRRICATQEVPQDQVERLIEAVFKAKNPREVGAACKLVGHDELPGQKKYIRAERAHPAFQKFNIVATLTNLRINEAGSKRRLSSKELQMLTNYLSNVGPKDEVTWFDVAEKLKINRSDLQGTARASYDGQAALKYPPKDVTSASIKQSKVKALKDWWKQASEDQHGQLIDYLSNSGGSDTPQTDDELDDLTKLTQSFSEKDLEELEKISLPAGRAAYSLNSLTKLTQLMLEEGIDLHEARKRLFNVDDDWKPTPEPINSPVGNPAVDRVLKQVARWINAATERWGIPASVNVEHVREGLVSEKVVRELIRDNEARHKKNMEVAEATAKRLGLSGRALRSHTIKYFALRRQNCQCLYCGTKISFGTAEMDHIVPRTNGGSNNKRSNLAAVCKTCNDSKSNIPFAVWVSSGKAGPGVSLEGAKERVNSLLLEKADLPEDYDDDSLIEFYSKNESKKFRKEIIARLESKKPEEEFDGRSLESVAWMAVELRGRIVGYYETILKDTGQKVPQVGVYRGAITAEARKASGFENRVELLGGKGKTRLDRRHHAMDALVIALMNQSVSKLLSWRMQLRDSQRISVMPETWKEFHGFTRDDYRHWEAWAKAMRIAVELFNDALEKDDVHFSENKRLGISLAKAHDDTIKSLCSYALGGAFSAELIDRAETPALWTALTKQPDFDVNNELPEDPTRCITVNGKQFGPTDEVNFFASGAPAIKVRGGFAGIGDTIHHARIYRIDGKKTTYAMVRVFQTDLRRMEHEDLFTEPLKPSTISMRTASKTIRKALADGTATQIGWLVEGDEIHIETDRYPSGQIGSLLKEYPEAFSWRVCGFPENAKIRLRPNLISEEGFDADISEDVVKLVSGKGWWVSPNTLLGNGPVTVIRRNALGEERWLSRAHLPVSVDLS

SEQ ID NO: 18640 - protein, 1084 aa, unidentified
  REGION 1..1084: note = Cas Enzyme sequence
VGPRGSGGAKRETKKRLVALDRLLSEEFGWPLPNLEEYPDPYEPWHARARLLDGYIADDAKRKEMLSIAMRHIARHRGWRNPYMKPASLASLPYPSEFLTKLNEDTSRVIRQKFAAEATQGQLVDAFILGSLSLAATPELQVLEESEKDNSKNKPRDIVLGRVRGDKGVIEGKLHQSDNAEEIRRICATQEVPQDQVERLIEAVFKAKNPREVGAACKLVGHDELPGQKKYIRAERAHPAFQKFNIVATLTNLRINEAGSKRRLSSKELQMLTNYLSNVGPKDEVTWFDVAEKLKINRSDLQGTARASYDGQAALKYPPKDVTSASIKQSKVKALKDWWKQASEDQHGQLIDYLSNSGGSDTPQTDDELDDLTKLTQSFSEKDLEELEKISLPAGRAAYSLNSLTKLTQLMLEEGIDLHEARKRLFNVDDDWKPTPEPINSPVGNPAVDRVLKQVARWINAATERWGIPASVNVEHVREGLVSEKVVRELIRDNEARHKKNMEVAEATAKRLGLSGRALRSHTIKYFALRRQNCQCLYCGTKISFGTAEMDHIVPRTNGGSNNKRSNLAAVCKTCNDSKSNIPFAVWVSSGKAGPGVSLEGAKERVNSLLLEKADLPEDYDDDSLIEFYSKNESKKFRKEIIARLESKKPEEEFDGRSLESVAWMAVELRGRIVGYYETILKDTGQKVPQVGVYRGAITAEARKASGFENRVELLGGKGKTRLDRRHHAMDALVIALMNQSVSKLLSWRMQLRDSQRISVMPETWKEFHGFTRDDYRHWEAWAKAMRIAVELFNDALEKDDVHFSENKRLGISLAKAHDDTIKSLCSYALGGAFSAELIDRAETPALWTALTKQPDFDVNNELPEDPTRCITVNGKQFGPTDEVNFFASGAPAIKVRGGFAGIGDTIHHARIYRIDGKKTTYAMVRVFQTDLRRMEHEDLFTEPLKPSTISMRTASKTIRKALADGTATQIGWLVEGDEIHIETDRYPSGQIGSLLKEYPEAFSWRVCGFPENAKIRLRPNLISEEGFDADISEDVVKLVSGKGWWVSPNTLLGNGPVTVIRRNALGEERWLSRAHLPVSVDLS

SEQ ID NO: 18641 - protein, 1151 aa, unidentified
  REGION 1..1151: note = Cas Enzyme sequence
MAVTLPKDDVRYKVGIDVGLNSIGFCAVEVDDDDYPIRLLNSLVFRHDAGIDPASRKPPEQRESVFGGAPPRGGGAKRETKKRLVALDRLLSEEFGWPLPNLEEYPDPYEPWHARARLLDGYIADDAKRKEMLSIAMRHIARHRGWRNPYMKPASLASLPYPSEFLTKLNEDTSRVIRQKFAAEATQGQLVDAFILGSLSLAATPELQVLEESEKDNSKNKPRDIVLGRVRGDKGVIEGKLHQSDNAEEIRRICATQEVPQDQVERLIEAVFKAKNPREVGAACKLVGHDELPGQKKYIRAERAHPAFQKFNIVATLTNLRINEAGSKRRLSSKELQMLTNYLSNVGPKDEVTWFDVAEKLKINRSDLQGTARASYDGQAALKYPPKDVTSASIKQSKVKALKDWWKQASEDQHGQLIDYLSNSGGSDTPQTDDELDDLTKLTQSFSEKDLEELEKISLPAGRAAYSLNSLTKLTQLMLEEGIDLHEARKRLFNVDDDWKPTPEPINSPVGNPAVDRVLKQVARWINAATERWGIPASVNVEHVREGLVSEKVVRELIRDNEARHKKNMEVAEATAKRLGLSGRALRSHTIKYFALRRQNCQCLYCGTKISFGTAEMDHIVPRTNGGSNNKRSNLAAVCKTCNDSKSNIPFAVWVSSGKAGPGVSLEGAKERVNSLLLEKADLPEDYDDDSLIEFYSKNESKKFRKEIIARLESKKPEEEFDGRSLESVAWMAVELRGRIVGYYETILKDTGQKVPQVGVYRGAITAEARKASGFENRVELLGGKGKTRLDRRHHAMDALVIALMNQSVSKLLSWRMQLRDSQRISVMPETWKEFHGFTRDDYRHWEAWAKAMRIAVELFNDALEKDDVHFSENKRLGISLAKAHDDTIKSLCSYALGGAFSAELIDRAETPALWTALTKQPDFDVNNELPEDPTRCITVNGKQFGPTDEVNFFASGAPAIKVRGGFAGIGDTIHHARIYRIDGKKTTYAMVRVFQTDLRRMEHEDLFTEPLKPSTISMRTASKTIRKALADGTATQIGWLVEGDEIHIETDRYPSGQIGSLLKEYPEAFSWRVCGFPENAKIRLRPNLISEEGFDADISEDVVKLVSGKGWWVSPNTLLGNGPVTVIRRNALGEERWLSRAHLPVSVDLS

SEQ ID NO: 18642 - protein, 999 aa, unidentified
  REGION 1..999: note = Cas Enzyme sequence
MKPASLASLPYPSEFLTNLNQDVSRVIRQKFAAEATQGQLVDAFILGSLSLATTPELQVLEESEKDNSKNKPRDIVLGRVRGDKGVIEGKLHQSDNAEEIRRICATQEVPQDQVERLIEAVFKAKNPREVGAANKLVGHDELPGQEKYIRAERAHPAFQKFNIVATLTNLRINEAGSKRRLSSKELQMLTNYLSNVGPKDEVTWFDVAEKLKIDRSDLQGTARASYDGQAALKYPPIDVTSVSIKKNKVKALKDWWKQASEDQRGQLIDYLSNSDRLDTPKTDDELDDLTKLTQSFSEKDLEELEKISLPTGRAAYSVNSLTRLTNLMLEEGIDLHEARKRLFNIGNDWKPAPEPINSPVGNPAVDRVLKQVARWIDAATERWGIPASVNVEHVREGLVSEKVVRELIRDNEARHKKNMEVAEATAKRLGLSGPVHRSHTIKYFALRRQNCQCLYCGTKISFETAEMDHIVPRTNGGSNNKRSNLAAVCRTCNASKSNIPFAVWVSSGKAGPGVSLEGAKERVNSLLLEKDDLQKEDDSLVEIYSKKESKNFRKEIIARLESKKPDEEFDGRSLESVAWMAVELHERILGYYENLLKDTGQKAPQVGVYRGAITAEARKASGFENRVELLGGKGKTRLDRRHHAMDALVIALMNQSVSKLLSWRMQLRDSQRISGMQETWKEFHGSNRDEYRRWNAWTNAMRIAVELFNDALEKDEVHFSENKRLGISLAKAHDDTIKSLCSYALGDALSAELIDRAETPALWTALTKQPDFDVKNGLPEDPTRCITVNGKQFGPTDEVNFFASGAPAIKVRGGFAGIGDTIHHARIYRIDGKKTTYAMVRVFQTDLRRMKHKDLFTEPLKPSTISMRTASKTIRKALAAGTATQIGWLVEGDEIRVETDRYPSGQIGGLLKEYPEASSWRVCGFPDDARVRLRPNLISEEGFDADISEDVVKLVSGKGWYVTLNIVLGNGAVTVIRRNTLGEERWVSRAHLPVSVDLS

SEQ ID NO: 18643 - protein, 1117 aa, unidentified
  REGION 1..1117: note = Cas Enzyme sequence
MAAYKNLRPMHLGLTPRRERPDAAEGTASPTWLPTPRRNRRAKRETKKRLVALDRLLSEEFGWPLPNLEDYPDPYEPWHARARLVEGYIADDAKRKEMLSIAMRHIARHRGWRNPYMKPASLASLPYPSEFLTKLNEDTSRAIGRKFAAEATQGQLVDAFILGSLSLAATPELQVLEESEKDNSKNKPRDIVLGRVRGDKGVIEGKLHQSDNAEEIRRICATQEVPQDQVERLIEAVFKAKNPREVGAAYKLVGHDELPGQKKYIRAERAHPAFQKFNIVATLTNLRINEAGSKRRLSSEELQMLTNYLSNVGPKDEVTWFDVAEKLKIDRSDLQGTARASYDGQAALKYPPKDVTSVSIKKNKVKALKDWWKQASEDQRGQLIDYLSNSGGSDTPKTDDELDDLTKLTQSFSEKDLEELENISLPAGRAAYSLNSLTKLTQLMLEEGIDLHEARKRLFNVDDDWKPTPEPTNSPVGNPAVDRVLKQVARWINAATERWGIPVSVNVEHVREGLVSEKVVRELIRDNEARHKKNMEVTEEIAKQLGLSGRVYRSHTIKYFALRRQNCQCLYCGTKISFGTAEMDHIVPRTNGGSNNKRSNLAAVCRTCNASKSNIPFAVWVSSGKAGPGVSLEGAKERVNSLLLEKADLPEDYDDDSLIEFYSKNESKKFRKEIIARLESKKPDEEFDGRSLESVAWMAVELHGRIVGYYESLLKDTGQKVPQVGVYRGAITAEARKASGFENRVELLGGKGKTRLDRRHHAMDALVIALMNQSVSKLLSWRMQLRDSQRISGMPETWKEFHGFNRDEYRRWNAWANAMRIAVELFNDALEKDEVHFSENKRLGISLAKAHDDTIKSLCSYALGGDFSVELIDRAETPALWTALTKQPDFDVKNGLPEDSARHITVNGKQFGPTDEVDFFTTGAPAIKVRGGFAGIGDTIHHARIYRIDGKKTTYAMVRVFQTDLRRMKHKDLFTEPLKPSTISMRTASKTIRKALAAGTATQIGWLVEGDEIRVETDRYPSGQIGGLLKEYPEASSWRVCGFPDDARVRLRPNLISEEGFGADTSEDIAKIVSGIGWWVSLNVLLGKGPVTVIRCNALGEERWVSRAHLPVSVDLS

SEQ ID NO: 18644 - protein, 1065 aa, unidentified
  REGION 1..1065: note = Cas Enzyme sequence
VALDRLLSEEFGWPLPNLEEYPDPYEPWHVRARLLDGYIADDAKRKEMLSIAMRHIARHRGWRNPYMKPASLASLPYPSEFLTNLNQDVSRVIGRKFASDATQGQLVDAFILGSLRLAATPALQVPEEPEKDSSKNKPRDIVLGRVRGDKGVIEGKLHQSDNAEEIRRICATQEVPQDQVERLIEAVFKAKNPREVGAANKLVGHDELPGQEKYIRAERAHPAFQKFNIVATLTNLRINEAGSKRRLSSKELQMLTNYLSNVGPKDEVTWFDVAEKLKIDRSDLQGTARASYDGQAALKYPPIDVTSVSIKKNKVKALKDWWKQASEDQRGQLIDYLSNSDRLDTPKTDDELDDLTKLTQSFSEKDLEELEKISLPTGRAAYSVNSLTRLTNLMLEEGIDLHEARKRLFNIGNDWKPAPEPINSPVGNPAVDRVLKQVARWIDAATERWGIPASVNVEHVREGLVSEKVVRELIRDNEARHKKNMEVAEATAKRLGLSGRVHRSHTIKYFALRRQNCQCLYCGTKISFETAEMDHIVPRTNGGSNNKRSNLAAVCRTCNASKSNIPFAVWVSSGKAGPGVSLEGAKERVNSLLLEKDDLQKEDDSLVEIYSKKESKNFRKEIIARLESKKPDEEFDGRSLESVAWMAVELHERILGYYENLLKDTGQKAPQVGVYRGAITAEARKASGFENRVELLGGKGKTRLDRRHHAMDALVIALMNQSVSKLLSWRMQLRDSQRISGMQETWKEFHGSNRDEYRRWNAWTNAMRIAVELFNDALEKDEVHFSENKRLGISLAKAHDDTIKSLCSYALGDALSAELIDRAETPALWTALTKQPDFDVKNGLPEDPTRCITVNGKQFGPTDEVNFFASGAPAIKVRGGFAGIGDTIHHARIYRIDGKKTTYAMVRVFQTDLRRMKHKDLFTEPLKPSTISMRTASKTIRKALAAGTATQIGWLVEGDEIRVETDRYPSGQIGGLLKEYPEASSWRVCGFPDDARVRLRPNLISEEGFDADISEDVVKLVSGKGWYVTLNIVLGNGAVTVIRRNTLGEERWVSRAHLPVSVDLS

SEQ ID NO: 18645 - protein, 1001 aa, unidentified
  REGION 1..1001: note = Cas Enzyme sequence
MKPASLASLPYPSEFLTKLNEDTSRVIGRKFASDATQGQLVDAFILGSLSLATTPELQVLEESEKDNSKNKSRDIVLGRVRGDKGVIEGKLHQSDNAEEIRRICATQEVPQDQVERLIEAVFKAKNPREVGAAYKLVGHDELPGQKKYIRAERAHPAFQKFNIVATLTNLRINEAGSKRRLSSEELQILTNYLSNVGPKDEVTWFDVAEKLEIDRSDLQGTARASYDGQAALKYPPKDVTSASIKQSKVKALKDWWKQASEDQRGQLIDYLSNSGGSDTPKTDDELDDLTKLTQSFSEKDLEELEKISLPAGRAAYSLNSLTKLTQLMLEEGIDLHEARKRLFNVDDDWKPTPEPINSPVGNPAVDRVLKQVARWINAATERWGIPASVNVEHVREGLVSEKVVRELIRDNEARHKKNMEVAEEIAKRLGLSGRALRSHTIKYFALRRQNCQCLYCGTKISFGTAEMDHIVPRTNGGSNNKRSNLAAVCRTCNASKSNIPFAVWVSSGKAGPGVSLEGAKERVNSLLLEKADLPEDYDDDSLIEFYSKNESKKFRKEIIARLESKKPDEEFDGRSLESVAWMAVELHERILGYYESLLKDASQKVPQVGVYRGEITAEARKASGFENRVELLGGKGKTRLDRRHHAMDALVIALMNQSVSKLLSWRMQLRDSQRISGMPETWKEFHGFNRDEYRRWNAWANAMRIAVELFNDALEKDEVHFSENKRLGVSLAKAHDDTIRSLCSYALGRDFSVELIDRAETPALWTALTKQPDFDVKNGLPEDSTRCITVNGKQFGPTDEVNFFASGAPAIKVRGGFAGIGDTIHHARIYRIDGKKTTYAMVRVFQTDLRRMEHEDLFTEPLKPSTISMRTASKTIRKAIADGSATQIGWLVEGDEIHIETDRYPSGQIGSLLKEYPEASSWRVCGFPENAKIRLRPNLISEEGFNTDISEDVVKLVKGKGWYVALNVLLGNGVVTVIRRNTLGEERWVSRAHLPVSVDLS

SEQ ID NO: 18646 - protein, 1067 aa, unidentified
  REGION 1..1067: note = Cas Enzyme sequence
VALDRLLSEEFGWPLPNLEDYPDPYEPWHARARLLDGYIADDAKRKEMLSIAMRHIARHRGWRNPYMRPASLASLPYPSEFLTNLNQDVSRAIGRKFASDATQGQLVDAFILGSLRLAATPALQVPEEPEKDSSKNKSRDIVLGKVRGDKGVIEGKLHQSDNAEEIRRICATQEVSQDRVERLIEAVFKAKNPREVDAARKLVGHDKLPGQKKYIRAERAHPAFQKFNIVVTLTNLRINEAGSKRRLSSKELQMLTNYLSNVGPKDEVTWFDVAEKLEIDRSDLQGTARVSYDGQAALKYPPKDVTSASIKQSKVKALKDWWKQASEDQRGQLIDYLSNSGGSDTPKTDDEHNDLTKLTQSFSEKDLEELEKISLPAGRAAYSLNSLTKLTQLMLEEGIDLHEARKKLFNVDNDWKPASEPINSPVGNPAVDRVLKQVARWINAATERWGIPASVNVEHVREGLVSEKVVRELIRDNEARHKKNMEVAEATAKRLGLSGRALRSHTIKYFALRRQNCQCLYCGTKISFVTAEMDHIVPRTNGGSNNKRSNLAAVCRTCNASKSNIPFAVWVSSGKAGPGVSLEGAKERVNSLLLEKADLPEDYDDDSLIEFYSKNESKKFRKEIIARLESKKPDEEFDGRSLESVAWMAVELRERIVGYYESLLKDTGQKAPQVGVYRGAITAEARKASGFENRVRLLGGKGKTRLDRRHHAMDALVIALMNQSVSKLLSWRMQLRDSQRISGMQETWKEFHGSNRDEYRRWNAWTNAMRIAVELFNDALEKDEVHFSENKRLGISLAKAHDDTIKSLCSYALGDALSAELIDRAETPALWTALTKQPDFDVKNGLPEDPTRCITVNGKQFGPTDEVNFFASGAPAIKVRGGFAGIGDTIHHARIYRIDGKKTTYAMVRVFQTDLRRMKHKDLFTEPLKPSTISMRTASKTIRKALADGTATQIGWLVEGDEIYIETDRYSSDKIGSLLKEYPEASSWRVCGFPSAIKIRLRPNLLSEEGFDSYTSEAVSSLVSGPGWYVSINTVLGNGAVTVIRRNTLGEERWVSRAHLPVSVDLS

SEQ ID NO: 18647 - protein, 1103 aa, unidentified
  REGION 1..1103: note = Cas Enzyme sequence
MTEINDDLRYRVGIDVGLKSIGFCAVEVDDKDQPVRLLNSMVFIHDAGVDPNENKAAKSRKLTAGVARRTQRRTAQNRRRLAELDRVLSEELHWPLPNLEDFEDPYEPWHTRAELVDHYIEDESERLEALSIAVRHMARHRGWRNPYIKVDSLLTPVEPSEFLRGLNERVGEALGQEFPEETTPGQLISAYMSDPKYRESNGIRGDDGILQGKLHQYDNAAEIRKICEVQRLDHDVFKLLVRKVFFAKSPRGSAAGLVGHDQLPGQGKYIRAEKAHPDFQLFRIVSVLTNLRVREAGAERCLTHEELSGLTDFLLDAGLKQQITWADLADNLGIERADLRGTARPSVDGEPALRFPPTDVTTEKIMASKVKWLKEWWKSADSERRGFMVDALSNSGGSTDDNDIDDEVAELLEQATEDEQTELEKIQLPQGRAAYSLDSLRKLTERMLTEGVDLHTARKQLFNVDDDWRPEPEPIEAPVGNPAVDRVLKQVARWLNMATDRWGEPVVINIEHTRDGLGSEKVARELLRESQRRQDLNQKNMDEMIQQLGISGKARRSALVKHQAIQRQNSMCLYCGTTIGFETAEMDHIVPRANSGSSNERSNLAAVCRTCNHQKGAVPFAVWATSGQAHAGVSLEGAIERVRAWERDPAMSPKQYAHFRKEVISRLKSRKPDEEFDGRSMESVAWMAIELRTRIDGFYRKLKADSVPSIGIYRGQLTAEARKASGFESRVNLIGGKGKTRFDRRHHAMDALVIAMMNQSVSQTLALRVNMRESQRITGQEETWKNFYGKPGQASERFEQWREGMLRAVELFNIELAKNAIPFHENIRLRVGSSKVHDDTVRKFIHAKLGEALSVAMIDRAETPALWTALTRLPDFDPKEGLPEDPSREIYIHGRRITADEQLNFFNSPSACLKVRGGYVEIGSSIHHARIYRIDGKKTTYAMVRVFATDLVKMTHEDAFTTPLKPSTISMRTADPKVRRALEDGTATQIGWLVEGDELQIDPSKYSGGFIGEVLAEYPQLTSWRVCGFMNGTQLRLKPHLLSKEGFGGEVTEALQKIADRPGWLPTVNALLTSGDVWVIRRNSLGEPRFNSQNSLPVTQLLR

SEQ ID NO: 18648 - protein, 1349 aa, unidentified
  REGION 1..1349: note = Cas Enzyme sequence
MKKILGLDLGTTSIGWAFVHEAENNNETSSIINSGVRIVPLTSDEEADFKKGNTISINADRTLKRGARRSLQRFKQRRDALLEIFDKIKFIPAGYVYAETGKSSTFSSCQLRAKAAVESVSKEELVQVLLMLNKKRGYKSSRKAKTAEEGDAIDGMKIAKEIFANNLTPGQWVYSSLSKGNRFIPDFYRSDLYKEINAIVRFQNKFYPELINNKLLEDIQGKTRTQTSQHFSKTLNVELAENKGTREEVKFQHYNWRNEALSKQLDLKILAFIITEINNQINQSSGYLGAISDRSKELYFNAETVGQFLFKQLEKNRHAKLKNQVFYRQDYLDEFEKIWETQRQFHSELNDQLKAEVRDITIFYQRKLKSQKHLVSFCEFEKAHKAVPKSSPLFQEFRIWQNLNNIVVKNEDTKEPYTLDEDLKKIIAQQLSFKDSMTDAQVLAICGFKKGSHTVNFKKIEGNRTNSEIYKAFEKILVLEGYDDLDLSKLDHKEIYKIINSAFEDLEINTAILDFDAAIQGNDFDKQPYYQFWHLLYSAEEDDKLKDKLKSKFGFKENHLPFLLNINLQADYGSLSAKAVKKILPHLKDGHFYDKACALAGYNHSSSLTKEQNNERVLKDTLELLKKNSLRNPVVEKILNQMINVINAILNDPELGKPDEIRVELARELKNNNEQRSEMTRAINKSTAEHDQIRKLLHKEFGIQRVTRNDIIRYKLWKECDGISLYTGKPIPPSLLFTKDYDIEHIIPRSRLFDDSFSNKTICERKLNIDKSNKTAYSYLQEKLSAEEFEQFEKRVKSLFGKISRTKQNKLLLSDHEIPEGFIERQLRETQYIAKKAKEILLEISRNVTSTIGSITDKLREDWELVDVMKELNWNKYDKMGLTYTEEGKNGERLYKIKDWTKRNDHRHHAMDAITVAFTKPVYIQYLNNLNAKTQGDKKADSIYGIEAKYLKRDKNNKLRFIEPIPNFREDVKKHLEGIIVSHKAKNKVVTKNKNITKKQGGTNEKIQLTPRGQLHNETVYGKMHQYATKEEKVGSTFTAEHISKVAKKQYREALLKRLRENDNDPKKAFTGKNALSKTPIYINEEENNAIPEKVKMVWLDADYTIRKDISPDLKVEKVIDSGLKKILEKRLAEFGGDPKKAFINLDENPIWQNKDKGIALKRVTIKGVNNALALHTKKDHFGKEILDENGKPIPVDFISTGNNHHAAIYKDDKGNLHEEVVSFYDVVVRSNLGLSVINKNHELGWDFQYSLKKNELFIFPSESFNPQEIDLLDPRNYHLISPNIYRVQKFGELGSSGFWFRHHLETTLDNSKTLKSITYKEIYSHKGLEGIVKVRINHLGKIVQIGEY

SEQ ID NO: 18649 - protein, 1028 aa, unidentified
  REGION 1..1028: note = Cas Enzyme sequence
VTYEPWHARVGLSSAYEPNDAKRFADLRLVIQHIAHHRGWRNPWWHFERLALEFKEDSSPTAEFEVVRERAAKLLGLSPDELTTVGQIGWAASNPKFALRPRHLDMSTQAAKNRQTSDNIIVDRLMQQDLLRELTQILHTQQISSPESDKICSLVFKAAKASVPSENVGKDPFSKTELRAPKSSLEFQEFRIRDTIANLRIASTKSPLSEEQRQMVVARLLTWEEGAAPTWADVSDWLGLLEQDLKFASSDTARASKAPINVTHNKIVRLSEVGDKQKRLAGQHIQKWYADATPRVQREFCAFLGDSTDAGNDDELEALMEHLGEEEFAILDSLDQLSGRAAYSRGTLARLNSAMATGLDLNGALMKEFHQVSGWKPLAEPIFAQVDHPVVDRVMTDVGRWLDAITTKHGAPERVNVEHVRSAFLGPEAKEEYNSETNRRRKQNEADTKAISEELNIDVKTTDPRRYRAIQMQGCACLYCGEVIGYTTCEMDHIVPRAVGGSNRRDNLVAVCQRCNRSKNAEPFANWAADVDFVSIEDSVERVKMWQRPQGTRALEFGRFKKQVTFRLKRTELDDEIDERSLASTAYAAVTVRERVQGFLELKFANPASGEVGQIPVNVYRGALTAASRKAAGIDRRIKLLGFDAETHAPGKSRFDRRHHAVDAATVAMISPGIAQTMGQRVELRGFDRPGTSSQVPSWKRYEGKSSETFESWVSMVQNMADLLNTEIERDRIVVMRPLRLGANVGKIHDDTVQALVRKNLREGLSAQEVNRIADRDVWRVVRNLTTGAGDLPEKVNDPTLAKLLTDETVGLFPKKSAMLAVRNGAVAIGSTLHHVRVYRRDDGPGKPAKFSQIRVFAGEFGTLGWRKKGVNLFTEPLPNWSEAIRCGDLKLQQEIENGSASLIGWLVPGDEIEFAPGDAILPVIEPIEGVTSSPLTENRWVITGFESDSTINLAPAYLAREGIKDQDSVPPVLDGKFWRAAINKVMRARPTIIRRSATGIPRWHDLRDGLPISWKVLPDSSPALEPR

SEQ ID NO: 18650 - protein, 1112 aa, unidentified
  REGION 1..1112: note = Cas Enzyme sequence
FDVGQNSVGSAAVEFDDDGMPVSVKRLLVTLHDSGKDTVESGQTASVSRKASGGAARRVRRLFRNRRRRTALLEAELANRGYPVPPREAPTTYGPWDARQQLITDFVDDTKQRRTLLSSAIRHMSNHRGWANAWVSLDSYLWSEEPTSEFKAAVAQLVDADRWGDVGPKPIRYQADLASFALDASARLRPRQPATTGGHLLGTQRRADVVREWREICRVQQVPDEEFVVLARIAFSQKKPHVPVERVGNDWLEGFRDKKRAAVASMEHQEFKIRQTVANLAIRETARSKERQRISAGQQNLIVDHLMSVTDAKERPTWRDIAELFLDIPANLLVHYQPEEQLTGLAPVNSSVLELHSLNVKHPLIAWWITASPDNRCEFMLFFGDSAGSGFSDKVAADLESLILDLDEKQQEQLTKLKFSSGRSAHSLEALRLMNAEMERTGDTYVEARNRLFGKDGGNVIPQDLEDLDTQADHPTLQRILPVLRRFLLAIERESGAPDRVVIEHVRDAFLGFNAKQEASLRMIRLRRDRENAKRDIANAGLGVTAENADNGMIRKFQALTRQNSQCLYCGATPEWSGFEMDHIVPRASGGNSTRANLVAVCRECNAAKGKEPFARFAASGRRANLSLDGALQRVNEYQQGSLDRTQLKRLRAETGRRLKQTELDDPIDERSLASTAYAAVDMRRRIRSHYDEQVPVDVYSGSIVSMARHASGIDKMIRLREGLDVKSRFDRRHHAIDAAVTLMLDPSVASTLAERDDLRREEMDTGKPTVWRDYEGSGPTQIDRFRHWKRAMQRLSELIAKLVVNDEIVVMQPVRFSAHHAKLHLDGRSAHARKSLGDDWAPEDLARIVDDRVYEAVAANVKPGESLPEAADRTIMLPNGLRLDADGEIFLFPDGAARHSLPNNSSSPLGATMHHIRLFRWTDAKGKLTAGVVRVWASDLYDLEDGIKGDLLTSPLRPSSRAIRRSLAAVREAVRDGRAEHVGTFVKGDEVRIRPAEWMSKANKGSDFLTHFPETHWQLSSWEEISRANLRPLLLSSEGIADSNSLKDRRKVVVPEVVSEVLKRTMRISATQLWSTPSTRVIRRTGFGTIRPEGAQGLPATWSPYDAVHGS

SEQ ID NO: 18651 - protein, 1116 aa, unidentified
  REGION 1..1116: note = Cas Enzyme sequence
MVLGGAVHVGVDVGENSLGLAAIEKDGDGFPVAVPHLLVVLHDGGKDGMASNQTSSVSRKASGGMARRVRRLFRNRRRRRLALERLLAEIGFPTESYGDSTYEPWEARIALLKDRVEDDRERRRLLSIAIRHMANHRGWANAWVSIDSYVWKEEPSKEFERAVAAAAESDSLGTVDPRSLRYQADLAALALDHRTLIRQRGGRDNLLGVQRRVDVVREWRQICRVQGVDDGTFLSLARVAFGQEKPKVPIERVGNDWLPGYTNRKRAIVASMEHQEFKIRQAVANLAVRESARSNQRSRLSPEDQRLIADQLLGEVDKDKAPSWKDVAEWVGVAPHLLVHASPEEQLTGRAPINTTVVAIHSLPKKHPVLAWWQGADAELRSEFVRWFADPAAIEIRSESEAAFEQIFESLDEKELEAAQKLRFSSGRSGHSIEALRRINAEIEASGDTYVQVRNRLFGGGEDIRPKDLASLDTQADHPTLQRILPPLRRFLFALKRRHGEYPEQVVIEHVREAFLGFEAKREAALRMLRNRRDRELAQQDIANAGLGLVNASDADLRRFQAIRRQNSACLYCGATPGWSGFELDHIVPRASGGNSTQANLVAVCRLCKAAKGKRPFAVFAQSGDRPVVSIDDALRRVEEMDRGRIDARQFWRLKQEMKRRLKQTEEDEAIDERALASTAYAAVDMRERIQMSLGLGPERVPVYSGRIVSMARHASGIDKAITIREGIDTKSRFDRRHHAIDAAVAAMLNPSVARTLAERDDLRRESKLTGVDNGWREYEGSSPRAIERFRQWKTAMIRLAELVDEKLRADEVVVMQPVRFSGRHSKLHEDGRAPHARRRLGAAWTSVDRARIVDDRVYEALSAGLQAGDPLPEDDARTLRLPSGRMLTADDEIFIFPDGSARHPLPNASSAPLGGSVHHARLFRWPGKGGAWNAGIVRVFASDLYDLEGGVEGPILSAPLLARSRAVRRSQLPVREAIERGIAEQVGSFVIGDEIEIVPSEWGTSGKAGEFFARFPERRWRLTGWEQEGVLNLRPMYLALEGATLASDDEEPDSRLVRISRTEEDIIKRTLRVAPSWLWKTPSTRVVRRTALGEPREATTGVPMSWSPHRAVFGD

SEQ ID NO: 18652 - protein, 1132 aa, unidentified
  REGION 1..1132: note = Cas Enzyme sequence
MSADSLNYRIGVDVGDRSVGLAAIEFDDDGFPIKKLAMVTFRHDGGMDPATGKTPKSRKETAGVARRTMRMRRRKKKRLKELDKKLRDLGYFVPRDEEPQTYEAWSSRARLAESRFEDPQECGEHLVRAVRHMARHRGWRNPWWSFSQLEEASQKSSETFGRILERAQHEWGERVSDNATLGMLGALAANNNILLRPRRYEHNPKTGKNAEKLNVRGQEPILLDKVRQEDVLAELRRICEVQGIEDQYPELAHAVFTQVRPYVPTERVGKDPLQPMKIRASRASLEFQEFRIRDAVANLRIRVGGSERRPLTEEEYDRAVDYLMEYSDTAPPTWGEVADELEIAENTLIAPVIDDVRLNVAPYDRSSAIVEAKLKRKTQARQWWDDDANLDLRSQLILLVSDATDDTARIAENSGLLEVFESWSDEEKQTLQDLKFDSGRAAYSIDTLNKLNAYMHEHRVGLHEARQNVFGVSDTWRPPRDRLDEPTGQPTVDRVLTIVRRFILDCERAWGRPQKIVVEHARTGLMGPSQRADVLKEITRNRNANERIRQELRAGGVENPNRADIRRNSIIQDQESQCLYCGKEIGVLTAELDHIVPRVGGGSSKRENLAAVCRACNASKGSRPFAVWAGPARLERTIQRLRELQAFKTKSKKRTLNAIIRRLKQREEDEPIDERSLASTSYAATSIRERLEQHFNDDLPDGFAPVSVDVYGGSLTRESRRAGGIDKSIMLRGQSDKNRFDVRHHAIDAAVMTLLNPSVAVTLEQRRMLKQENDYSSPRVQHDNGWRDFIGRGEASQSKFLHWKKTAVVLADLISEAIEQDTIPVVNPLRLRPQNGSVHKDTVEAVLERTVGDSWTDKQVSRIVDPDTYIAFLSLLGKKKELEADHQRLVSVSAGVKLLAEERVQIFPEEAASILTPRGVVKIGDSIHHARLYGWKNQRGDIQVGMLRVFGAEFPWFMRESGVKDILRVPIPQGSQSYRDLAPTVRKNIENDKAVEFGWFTQNDELEIDPFDYIQHGGKDKLARFLSYMPESRWRIDGISMNNKLRIRPNLLSGEELPAKVYGKELSEEQYKLLEETLKTGLIIATEGLLSLKSARIVRRNNLGIPRWRGNGHLPTSLDIQRAAAQALEGRD

SEQ ID NO: 18653 - protein, 1132 aa, unidentified
  REGION 1..1132: note = Cas Enzyme sequence
MSADSLNYRIGVDVGDRSVGLAAIEFDDDGFPLKKLAMVTFRHDGGMDPATGKTPKSRKETAGVARRTMRMRRRKKKRLKDLDKKLRDLGYFVPRDEEPQTYEAWSSRARLADSRFEDPHERGEHLVRAVRHMARHRGWRNPWWSFSQLEEASQEPSETFGRILERAQHEWGERVSDNATLGMLGALAANNNILLRPRRYEHNPKTGKNAEKLNVRGQEPILLDKVRQEDVLAELRRICKVQGIEDQYPELAHAVFTQVRPYVPTERVGKDPLQPMKIRASRASLEFQEFRIRDTVANLRIRVGGSERRPLTEEEYDRAVDYLMEYSDTTPPTWGEVADELEIAENTLIAPVIDDVRLNVAPYDRSSAIVEAKLKRKTQARQWWDDDANLDLRSQLILLVSDATDDTARVAENSGLLEVFESWSDEEKQTLQDLKFDSGRAAYSIDTLNKLNAYMHEHRVGLHEARQNVFGVSDTWRPPRDRLDEPTGQPTVDRVLTIVRRFILDCERAWGRPQKIVVEHARTGLMGPSQRADVLKEIARNRNANERIRQELREGGIEAPNRADIRRNSIIQDQESQCLYCGKEIGVLTAELDHIVPRAGGGSSKRENLAAVCRACNASKGSRPFAVWAGPARLERTIQRLRELQAFKTKSKRRTLNAIIRRLKQREEDEPIDERSLASTSYAATSIRERLEQHFNDDLPDGFAPVAVDVYGGSLTRESRRAGGIDKSIMLRGQRDKNRFDVRHHAIDAAVMTLLNPSVAVTLEQRRMLKQENDYSSPRGQHDNGWRDFIGRGEASQSKFLHWKKTAVVLADLISEAVEQDTIPVVNPLRLRPQNGSVHKDTVEAVLERTVGDSWTDKQVSRIVDPNTYIAFLSLLGKKKELEADHQRLVSVSAGVKLLADERVQIFPEEAASILTPRGVVKIGDSIHHARLYGWKNQRGDIQVGMLRVFGAEFPWFMRESGVKDILRVPIPQGSQSYRDLAATTRKFIENGQATEFGWITQNDEIEISAEEYLATDKGDILSDFLTVLPENRWKVVGIGDNRRFKIRPLLLSNEIIPDTLNGRSIKSEERDLIVSVLDKGVRVVASTLLTLPSTKIIRRNNLGIPRWRGNSHLPTSLDIQRAATQALEGRD

SEQ ID NO: 18654 - protein, 1132 aa, unidentified
  REGION 1..1132: note = Cas Enzyme sequence
MSADSLNYRIGVDVGDRSVGLAAIEFDDDGFPLKKLAMVTFRHDGGMDPATGKTPKSRKETAGVARRTMRMRRRKKKRLKDLDKKLRDLGYFVPRDEEPQTYEAWSSRARLAESRFEDPHERGEHLVRAVRHMARHRGWRNPWWSFSQLEEASQEPSETFGRILERAQHEWGERASDNATLGMLGALAANNNILLRPRRYEHNPKTGKNAEKLNVRGQEPILLDKVRQEDVLAELRRICKVQGIEDQYPELAHAVFTQVRPYVPTERVGKDPLQPMKIRASRASLEFQEFRIRDAVANLRIRVGGSERRPLTEEEYDRAVDYLMEYSDTTPPTWGEVADELEIAENTLIAPVIDDVRLNVAPYDRSSAIVEAKLKRKTQARQWWDDDANLDLRSQLILLVSDATDDTARIAENSGLLEVFESWSDEEKQTLQDLKFDSGRAAYSIDTLNKLNAYMHEHRVGLHEARQNVFGVSDTWRPPRDRLDEPTGQPTVDRVLTIVRRFILDCERAWGRPQKIVVEHARTGLMGPSQRADVLKEIARNRNANERIRQELREGGIEAPNRADIRRNSIIQDQESQCLYCGKEIGVLTAELDHIVPRAGGGSSKRENLAAVCRACNASKGSRPFAVWAGPARLEHTIQRLRELQAFKTKSKKRTLKAIIRRLKQREEDEPIDERSLASTSYAATSIRERLEQHFNDDLPDGFAPVAVDVYGGSLTRESRRAGGIDKSIMLRGQSDKNRFDVRHHAIDAAVMTLLNPSVAVTLEQRRMLKQENDYSSPRGQHDNGWHDFIGRGEASQSKFLHWKKTAVVLADLISEAIEQDTIPVVNPLRLRPQNGSVHKDTVEAVLERTVGDSWTDKQVSRIVDPNTYIAFLSLLGKKKELDADHQRLVSVSAGVKLLADERVQIFPEEAASILTPRGVVKIGDSIHHARLYGWKNQRGDIQVGMLRVFGAEFPWFMRESGVKDILRVPIPQGSQSYRDLAATTRKFIENGQATEFGWITQNDEIEISAEEYLATDKGDILSDFLGILPEIRWKVTGIEDNRRIRLRPLLLSSEAIPNMLNGRLLTQEEHDLIALVINKGVRVVVSTFLALPSTKIIRRNNLGIPRWRGNGHLPTSLDIQRAATQALEGRD

SEQ ID NO: 18655 - protein, 1132 aa, unidentified
  REGION 1..1132: note = Cas Enzyme sequence
MSADSLNYRVGVDVGDRSVGLAAIEFDDDGFPLKKLAMVTFRHDGGMDPATGKTPKSRKETAGVARRTMRMRRRKKKRLKDLDKKLRDLGYFVPRDEEPQTYEAWSSRTRLAESRFEDPHERGEHLVRAVRHMARHRGWRNPWWSFSQLEEASQEPSETFGRILERAQHEWSERVSDNATLGMLGALAANNNILLRPRRYEHNPKTGKNAEKLNVRGQEPILLDKVRQEDVLAELRRICKVQGIEDQYPELAHAVFTQVRPYVPTERVGKDPLQPMKIRASRASLEFQEFRIRDAVANLRIRVGGSERRPLTEEEYDRAVDYLMEYSDTTPPTWGEVADELEIAENTLIAPVIDDVRLNVAPYDRSSAIVEAKLKRKTQARQWWDDDANLDLRSQLILLVSDATDDTARVAENSGLLEVFESWSDEEKQTLQDLKFDSGRAAYSIDTLNKLNAYMHEHRVGLHEARQNVFGVSDTWRPPRDRLDEPTGQPTVDRVLTIVRRFILDCERAWGRPQKIVVEHARTGLMGPSQRADVLKEIARNRNANERIRQELRAGGVENPNRADIRRNSIIQDQESQCLYCGKEIGVLTAELDHIVPRAGGGSSKRENLAAVCRACNASKGSRPFAVWAGPARLERTIQRLRELQAFKTKSKKRMLNAIIRRLKQREEDEPIDERSLASTSYAATSIRERLEQHFNDDLPDGFAPVAVDVYGGSLTRESRRAGGIDKSIMLRGQSDKNRFDVRHHAIDAAVMTLLNPSVAVTLEQRRMLKQENDYSSPRGQHDNGWHDFIGRGEASQSKFLHWKKTAVVLADLISEAIEQDTIPVVNPLRLRPQNGSVHKDTVEAVLERTVGDSWTDKQVSRIVDPNTYIAFLSLLGKKKELEADHQRLVSVSAEVKLLADERVQIFPEEAASILTPRGVVKIGDSIHHARLYGWKNQRGDIQVGMLRVFGAEFPWFMRESGVKDILRVPIPQGSQSYRDLAATTRKFIENGQATEFGWITQNDEIEISAEEYLATDKGDILSDFLGVLPEIRWKVTGIEDNRRIRLRPLLLSSEAIPNMLNGRLLTQEEHDLIALVINKGVRVVVSTFLALPSTKIIRRNNLGIPRWRGNGHLPTSLDIQRAATQALEGRD

SEQ ID NO: 18656 - protein, 1132 aa, unidentified
  REGION 1..1132: note = Cas Enzyme sequence
MSADSLNYRVGVDVGDRSVGLAAIEFDDDGFPLKKLAMVTFRHDGGMDPATGKTPKSRKETAGVARRTMRMRRRKKKRLKDLDKKLRDLGYFVPRDEEPQTYEAWSSRTRLAESRFEDPHERGEHLVRAVRHMARHRGWRNPWWSFSQLEEASQEPSETFGRILERAQHEWSERVSDNATLGMLGALAANNNILLRPRRYEHNPKTGKNAEKLNVRGQEPILLDKVRQEDVLAELRRICKVQGIEDQYPELAHAVFTQVRPYVPTERVGKDPLQPMKIRASRASLEFQEFRIRDAVANLRIRVGGSERRPLTEEEYDRAVDYLMEYSDTTPPTWGEVADELEIAENTLIAPVIDDVRLNVAPYDRSSAIVEAKLKRKTQARQWWDDDANLDLRSQLILLVSDATDDTARVAENSGLLEVFESWSDEEKQTLQDLKFDSGRAAYSIDTLNKLNAYMHEHRVGLHEARQNVFGVSDTWRPPRDRLDEPTGQPTVDRVLTIVRRFILDCERAWGRPQKIVVEHARTGLMGPSQRADVLKEIARNRNANERIRQELRAGGVENPNRADIRRNSIIQDQESQCLYCGKEIGVLTAELDHIVPRAGGGSSKRENLAAVCRACNASKGSRPFAVWAGPARLERTIQRLRELQAFKTKSKKRMLNAIIRRLKQREEDEPIDERSLASTSYAATSIRERLEQHFNDDLPDGFAPVAVDVYGGSLTRESRRAGGIDKSIMLRGQSDKNRFDVRHHAIDAAVMTLLNPSVAVTLEQRRMLKQENDYSSPRGQHDNGWHDFIGRGEASQSKFLHWKKTAVVLADLISEAIEQDTIPVVNPLRLRPQNGSVHKDTVEAVLERTVGDSWTDKQVSRIVDPNTYIAFLSLLGKKKELEADHQRLVSVSAEVKLLADERVQIFPEEAASILTPRGVVKIGDSIHHARLYGWKNQRGDIQVGMLRVFGAEFPWFMRESGVKDILRVPIPQGSQSYRDLAATTRKFIENGQATEFGWITQNDEIEISAEEYLATDKGDILSDFLGILPEIRWKVTGIEDNRRIRLRPLLLSSEAIPNMLNGRLLTQEEHDLIALVINKGVRVVVSTFLALPSTKIIRRNNLGIPRWRGNGHLPTSLDIQRAATQALEGRD

SEQ ID NO: 18657 - protein, 1403 aa, unidentified
  REGION 1..1403: note = Cas Enzyme sequence
MEHKYVIGVDPGTGSLGLVVRDTDENELIDQIKFASVDIIRSGVIESGQNKYISFAAERRGYRNARNRYMHRKWRKQETLKLLTDANVLDGTIKHLLCPLSKGDLERWIRYDKEKGLKREYPIHSVAFAHWLMMDFDGDGKVDDYSSPYQIRKELLERQFDFSTPEDCMKLGRALYHIAQKRGFRSCKGDKVNDEDLPVDGNQMENEDFDAMEYSEHKKSKLLRDYMQEQGITDKSVGYALALLENEGIRLRDSDYQVVRKDLKKEVKAIFEYQEQLSTDSYLYKRLISEKKGEGTLFYQRPLRSQRGNVEKCTLEPLKKRCKTSHPEFEKYRAWSFINSIKIKLLDDDVLHTLPFDMRQRLYHEKFSKIVSKTFEFASIRKWIEKELGIHDSLSAKAKTINYYDDHSVGGCPTIGRLQKILGSDWQSWTLETDHIRKKKNGTEHRVRYDALTLWHICTEAENETFVEEFAKNHLPFDEVQIKELVRLHKNASDEYANLSLNALKKINYFLEHGFNNYEATLLANIPSLVGAEQWKEHGEEIETHLQEIIDSNREKKRYLSIANRLIADYNSLDDKERFADDPHHDYKLQESDFRDIEKIIKEVVGKMTWGKMAADDKESLIQKVAALYQQYFESDKRTYYKMPKDMDAIREYLHIAFGIELDKDNRIYTPYDNKYYPQASHTNECWKLCSPVKGALRNPAAMRILHLMRRRINALLKDKSLGITPENTRVVVELPREVNDANMRRAIDIYQSRRKKENEIFKSLIKEMTDEDERLQKTRLLIEQSPQYLLADFNEKLQKNNSYNDKLEYAATKYRLWLEQDCMDIYSNHPIPFSGLFDENQYDIEHTIPRSIVLQDGLDNKTITSASFNRKVKGNLLPSQLDNYKTVILPNLKPWQERVERLEERVKYWLKETKRAADPDRKNYCIVQRHLWQMELDYWSSKLKRFTITEVTSDFVSKQMADTRVISKYVFHYLKSFFGRVDVQYGSTTATFRKIYGLPEKDRSNHTHHAIDAAMLAMIPTTARRDAMLRLFYQIDEEKKAGHADEAKLLKDELEQEKKLCLYGSKYAKPSRSRMIDVAHHLKETVMVNHETKDQTLTPARKRASIKKKGQRINIVKSGNSIRGRIHKDSFFGAIKPWVIDKDGVFLRDEQGQPYATAIKYVKRYKLQCGEDFDSWEKLEKRIVDKALFRQLKEQAQGLSFKEACAKGFYVSRKVNGRIVTNKIRHVRCEIPVNLSHLPTKKHIFMSSKDYKQFYYAESADLQYCCEYMGSNEISYVSYTLYDISMNMKKGEEAFPKNILGKREQLHLNRVLTKGDMVLLYKESEDELKALDKSQLAQRLYVISGFEKRKERTDTIKLVKHNFSAAKDVGKGKSIANFNEMIQQNKIQMAINKVKFVQIQLL

SEQ ID NO: 18658 - protein, 1054 aa, unidentified
  REGION 1..1054: note = Cas Enzyme sequence
LKKILGLDMGVASIGWSLIEYNQDDEGNIIDSGVRIFDQNLQRDNEAQKGESKNQQRTLHRGMRRQRDRKRRRKRGLYYSLKGVRMCPVKSENEEWNKWIDLNPYELRTKGLDEQLSLMEFGRVLYHLNQRRGFKSNRKVGKDSEDGAVATEISKIRAEMKKKGMRTLGEYLFSLQENHFDPPVSPNHDDYEFKRRIRNKYTHRNMYEEEFELLWEKQTQFYPQTLTEKFKAKLSDDTIFFQRPLKSQKHLIGKCSLEPDKKKIPKGHLLFQKFRIEKTLNNLELMGEYGQSLDMTDEHKKIIREKLERSDHVSFSQLKKDLGFNSNAKFNLETSDDSKLKGDTTSKKLSSKNAFGKEWYGLDEEFKNHVVDVLIHVEKPDVVEDLALNKWGRTKEQANHLKMLQLEKGYGNFSYKVIRKIMPLIKEGKRENSAIKEVYGEVKKTPKEDVFQLPLLDPKDYRNPVVFGAMVELRKVVNAVLRKHGLPDIIRVELARDLKNSKKLRDEITKKNNKLEKRNNEAIKALKQSPFNYQNPSRTDIIKYNLWIECNKTCPYTGRVINGEALDRGEFEIEHILPFSRTLDDSYANKTLCESDFNRRKGNRTPYECVEAGLLSKEELEQRIKNNLPWRKRRKFTQKTIDTDEFIARQLNDTRYMSREASKYLKQLGSEEWPVVIQVTKGQTTSLLRHLWGLNSILSIENDEIKNRDDHRHHAVDAIVIALTSRSILKKLSDENKLIETENWMDEEESSVDRNRQIKDRASKRITNTPPWDTFWQDSQESVNQIIVSHKVSRKISGAFHEETYYGSTEESSSKKDHIKYLVVRKRVEALSEKELGWNSKTQTFDKEGKVFIRDEHIKKIVRDKIWKKYKETGDIKKAIAALETDPPKLFHKNGKDFNLIHKVRLLMEKDLSKMNEFEDEPKTPTRYALYGNNHHIAIYEYTDKNGNKKQTGEVIPTMEAARRVLDKESIIMREHPEYDRFLFSLSTNEMVQDAEGNVYRVQKLTSTGEITFRSHNIALKGPFDPGVIRKMGTTVDFKKIRIDPIGQIFPAND

SEQ ID NO: 18659 - protein, 1046 aa, unidentified
  REGION 1..1046: note = Cas Enzyme sequence
MGVASIGWSLIEYNQDDEGNIIDSGVRIFDQNLQRDNEAQKGESKNQQRTLHRGMRRQRDRKRRRKRGLYYSLKGVRMCPVKSENEEWNKWIDLNPYELRTKGLDEQLSLMEFGRVLYHLNQRRGFKSNRKVGKDSEDGAVATEISKIRAEMKKKGMRTLGEYLFSLQENHFDPPVSPNHDDYEFKRRIRNKYTHRNMYEEEFELLWEKQTQFYPQILSEKFKAKLSDDTIFFQRPLKSQKHLIGKCSLESDKKKIPKGHLLFQKFRIEKTLNNLELMGEYGQSLDMTDEHKRIIREKLERSEHVSFSQLKKALGLNSNAKFNLETSDDSKLKGDTTSKKLSSKNAFGKEWYGLDEEFKKHVVDVLIHVEKPDVVEDLALNKWGRTKEQANHLKMLQLEKGYGNFSYKAIRKIMPLIKQGRRENEAIKEVYGEVKKLPKEDVFELPLLNPNDYRNPVVFGAMVELRKVVNAILRKYGLPDIIRVELARDLKNSKKLRDEITKKNNKLEKRNKEAIKALKQSPFNYQNPSRTDIIKYNLWIECNKTCPYTGRVINGEALDSGEFEIEHILPFSRTLDDSYANKTLCESDFNRKKGNRTPFECIEAGLLSEEELEQRIKNNLPWRKRRKFTQKTIDTDEFITRQLNDTRYMSREASKYLKQLGTEEWPVDIQVTKGQTTSLLRHLWGLNSILSIENDEIKNRDDHRHHAVDAIVIALTSRSILKKLSDENKLIETENWMDEEESSVDRNRQIKDRASKRITNTPPWDTFWQDSQESVNQIIVSHKVSRKISGAFHEETYYGSTEESSSKKDHIKYLVVRKRVEALSEKELGWNSKTQTFDKEGKVFIRDEHIKKIVRDKIWKKYKETGDIKKAIAALETDPPKLFHKNGKDFNLIHKVRLLMEKDLSKMNEFEDEPKTPTRYALYGNNHHIAIYEYTDKNGNKKQTGEVIPTMEAARRVLDKESIIMREHPEYDRFLFSLSTNEMVQDAEGNVYRVQKLTSTGEITFRSHNIALKGPFDPGVIRKMGTTVDFKKIRIDPIGQIFPAND

SEQ ID NO: 18660 - protein, 1046 aa, unidentified
  REGION 1..1046: note = Cas Enzyme sequence
MGVASIGWSLIEYNQDDEGNIIDSGVRIFDQNLQRDNEAQKGESKNQQRTLHRGMRRQRDRKRRRKRGLYYSLKGVRMCPVKSENEEWNKWIDLNPYELRTKGLDEQLSLMEFGRVLYHLNQRRGFKSNRKVGKDSEDGAVATEISKIRAEMKKKGMRTLGEYLFSLQENHFDPPVSPNHDDYEFKRRIRNKYTHRNMYEEEFELLWEKQTQFYPQTLTEKFKAKLSDDTIFFQRPLKSQKHLIGKCSLEPDKKKIPKGHLLFQKFRIEKTLNNLELMGEYGQSLDMTDEHKKIIREKLERSDHVSFSQLKKDLGFNSNAKFNLETSDDSKLKGDTTSKKLSSKNAFGKEWYGLDEEFKNHVVDVLIHVEKPDVVEDLALNKWGRTKEQANHLKMLQLEKGYGNFSYKVIRKIMPLIKEGKRENSAIKEVYGEVKKTPKEDVFQLPLLDPKDYRNPVVFGAMVELRKVVNAVLRKHGLPDIIRVELARDLKNSKKLRDEITKKNNKLEKRNKEAIKALKQSPFNYQNPSRTDIIKYNLWIECNKTCPYTGRVINGEALDSGEFEIEHILPFSRTLDDSYANKTLCESDFNRKKGNRTPFECIEAGLLSEEELEQRIKNNLPWRKRRKFTQKTIDTDEFITRQLNDTRYMSREASKYLKQLGTEEWPVDIQVTKGQTTSLLRHLWGLNSILSIENDEIKNRDDHRHHAVDAIVIALTSRSILKKLSDENKLIETENWMDEEESSVDRNRQIKDRASKRITNTPPWDTFWKDSQESINQIIVSHKVSRKISGAFHEETYYGPTEESSSKKDHIKYLVVRKKVESLSEKELGWNSKTQTFDKEGKVFIRDEHIKKIVRVKIWEKYKKNGDIKKAIAALETDPPKLFHKNGKDFNPIHKVRLLMEKDLSKMNEFEDEPKTPTRYALYGNNHHIAIYEYTDKNGNKKQTGEVIPTMEAARRVLDKESIIMREHPEYDRFLFSLSTNEMVQDAEGNVYRVQKLTSTGEITFRSHNIALKGPFDPGVIRKMGTTVDFKKIRIDPIGQIFPAND

SEQ ID NO: 18661 - protein, 1085 aa, unidentified
  REGION 1..1085: note = Cas Enzyme sequence
MKGERKGELIIGLDLGMNNVGWSLTEQADDHLEILGMGTLVFSSPLIDLNKPEEGYKSKQRGQHRRQRRTLQHRSTRRKHLYRLLARLGMMPLDPEARAHFLCRNKDGHVRVDPFTLRAKAVEQPVSKTELGRALCHLNQRRGFLSPRDLMLLGIAKFDPEDLEEEPHETEPGKDEEDTGLILSEIKRTKAEVGSRTLGQFLLERVQAGEPVRKKKFSDQKNLPDGTSVKNRINAKRHSELYWVRADRHMVEAEFNRIIATQRPHHPELTDDVVQQMHRIIFHQESMQEAGIRGHCTLRPDKPRALRASIHGQRFGLLNDLVNLDIAEGPAEPLRRLRPAEVEILLEALMNGEDLTWAEAKRHIGLDDHARFSVEPAPGTKRGKKTQPGTKEKLRGSQTIARVRQVLGEKWEQMHPEGRHKLIHEITSLRQPAGKAKTHDFLPHGIKPAHHRLNLFRRQEYGGVRFTEDEAKRLATLKLPDGTMSVSSLAIRELTYVMLGRDQARDEVLRMFEAIPIAYERDHSPRPQQNLDWDELRKDALEIGHPLVRCAVINALRVLKALVEEHGVPDRIHVEMLRDLAKSAARREEDSRRQAVNEKERRTLVAELMTHRIPPTEGNIRKLRLAYESDWQLPYEPGRRIQDIRDLFEGGYDIDHIVPRSHGFDDSFGNLVLCSNNVNAQVKGDRTPYEVFGKNAEEWQQITAHVKAIKSMPLRKRERILQKTRPEGFLERDKATSGYIAREVLALCQKIVARPEDVVPVPGRLTAELRRRWELEGLIPLHPEEEAQLAPKREIRAMPENSEALETQDPQVISKAVKLRSNYLHHALDALVIALSTRSNYQALQAYFKLKEENSYRSLTQSERKEQKLQPPVSDLRALVAAALEQAVVVHRPNRRVSGGLHDQMAKRDRLPAQRTGEPGTAELVIEKKALVRYDETGRAAQAFPLGDNHHMVIWESVTPDKNGTYPREVEVVSLLEAQLRKARERPVIVRHRPGFRFVMALCKRDMVEMEDGTIVVMSMASAISPYKPYVLLWHPYVAAQLGKRNKDNPYLYQLVQTTSFLQKFRYRVILDLFGRVIFREGRDE

SEQ ID NO: 18662 - protein, 1180 aa, unidentified
  REGION 1..1180: note = Cas Enzyme sequence
MSKKLSRRYEEQAQEIRQRLGARPYSIGLDLGVGSIGIAVAAYDLKNKQPSDLVFVSSRIFTPSIGASERRQKRGQRNSLRHRANRLKFLWKLLAEKDLMLPYSEQDVPDPARLRFEDAVVRANPYALRLKGLNEQLTLSELGYALYHIANHRGSSSVRTFLDEEKSPDDKKLEEQQAMTEQLAKEKGFSTFIEVLAEFNANGLVGYRNSESLKGKGVPVPTRDIISNEIDILLRTQKQFYPHVLSDDYCERIVSAMLYENEKIVPEAGNCPYFPDEKKLPRCHFLNEERRLWEAINNARIKMPMQEGVAKRYQSESFSDEQRHILFHIARSGTDITPKLVQKEFPALKTSVIVLQGKEKATQKIAGFRFRKLEEKPFWKRLNEEQKDDFFSAWTNTPDDKRLSNYLMGHFHLSEAEVVDALKTVSLIGDYGPIGKTATQLLMKHLEDGLTYTEAIEKGLEDGELQELSAWQEHALLPYYGQILTGSTQALMGKYWHSAFKEKRDNEGFFKPNTNSEEEKYGRIANPVVHQTLNELRKLMNELITILGDKPKEITVELARELKVGADKREDIIKQQAKQEKEAARAFSEYCEPNNLDKRYIERFRLLEDQAFVCPYCLGHISVADIAENRVDVDHIFPRDDTADNSYGNKVVAHRHCNDIKGKRTPYAAFSNTSAWGPIMHYLDETPGMWKKRRKFETTEEEYAKYIQSKGFVSRFGSDNSYIAKAALEYLRCLFDSKNCSAVGSLKGMETSILRKAWNLQGIDDYLGSRHWSKNDEASPTSRKNRADNRHHGLDAIVALYCSRSLVQMINTMSEQGKRAVDIEAMIPIPGYALEPNLPVADQRELFRKKILEFMELHAFVSMKTDNDVNGALLKDTVYSILGADPNGNDLVLCVRKKVKNISITDGSFKKIAEKIRSQFSEASHSWYSEKLKEQIQLIQEKNELVLEKYQNHLTDAENILKNENQYLIDNGKKPIEISNKSISKKALEMVGGYYYLISNNSRLKTLVIQEPMNNRKGFAIDKESNLCLDFYHDKQGQLCGEIIRKVNAMNPSYEPNYKQQGYILFVRLYQGDVCELKASIPNEGKDSNYSKAAGVKLPNAKTGRTFIIIKTFTERSVGIQIFFSNLAKSKTGQDTSFTLTTIKNYDVRKVQLSSAGLVRYVSPLLVDKLEKDEVELCGE

SEQ ID NO: 18663 - protein, 1122 aa, unidentified
  REGION 1..1122: note = Cas Enzyme sequence
TDLVFVTSRIFTPSIGASERREKRGQRNALRHRRNRLIFLWKLLAEKGLMLPYSTKSVDDPARLRFEEAMIQADPYKLRLKGLTEALTLSELGYALYHIANHRGASSIRTFLDEVQDADEKKLEEQRSITNKIMTEHNVSTFIEVLTIFNRDTFVGYRNVDKLKDKSIPVPTRDIISAELDRLLSTQARFHPDTLNEDYIQRIKDAVLYENEKIVPEPGDCPYFPDEKKLPRCHFLNEERRLWEAINNARLGEPDESGSFRRYNRISFSDKERQELFTYLRSGRSVTAATVKTLFPHYDNHEIILQGRERKTSRIEGFRFKHLEEKPFWTRFTEEQQDEFFAIWTNFADEKRVEEYLVMHLGLSEEEAADAIRTVKLIGDYGPLGKTATLLLMKYIEDGLTFIEAEMKALETGEFQERTSREVQEFLPYYGRILSKTTQALMGKYWHSSFKDRIDRPGFVKPNTDREEEVHGRIANPVVHQTLNEMRKLVNEVIEILGSKPSEIVVELARDLKVGAEKREEISKEQQRNEKRAQDIYDTYCKENGLSKRYIQAFRLYEDQQFICPYCLETISVAEIAGNQTDIDHIFPIEDTSDNSYANKVLAHGSCNKEKGKRTPYAAFGHTEKWGRIMHYLDATPAMKAKRWRFEKTDAEYAEYLQSKGFMSRFATDNSYIATAAFEYLACLFDYSERNSVRTTKGWETSILRKAWNLHGIDDYFGSMHWDKKDSPDSVKGKNRGDHRHHGLDAMVSLYTSRSLIKQINTLSSKGMKAEEIESLIPIPNYYRDDSLPREDQRNLFRKYVQSFFERNAFVSVKTNHAINGPLVKDTVYSILGANPKGDELVFVVNKKVKDIQVKKGTVEEVESAIKGKFSDKTWYDDELRMKIEAIQRTNEEIIDRYKSNLVQAERTLIEENRKLEEEGKKQRTINENLISKKALELSGGAYQLLSNNSRVKTFVAKEPTTTSKGYGFDTGANLCLDLYHDEEGKLQGEIIRKVYAMDPNYIPTYKQKGYKLFERIYGGDTLEITASSPIAEEKEDAIQKIARIRVPNAVDGRTYIRVETFTERASGIQIFLSNISKADGGQDASFRITSMQQYDVRKVQLSPAGLVEYVSPVLKDLEMGG

SEQ ID NO: 18664 - protein, 1175 aa, unidentified
  REGION 1..1175: note = Cas Enzyme sequence
MAKKLSKRYHRQAEEIRARLKGRPYSMGLDLGVGSIGLAIAAMEESKDYGYEPTDLVFVTSRIFTPSIGASERREKRGQRNALRHRRNRLIFLWKLLAEKGLMLPYSTKSVDDPARLRFEEAMIQADPYKLRLKGLTEALTLSELGYALYHIANHRGASSIRTFLDEVQDADEKKLEEQRSITNKIMTEHNVSTFIEVLTIFNRDTFVGYRNTGTNKSQSIPVPTRDIISAELDRLLSTQARFHPDTLNEDYIQRIKDAVLYENEKIVPEPGNCPYFPDEKKLPRCHFLNEERRLWEAINNARLGEPDESGSFRRYNRISFSDKERQELFTYLRSGRSVTAATVKTLFPHYENHEIILQGRERKTSRIEGFRFKHLEEKPFWTRFTEEQQDEFFAIWTNFADEKKVEEHLVTHLGLSEEEAADAIRTVKLIGDYGPLGKTATLLLMKYIEDGLTFIEAEMKALETGEFQERTSREVQEFLPYYGRILSKTTQALMGKYWHSSFKDRIDKPGFVKPNTDREEEEHGRIANPVVHQTLNEMRKLVNEVIEILGSKPSEIVVELARDLKVGAEKRDEISKEQQRNEKRAQDIYDTYCKENGLSKRYIQAFRLYEDQQFICPYCLETISVAEIAGNQTDIDHIFPIEDTSDNSYANKVLAHGSCNKEKAKRTPYAAFGHTEKWGRIMHYLDATPSMKAKRWRFEKTDDEYAEYLQSKGFMSRFATDNSYIATAAFEYLACLFDYSERNSVRTTKGWETSILRKAWNLQGIDDYFGSMHWDKKDSPDSVKGKNRGDHRHHGLDAMVALYTSRSLIKQINTLSSKGLKAEKIESLIPIPNYYRDDSLPREDQRNLFRKHVQSFFERNAFVSVKTNHAINGPLVKDTVYSILGANPKGDELVFVVNKKVKDIAVKEGTVEEVESAIKGKFSNKTWYDEELRMKIEAIQRTNEGIIDRYKSNLVQAERTLIEENRKLEEEGKKQRTINEKLISKKALELSGGTYQLLSNNSRVKTFVVKEPTATSKGYGFDTGSSLCIDLYHNAEGKLQGEIIRKVYAMDPNYIPTYKQNGYKLFERIYGGDTLEITASSPIIKEKVSAIENITRVQVPNAVDGRTYVRVMTFTEIISGIQVFLSNIAKANGGQDASFTIGSMQQYDVRKVQLSPAGLVEYVSPVLKDLEMGG

SEQ ID NO: 18665 - protein, 935 aa, unidentified
  REGION 1..935: note = Cas Enzyme sequence
LPARGELWEALFSDHAINPYVLRRKALDHPIELQELGRIFYHLCIHRGFKSNRKAMLSTMVNDPDVAAVIAEEEAEKSLKPKKDDEEGVVLQAINELTKTLQEEGSRTLGEHLANLVDAGGRARRGLGNAANISRDMIEQEFDLIWQAQAKHHRALTNTLRAQVYRVIFFQRPLKIQRSTIEKCLLELGRKRAMKAQIVSQQFRIWQIINNLKFDTGTSEGYKNLNKEQQEALSEKLNETEKLSWTSVRKACGLKKETFNFEESGEKELKGDKTSCRVKKHIPELWESLSELERDEFVHDLIHTDRIDGVIKRLRSHWKLTPHQAYKVATLELDSGTTSLSAKAMRKLLVYLRQGKRYDEACFEVYGKKAPLTREGTVEYLPFPKDARNPVVNKAMHELRKVVNAIVRNYGPIDIVRIELARDLKLTKREKDEVSKRNRQNQKLNEEATEKIKELPAFRGVTPSHDDLEKYRLWVESDQTCPYTGRTVALAELFGPDYDVEHIIPYPRCWDDSFANKTICYAPINRSTKGKQTPKEAFTEAELEAIKTRLSTMHKMGRAKKERFSLDWNDQQSERFLNRQITDTGYISKYAREFLSQLVGETNVQVSKGGSTALLRHRWGLDTVLGGTGKNREDHRHHAVDALVIALISRGLFQQISKLSGQHGSMSLRSSEFDVPSPIPNLRQQALPWIQEMLVSHQTTRKIAGALHEDTAYGKASPGTYVYRKEIVSLTPSEIQRIRDPRLRRDLGKLGSEQLKAADPMQPFTYQDKYNRTRVVRSVRLTAAKRDSNMVDLGYKYHPKGSNHHVAVYENADGERRYLVVSTFDALRRIKHGMKLYDNDALPGYRLFTAWHANDVVEVEGRAERFYRVVQFSDNDEGQGRKMALLLRPLRRVSQSENLFNPDRAGPYEDLLCKSPEKLALVGACLELSILGHLK

SEQ ID NO: 18666 - protein, 964 aa, unidentified
  REGION 1..964: note = Cas Enzyme sequence
MKRRSRRTLHRRAQRKRNLYHLLAKNGFLPMRMDERVTFFCRNKIDGREVNPYALRARAIRERLEPFEIGRVLCHLNQRRGFLSPRELMLMGVAKPDEAYDAPLDEKEGPIKQEIRQTKDAMQGFPTLGAFLYDRMTSGEPVRKKVRGATDAEKKAENARRFVRHDRALIEQEFDAIWAAQAKYHPLLTDNLCEQVHTQVFRQIPIGKQIGLRGKCTFFPEETRIARASLTTQKFLLAQDIANLKFSSPSQPEPQALSEKQRKALLQELNRHDQLTWAEVKNAVGLGPTAQFNVEPPPGRTQAKGSKKFLVGNRTAIELRKLLGDKWDALGELGQRTLVGEMLTVPDDPKNRGSHKEIRTAAKKLFDILQSKPYGPNGVTFTQTEAANLATIDLPAGYLNLSLKAVKKLTPSLLKDCTYDQACARVGLDHANPDETGEVFDRLKPEFAEAIRHPLVRCSVLSAIRVINQIIDRYGKPSGIHIELPRDLARSAKQREEVEKEQREREKIRNGYRKLIEEAGFPVNDTNLKKVDLWHEAGKVLPYEPDVTISTVKELLAADIEIDHIVPRSHNFDNSRGNLALCTRDFNIRIKRNGTLYAGVMAYDPGRWAQIEAHVRSIKTMSPAKRDRILAKTLPDKDFMGRHFSSTGYISSEVLRIVRKLWVEDVVVTNGSITGELRRRWGLNKVVPLHPEEIDENGKPKKTKSRSNYRHHALDAVVIALTDRSLGLAVTKYYQEYERTGIRPESGFPCPIPAMRHWTAGTIADWPVVHRPDRRASGAMHNETAYAVPPGTPEGKPFTSQVVGNKLIRYDREGKPAQAYALSNNHHVVIWERTTPNKKGEFERCAEVVPTIEAVRRRQRKDSVVRTHRVEPGWRFVMALCKGDMVEMEDGTIGVVSKFSAKQKPCDAELAIWAPYAALKLGKVNKDNGYIVAYIQTAGRLAEVRRRVVLNAFGDVVWSEGGEG

SEQ ID NO: 18667 - protein, 1035 aa, unidentified; identical to SEQ ID NO: 16502
  REGION 1..1035: note = Cas Enzyme sequence

SEQ ID NO: 18668 - protein, 1035 aa, unidentified; identical to SEQ ID NO: 16503
  REGION 1..1035: note = Cas Enzyme sequence

SEQ ID NO: 18669 - protein, 1035 aa, unidentified; identical to SEQ ID NO: 16501
  REGION 1..1035: note = Cas Enzyme sequence

SEQ ID NO: 18670 - protein, 1034 aa, unidentified
  REGION 1..1034: note = Cas Enzyme sequence
MDIFYLYTSFKCRKDTVMSQLTLGLDLGIASIGWALVSENGNKRNLLNWGSRIFQPGMDDDIASGKGVSRCAERRLKRALREQYHRRKERKTQLIESLIAGGLLKNTPNAEFFAEIDKRLLESLPQNMRWQTAHLIPYFFRKQALDRQLKPEEIARAIFHLAQRRGYLSNRKQEVKDEDSGVVKNGINELAQALKDSGARTLGEYFCSVDPEVERIRCRYTSREMYVDEFRKICQAQRATISEELEKQLYRAIFYQRPLKSCKNLIGRCRIYPELPRCSFVKEEAQLFRIYTTVRNLRVESAGTIRSLTDAEFQKCVDFLDSYSPLFKKNGKIQLSKLQKAIGLSKEEKFTLADEEKEIYGNELKNILFRAFGENAGKLSISEKEKFFNDLSSIIKEDVLRKRLHNYWHLSEEKIDDVCGIALPDQYCAFSQKALQEILPELAAGIDLGTILKLESPDFRKEELDILPLVDKSGIELRNPVVHRVLTELRRLINAVIKRYGKPDIIRIELARDLKATNKEREKITRQNREREKIRAEIVEEIIKECGIKNPKRNDILKVMLARECNFVCPYSGKHFSMSDLFNGQLEVEHIIPYSRSFDDSFANKTLCLREYNARKSNRTPYEAFSGSNEYSAMLARVADFKGIYAERKLELFEQPEVVAEDFLSRNLNDTRYASKLAMQYLSLLYGGIVDKTGKQRIFATSGSCTALIRRAWGGNFLLGEGEKVRDDHRHHAIDALTIALTTPELVRWAAGMNVEQRKQMYESKDFVDNGLFHQAQEQLDAVVVSHHVVNKMRGELHNATLYSKDFGAGERHSRVALDKLSVKDLSNIVDEAVQKIILDKLGVSNIAEVSDSMLKIFKEPANFPVMKDKKGNVVNIIKKVRVKENKRTISIGKGDGKREVANGENYILAIFARLDENGNEIAWEGEIVSLLDAVLRHQKGLPPFEKNRPGMKFKFSLQKGDIVTWEKDGKLIPCIIRGISLPQFYCVPINDARMQKELKAAKAWYTPTLSAARCGKMQKYTMDIFGNLRRAND

SEQ ID NO: 18671 - protein, 1054 aa, unidentified
  REGION 1..1054: note = Cas Enzyme sequence
MILGLDIGTNSVGWCLVSTRDGKPNGIIAAGVRCFAAGTKGDLERGREQPRGAQRRGARLMRRQTWRRQRRQRKLFALLQRHDLLPRTSAHDPTSIHACLQELDVTLRDADAQAATHRGQQVFLYRLRARAASEQVSRHELGRALYHLAQRRGFLSNRKKPLKDSGDDLGRVQTSIEGLVEAMRVSGSPTLGAYLATLDPDDERIRARWTARRMYVDEFNAIWDRQALNHSDLVPALRKQVFDAIFHQRPLKDQSHLIGRCELERGSADGPRGERRAPIAHPVFQRFRLLQGVNNLRIQAPDAATRPLTLEERTRLIDALSTTGDMNRTAIKRLLTLSPRVKLSIEEGGETRLPGDRTVSALRGIFGSTWDQLSAPERLQVLEDLMTFEKADALRRRGQRRWGLSGQAAEDFADLTLEDGYASLSVKAMERLIPHLEAGLSYSEALVKEYPDAFAANRVCDELPAVRSSEAFPELRNPTVVRSLTEVRQIVNEVVRRHGKPDVIRIELARDLKRGRKQRRDLWERMREQESLRKAAAAKITRETGDHHPSPRDVEKVMLANECAWQCPYTGRHFSMRDLLGDSPAVDAEHILPFSRSLDNGFFNKTLCFNEENRRKHNRTPFEAYAGSEQWAEILGRVKSFQGRGATEKLRRFTLEWVDLELSDEFTERHLNDTRYASKLAAEYVGRLYGGTIDQTGRRRVQVSTGALTAFLRWRWDLNKLLNDGDEKARDDHRHHAVDAIVIALTDAGAVKALSDAARRADELGRRRLFAEVQAPWDGFLDEARRVISGLVVSHRVSRRLNGALHEETLYGPPQPGDGHSGKQDVRHVRRPLAALSEGDLKAIVDSGIRERVRRQLDALKARDPKLASPAKAFADVRNHPIIETKSGRRIPIHHVRVRKTVTAVPIGTEATRRYVAPGSNHHMEVVAKLDSDGNCVRWDGHVVSRLEAMERWRSGVPIVRTAWGSDGTFQFSIASGDSLRLDLGIGQPALCVVNTVWGNRVEVTRCEDARSKSEIRHLGKEGGRLRFGVEALRRAKAQKVSVSPMGDVAVARD

SEQ ID NO: 18672 - protein, 1053 aa, unidentified
  REGION 1..1053: note = Cas Enzyme sequence
MGKVLGLDVGTNSLGWALVDTDNNEIIDMGVRVFQEGVSGLNTGKEISKNAERRGYRLTRRQYDRRKRRKEKLKNLLIRIGLMPSDIDEQKQFWKMNPYALRVKGLDRELTPYEFGRVLYHLNQRRGFLSNRKAQSEEEDKGTIFEGAKDDNKPGINVIKEALQSGTYRTLGEYLHSLDTTEQRIRNRFTARSQYIQEFESLWSIQKEYLPTLLTDENYYSIAKKCIFFQRPLKSQKKTLGHCPFEPKKFRAPKSQPLSQEFRMYQMLNNLRIRTKDRVTDEQQELTGNEYEALEKFLMLNPSLDLSKGKLKKDMLKVIGLSKNDEYEFNYDKILGMDSVSKILKVLGDQYSYTSDNEFIHHVWHTLYFNENPEQVKYFAIRKWSLDKDTAEALKKVKLESGYLNLSSKAIRNILLYLKQGMRYDEACVQAGYNHSNPTSNSTILEFIPPINQKEIRNPIVTVSLSQMRKVVNAIIREYGKPSEIHVELARDLKKPITQRLDILKANKDRAKQREMIKAELEQYISYPTNNDIRRYELWKEQKEMCPYSGQKISLSRLTKPDSDIDVDHILPYSRTLDNSIANQVVCLREENAKKGDRTPWEAFSHDDIKYHEICERAKYLPQNKRKRFLMNNDAFTKYMDSEEGGDFIQRQLTDTAYIARETMTILQQVCPNIIATKGTATADLRHLWGLNHVLGLKEKVDEETGEVKVKKNRDDHRHHAVDALVIALTSRWSLSLLSKWNAGSSYSHRRDVARFVLSKPWEHLVDETKQKVSTIIVSHKVRKKIRGGLHEGTIYGRLRDSFTGELSFNESGIPLYKVRKPLHSLEDIGQVHKIIDPVIRDLVINRMIQQGADPKAIASGKKVSVPKSTFSEPLYMPKNDGTLGPKIRTVRLMVPAGKIFPISTEGVRSKAFVAPGNNHHIVIFEREHNGKPERWSQVVSLFEVVKRLNQNEAPIMREKEDWDFYCSLQANDLFIPGISSIDEYDIKKHKIYRVQKITDGEITLRKHNVAILDVKQSDGSYFTPGRLFKTPNNIRGIKVKISPIGKLEECYD

SEQ ID NO: 18673 - protein, 1145 aa, unidentified
  REGION 1..1145: note = Cas Enzyme sequence
MNKIIGIDTGTSYTGLSLIEQNDNEITKILDVKVIQSSFENESKYNTSDFKTPTTVRRLKRSARKNRKHKHTKLYNIKKELLNYFNLSIKKDYINIIDLKIKGLSEKLNLDELLAVIYNYAKYNGYNEIDDDIIDGETKSEYKKKICNITDWCDKNNLTISSYYKMLSDESKKYRHSDYPIHNSLHKKEVKLLLNNQKNYYPELITDDFIKNIIKKIYFRRGLKSSRHLISDCPYEKYKKVCPKSHPLAQEYLIWEVLHNLRLTTINNIEIEITNEEKKYLFSVLNTTNEELSNIEIIDKIIDYRKRNYVLKYDILYNIEDIEHSQLINLETQQIYTLSDYEINFLKNIVKIEGISFNSIKNELYDPTLFKLSHKKINGNKTKIKIIKIINDNLKILKENSVNKINDKEFYKIVDNIIEDFWLKIYSETNKNNIIKSFNKYNENSNKYFELSSEQIEQLSLLNLSDDFIDCSSRALKKILPYMNGEKDFKNHYDVINTIYKQKTIENNNELCNIKMNSLRNPIVEKQINNIINQLNYWKHNNMIDNNTSVNIELSRDLMLPKKIRIKIEKNNYKNNKNNKFIEDIIIYYKKRNSASSIKRIKLWFEQGGEIDKNFKIIKNAADIYCDDEITIDDALNTLLYNIEHSVPESRYFGNNMLNLSLTKKEINSKKNNKTSYEFIKENYSIVEQEKIWKKIDNLYLKNNPNKIKWFKYGYENFPENMSNNQLVNNSYISKELVKILSTYFNPNNIKVTNGIITDYIKNELGYTEMFKENIKNNIIKYKNSDKIDKRIDDRNHALDAIVIAMVNQKVIHRINNMNKIYNLNDESLSNFIKKIANEFFNTQNHIDIVKTTIDKCMVRRKKSNLPFFIKKVKDKCGDIHKINCLRTPLHNETLYGKNWKEDDSYTRYISIEDFILDYKKLSSDIEKLKNNIDSGKSKNIEEDTNLLNKSIKKLNDFFDKIVDPYTADLFKKYGNTSDAIKKAIECEGKIRGIKKIKIKCKNNKLTKLSGNRNVDLANNHMIIIYKKNNNITHECISLYDYCNKKHKEVFINNNDNIINVFKINDYFVIDYTKEELQNMINNNNYDFLNKTFFINQLASDRLYFKPYYTTNEYFKSGKGVNKFYKEHNNKIVKIKINNYGKIYL

SEQ ID NO: 18674 - protein, 1214 aa, unidentified
  REGION 1..1214: note = Cas Enzyme sequence
LGIDTGTNSLGWAVVDYDERAQGDKYHLIDKGVNIFSEGVKIEEDRESSRAAERTEHRRHRLNYYRRKIRKIALLKLLSENGLCPPLSSEELKAWRLKKVYPCSKEFMEWQRTDDKENKNPYYYRNLCLTETLDLNNRSNRYIVGRALYHLNQRRGFLGNRKEETKESDGAVNKGINALTENMQKSGCQYLGEYFYLRYKNGEKIRKEYTDRLGHYREELLAICKKQGLGESLTERLLKVIILQRPLKSQKHSVGKCVFEPQKPRCPISHPLFEQYRMYSFINGIRLQGPDDAEMRPLTSEEKKAIVPLFLRKSKKDFQFKEIASKLSGTKNNFCYYKDKSDKAYKFNYHEDNNVSGCPVTAQLSAVFETGKDVDEWLGAACEVYTQGEGKTRLQIMNDIWHALFFFSDSDKLKEFAQNKLQLDGEHAEAFSKIKVSSDYASLSLKAVRKILPYMKHYGMKYSHAVFLANIPAVTGRSVGEDAMLPKEDVEDLMQRIAEYNPEITGIRTLEEYLKGYITWKYKIPDGGEKVLDKLYHPSMIETFPEVLRPTEGGYFQLSSPRTSSLRNPMAMHSLFRLRHVVNTLLREGKIDKETTIRIEFARELNDANKRVALRAWQRERENENKEYAKKIKEHFGEDYEPTDEDILRYRLWEEQDHICLYTGEKIALSDLFDGNKYDIEHTVPRSAGGDSTEMNLTICQSRFNREIKRAIFPIKDLPSYELIMERIERWKKEYEDIAKQIRKLNTRGLSDKDAKDRIIQKRHLLKLKYDYWWGKYTRFTMESVPEGFSRSQGVGIGVISKYARLFLKTVFPKVYVVKGLATSDFRKIWGLQEEYDKKQRANHCHHAIDAITIACIGKAEYDYLAQYYGNEEKRRWGLDSRRAFFPKPWATFTEDVKNIGDSLLISHYKADNIAKHTRKKVRKAGKFTGEYMQGDTARGVLHLDTYYGAIKRDDCVRYVVRRPLDSLGEKAVESIVDDAVREKVKAAVSEHGSLKEAVKAGIWMNRDKNVKINKVRVYANDVKHPLTIRKGKQRDLSKKEYKQGTFVKNDTVYSVAIYEGLGENGKISRKAIFHNTLDVAALLKQSGENHGQPIIPKYYPESDLELKHVLKIGTLVLMYENSEEEVYEDDRQGLRKRLYKVYGLASTNDKIKLIHHQEARRSKDLDKLTYYGAYRNEGIIAPRIWVSTKMFRALVQGWDFEINDIGEIKFLRR

SEQ ID NO: 18675 - protein, 1437 aa, unidentified
  REGION 1..1437: note = Cas Enzyme sequence
MKKILGLDLGTTSIGWALVSEKENETEKSAIIKTGVRIIQMDNFVSTATGKESKDPLKDFLGGNGISPNAGRTAKRGARRSLQRYKLRRKELVKILKENNLISDEFVLAEDGKNTTHSLWKLRAQAATEEVSLNDFARILLAINKKRGYKSNRKAKDDGDGQAIDGMEVAKKLYKENLTPGQYVLDLLTQDKKNIPEFYRSDLQDEFNKIWEFQKQFYSDILTSKLNEELKGKRGKAVWAICEKSLKEKDFELVGVKRETKGRKQKEENYQWRVDGLTKQLTLEQLVIVFQEINGQISKSSGYLGEISDRSKKLIIEKLTVGQYLYKQIKENPHTRLKNQVFYRQDYLDEFEKIWGIQAKYHKELTQELKKDIRDIVIFYQRRLKSQKGLISICELEGREAEIKDKDGKPILNAKGEPKRKIIGPRVIPKSSPLFQEFKIWSILNNLKFTELKTKTTYEVNNIDEDLEIRKQMFEVLNINGKMTSKDILKATFNKPEEWELKNYNSIEGNNTNQTLYKAYNTILDLAGYENINATDKDKTLKIFDSLEIKKEILDFDAELEGKDFEQQLSYQLWHLLYSYEGDNSKTGNEKLFYHLKEKFGFEKEYAKPLINISFKDDYGNLSAKAIKKIIPYLKAGHIYSEAATLAGYNHSHSVTKEENENRILKDELELLTKNSLRNPVVEKILNQMVNVVNAIIKEYGKPDEIRIELARELKKSAKERKETTEGINTATKIHNDIRKKLIEFYPFNTGVRITKKDIIKYKLWQELESNGYKTIYTDTYVELGKLFTKEFDVEHIIPKAVLFDDSFSNKTLSVREFNRWKSSKTGIDAIIEKYQKDSEDYKRYVSTIENLFKDKKISKAKYRKLLMKGSEIPDGFIERDLRNTQYIAKKAKEMLENVSRSVVPVTGSVTAKLREDWQLINVMQELNWDKYDKIGLTKYEINKEGKKIPRIIDWTKRNDHRHHAMDAITIAFTKHNHIQYFNYLNARKDDNHKLHKNIIGIEEKETYYNEDKNKLLMKPPMPINEFRAEAKKHLEQTLISFKAKNKVVTRNKNKTKGSDTFQETLTPRGQLHKETVYGKSKYYETKLEKVGTKFNEDKIKTVAKKSYREALLKRLEKFDNDPKKAFGGKNALTKNPIYLDDANTIELPKKVKIVITTDRFTIRKNITPDLFKDSKKNDIFSKKIYDENFIMDKGIRNVLNQRYSDTKKEVEAYNKTVEKKKQKKVLETAFTNLEENPIWLNKEKCIQLKRVTITGVSNAEALHTKKDQYGKELLDKEGNTIPVDYVSTGNNHHVAIYRDEKGNLQEEVVSFYDAVARVNANTPIIWKQHPEHPDWKFLFTMKQNEMFIFPNKKTGFDPIGIDLMDENNNADISPNLFRVQKISAKNYMFRHHLETIVGDKAMLKDVAFINYRNTDAVKDIIKVHINHIGKIVKVGE

SEQ ID NO: 18676 - protein, 1368 aa, unidentified
  REGION 1..1368: note = Cas Enzyme sequence
MKTILGLDLGTTSIGWALVKEGDNADIIKIGSRVIPLTTDEITNFDKGKSITTNADRTLKRSMRRNLERYKLRRENLIQLLIEKKAINEATLLNEHTNDSTFQTYKLRANAAKVKIELDEFARVLLMINKKRGYKSSRKAQGEDEGQAIDGMAVAKILYEQNLTPGQFAFDILKKDKKAIPDFYRSDLNDEFDKIWSFQSKFYPEVLNKTNKELFEGKAKNQTSAIFYKELKIESVDLVGKMNEKKFQRYELRSKAINKQLTLGELVEVFSDIKGNINNSSGYLGAISDRSKELFFNNVTVGEYLYNQVIENPHTRLKGQVFYRQDYLDEFETIWEQQAKFHTVLTPDLKKEIRDIVIFYQRRLKSQKGLLSTCEFESFTRNTIVDEKPKAQKFGPKVIPKSSPLFQDFKIWAQLNNVEILDVFGKSKVRNHLELEEMNLLYDELKYTDKLSTTEINRILGFQVKYKYNFENLEGNRTMAAFIDSFQKIIELSGHDDIDFKKMSGGEKIKTITDIFSMLDFETSILSYSSDIEGKDHMNQPIYQLWHLLYSYEGDNSKSGIESLLTILKTKFGFDKEYASILSNTKLQDDYSSLSAKAIQKILPYLKEGQKYDKACALAGYNHSNSQTTAQLEAKVLKDKLSILSKNSLRNPVVEKILNQMINVVNSVIETYGKPDEIRVEMARELKKGAKERENMTKSMNEANRNHDAIRITLQTEFGIKNVSRNDVIRYKLYLELKDNGYHTLYSNKKISKEMLFNGEVDIEHIIPQAKLFDDSFSNKTLELRQVNIKKGNLTAIDFVTEEYGEEGLKQYEERVNTLFNKAEKRTKFKKLMWKEEDIPDNFINRDLNDTQYIAKKAKEILEEIVRTVGTTTGSITNRLREDWQLVDVMKELNKPKYQALGLVEEIENRHGHKISKIKDWTKRNDHRHHAMDAITIAFTKPSYIQYLNNLNAKNDKTGVIYAIQNKETYFDKDNKRRFKPPMPLDVFRAKAKDHLENTLISFKAKNKVTTKNKNTTSKAGGQSTVISETPRGQLHLETIYGSSYKYETKIEKVNASFDALKIEKVAKKKYREALLQRLNENDGDSKKAFTGKNSLDNNPIFLDPLHTDFVPDSVKLVWKEQQFTIRKGISPELKIDKVIDKKTREILQKRLDEFNGDPKKAFINLEENPIYLNKERGIVLKSVTITGVSNAIALHNKKDHFGKDVHDADGNTIPVDFVNTGNNHHVAIYRDEKGNLQEEVVSFMEAVTRKNMGLPIVKNKHEKGWEFLFTMKQNEYFIFPNEKTGFNPNEIDIMDVKNYVLISPNVFRVQKLGSKDYWFRHHLETTLIDTADLKEICFKRKQNNNSLIGIVKIRLNNIGHIVQVGEY

SEQ ID NO: 18677 - protein, 1368 aa, unidentified; identical to SEQ ID NO: 18676
  REGION 1..1368: note = Cas Enzyme sequence

SEQ ID NO: 18678 - protein, 1576 aa, unidentified
  REGION 1..1576: note = Cas Enzyme sequence
MKKILGLDLGTNSIGWALIENDFEEKEGKILANGSRIIPMTQDVLDKFGSGQSHSQTAERTGYRGVRRLNQRHLLRRERLHRVLNILGFLPEHYANAIDFEKNFGQFKKGEEVKLNYNKVLGEGKEKPEYHFLFKDSFLEMVEEFKAVHPELFYKKTNGEEIKIPYDWTIYYLRKKALEEKISKEELAWLLINFNQKRGYYQLRGEEEEDQSKSFEVLKVKEVIDSGEQVKGNILYDIVFENGWFYDKQITKPEEWIGKEKEFIVTSKLNKDGSIKRTYKKVDSEKDWIAIKKKTEQDINQSNKTIGCFIYDSLLNNPTQKLNGKLVKTIERKFYKEELKAIINKQIDLYTELKDRDLYQACINELYPKNEAHRNNIAEKNFEYLFVEDILFYQRPLKSKKSTISTCQYEYRTYKKKDEETKDEKWVKEPLKCISKSNPIFIEFRLWQFLRNLKIYEQVGKKDVDLTPHCLPDENAWCDLFDFLNDKKEVDQKSVIDYFIKNKRLEKIKKDVYCWNYVSDKKYPMNELRAQIISRLKKINIDSNFLNKEREIHLWHIIYSVKDKGEFEQALRKYAIRYEIDADGFVDNFKKFPPFASDYGSYSEKAIKKLLPLMRVGKYWDESEIEEKVKQRISDIMARIETIKPDTLPEKENKRRIELDLRIENSADDDIPARLIKSFLPFYKQNPLSGLNTYQACYSVYGRHSETGDLQKWNTPRDIDSYLDAFKQHSLRNPIVEQVVTETLRTVRDIWQYHGQSEEKFFDEIHVELGREMKNSADKRKKISEKNTENENTNERIKLLLQELKDEYQAVDIRPYSPSHQEILKIYEEGVFLNPEVKYKDIKEDEVLKIRKNSSPTKSEIIRYKLWLEQKYISPYTGQPIPLSGLFSSDYQIEHIIPQSRYFDDSLSNKVICESAVNAEKSNKTAYEFMKNPGKSIIDLGNGNSVRLLSFDAFEDHCSLYFKKNRTKLKNLLSEDIPDGFINRQMNDSRYISKFIKGLLSNIVREEGEQEATSKNLLPISGAVTSKLKQDWGLNEKWNEIIAPRFQRLNELTNSNDFGYWDYQKDENGKPVGKQFFRLQVPKEAGKLNKKRIDHRHHSLDAIVIASSTREHQNYLNSLNSERENHGLKERLLIKNKQGDFTKHFQLPWKTYHVEVKNCLETTVVSFKQNLRVINKTNNKTWQWCEEDGKLKKKLVKQEKGDNWAIRKALHKETVSGSVEIKREKKGLSNLTSYLQTPELIVDTKIRKKVKSLRSLFDNDIKQIRKYLKDNPITIEGKEVGKIKVYEWTKNATATRTSLTEKFTRKQLDAVTDSGIRTILDNHVKNYFENGKERFDLAFNSDGIEELNKNIKLLNNGKDHQPIYKVRLYEEGSKFEISDDKTSQKNKKYVEAAKGTNLFFAIYWNEEKQKRVYETVPLHEVIAHQKQTASLPKEEKTPIAVKPELGEFLFVLSPNDLVYVPTDEEMENPNMVNFDKLSIEEVSNIYLFIDGSGTTANFIPVYSASTIFNLNSTEQKKRGVNFIIQNEYGVGSPQSKNQKSINGLMIKERCWKLKVDRLGNITKVIKPIGQELHQIN

SEQ ID NO: 18679 - protein, 912 aa, unidentified
  REGION 1..912: note = Cas Enzyme sequence
VKNVTLGIDLGTNSLGWSLIQYTDQEPDNLKDCGVRIFQEAVEDKTRTPKNQARRQARSARKLISRRKMRRQYLLKLLQGNKLLPENKAELEEFFAEKDPYEIRKKGLDEQLTAYEFGRAIYHLDQRRGFKSNRKTDKKDTKETGKVKAGISELQENITASECRTLGEYLADQKTQRGRYTDRQMYLHEFRTLWEIQQKYHPDLLTKELKEKIENAIFFQRPLKIQKHLVGKCTFEPTRPRAAKAALAFQQFRILQDINNLTVSDPITYKERPLYKDERQIMIIKLNNQKTLTWKAARKALDLHEGELFNLERGGKKELIGNRTACDITKVIGKPRWDAMSFEERDSLVTDILTIESEKGFLRRMKEHWLFSEEIADNLNAIELEPGYANLSLKAIRKILPELEQGLIYDKACAAAGYDHSQPLKNKSANERLDVPNDMRNPVVQKALWETRKVVNAIIKKHGKPKTIRIEMAREMKLSKKRKDEIQKNQNKQRDENERIREILRTDFGFQQPERDDILKYKLWEECNMTCPYTGKAISREMLFTQEVDIEHILPYSQSLDDSYMNKTLCIASENRQVKRNRSPYEAYHSNEEKYQEMILRINKEHMPKMPWQKRRKFMQDKIDTDEFIARQLNDTQYICTEVKKYLQQLGVEVDVSKGVATASLRKKWDLNKILPPPKTVTKGKYEEKVRTDHRHHAIDAVVIALTTRGLFQNISRYSDNQISSYGLSNDRFKVDQPWNNFDQDIRQAVDNIIISHAPLRKIHGALHEDTAYGFACESGKKDKLTMVYRVRLESITANQIKNIRDAGVKKLVEDRLAEFYGEIKDAFGNADNPLYHKDGKTPIVSVRVLTDMSASSVFGIEEDQDEPYKYFKYGSNHHVEIIENRKTGKREGRFITMMEAAKRPALIKYPS

SEQ ID NO: 18680 - protein, 987 aa, unidentified
  REGION 1..987: note = Cas Enzyme sequence
MNTILGLDLGTASVGWALINEEDNLGVNLLDLGVRIFEPPVEKVTEQPKNKKRRDRRSARRLLSRRRMRRETLVNALQKSSMLPDEKDDCTDILRNGDPYFLRYTGLDNELTLEQISRALFHICKRRGFKSNRKTDKKEDTGKVQPAISELQQDIDAKNCRTLGEYFYLHRKDKKRRQYTSRAMYEYEFQILWDAQSRYHQVMTPALKEKIKNIIFLQRPLKVQKNLVGLCQFEKRIVKDKNGNEMEVGKRRAPRSHPLVQKFRMLQDINHLTVDGDSLSLEKKKALAEEASKKATLTWKRVRKITGFSDNAIINLEEAKKKNLPGISTTYELMKAYGKGYDDLSANDQDELYTLLQTIHDDEDCFNKLKKRFRLNDNQARDLLDTRREPGYSSLSLRAIKRLLPFLEDGSTYADAVQKAGYLVREKSVMATLPSPPQIRNPAVTKTLHELRKVVNAIIRKYGMPGKIRIELARDMKYPKKIRDEMHKRNAGRAEERSGIEERLKTDFNISAPTKADVEKYRLWEECQRTCIYTNKAIPAQSLFNGDVEIEHIIPWSRSLDNSYMNKTLCYTSENRDKAKQTPWEFYGSDDAKWGRLLHSIKALPWPKQRKFMQKDVDQDNYTAPLNDTRYASVEARKYLESLGVKVQVGKGTISAMLRDIMGLNGLIAANPGTDKKNRGDHRHHAIDAVVIALTSPSVVKELTYAYLSNGRMRLSNAFDKYHSLREEVEKRLGTMLVSHRVSGKITGALHEETSYGSTGIKLKSGKVQYVYRKPVKELTPNEIKLIRDSKIRTLIEEHLKKKGCDLNNKKKINQELKETIYLANKKGAPVPIQSVRILRDISPSSIHAIKGENGEPYRHVQYGNNHHMEILRRRSDNRIEGRTVTMMEAAKRARMSKESIIRKDHGPEYEFLMSLAINEMLKIENGWGLRCYYVQKISNQITLRLHTSADRDDKSSSVVFHPTPSGLMKDNPVKISVSPLGEAFVL

SEQ ID NO: 18681 - protein, 964 aa, unidentified
  REGION 1..964: note = Cas Enzyme sequence
FLNQTYPNAKEKALKSELKKWKDTYRWNYVYDIGEKSSKKYPMNETRYDLKRYLEKVANLPDDFLSSEVEYLLWHLIYSITDKVAYEKGLKKFAQKHHLDEDSFVESFKKFKPYPSEYGSFSEKAIRKLLPLMRFGSYWDFNHIDKNTQKRIDDLITGVENEEIRTILREKAEKYQLEKETDFQDLPLWLAQYIVYNRHAEASSLEKWTSVNDLETYLNEFKQHSLRNPIVEQIVTETLRVVRDIWQQYGQGEADFFDEIHIELGRELKKTAKEREELSKQNQKNEDTNLRIRALLAELGEDSTIENVRPYSPLQQELLKLYEEGVFSSSMEIEDDIEKIHKKATPSKAELQRYKLWLEQKYKSPYTGQIISLKRLFTEDYEIEHIIPQSRYYDDSLSNKVICESAVNKLKGNQLGLEFIKNHYGEKVHAAGKEVSILTEEQYKEFVKNHYANNSGKMKKLLLEDIPEKMVARQMNDTRYISKYISEILSKIVRSGERDEGVNSKNVILCTGKITSALKQDWGVNDVWNDLILPRFERMNDLTQSTLFTTYNEKYQKYLPTVPMEYSNGFLKKRIDHRHHAMDAIIIACATREHINYINNQHTLEKGKNKEEKQKSRIDLRTILCEKKYSDNAEENYSWIFKKPWDTFTQEVRSALEGIVVSFKQNLRVINKATNYYEHWVEENGKFIKKMVKQEGTNWAIRKPLHKETVSGKITLEREKVSKGKILTATRKAIDSTFTEKVIEGITDTGIQKILLNYLKFKKSPEIAFSPEGIEELNKNIALYNDGKPHKPIRKVRIFEQGSKFPLGEVGNKSQKYVEAAKGTNLYFGVYQGKDKRSFATIPLNEVIERQKQGLSSVPEYNEKGDPLLFSLSPNDLVYVPVEGEIIEDIHFRNLSNEQKERIYKTVSFSGYQCFFVKQTVSTPIVNKMEYSPLNKMEKSIIGIMIKEVCVKLKVDRLGNISKA

SEQ ID NO: 18682 - protein, 1440 aa, unidentified
  REGION 1..1440: note = Cas Enzyme sequence
MKKILGLDLGTNSIGWAVVNEAETTDEKSSIVKLGVRVNPLTVDELTNFEKGKSITTNADRTSKRSARRNLQRYKLRRKHLVEILLENKFVTDETILSENGNKTTFETYRLRAKAATEEISLQEFARVLLMINKKRGYKSSRKAKSTDEGQLIDGMEIAKKLYEENLTPGQLSLDLLKRGKKHLPDFYRSDLQAEFDKIWSVQKQFYVFLTDDLKTALKGKNEKATWAICQKPFNIVGIKRKTKGLEEKIENYQWRVNALLGQIGVEELAVVLQKLNGQINSASGYLGDISDRSKELYFNKMTVGQYQMAQLDKNPNYSLKNQVFYRQDYLKEFEVIWETQAKFHKKLTPELKRLIRDGGISPVSKIHRCGIFFQRPLKSQKGLISFCEFENKQIEVEVEGKKKIKTIGCRVCPKSSPLFQEFKIWQILNNVLVTDLKEKEMRPLFQEEKELLFEELNYKEKLSKAEVLKILFDKPKDFDLNYKSLDGNTTQADLFKLYQDIIIRSGHNIDDFSKDSSKEILKKVREIFNALGINTAILEFDSTLEGEELEKQPMYQLWHLLYSFEGDKSNLGNEKLIEKLQHSYGFDKEYAIMLAGVVFKQDYGSLSTKAIRKILPHLKDGNVYSVACEYAGYKHSKKSLTREELDAKKLKDKLELLPRNSLRNPVVEKILNQMVNVVNGIIDTYGKPDEIRIELARELKKSAKEREELTDVINKTTKLHEDYVKKLQEEFGLSHVSRNDIIRYKLYLELETNGFKTLYSDTYIPKEELFSKRFDIEHIIPQAKLFDDSFSNKTLEARSVNLKKGNMTAYDFVESEYGDVSLNDYKQRIEKMKSKISKTKYDKLLMPEDKIPSGFINRDLRDTQYIAKKAREMLEDIVKFVVPTTGSVTDRLREDWQLIDIMQELNWDKYDALGLTEIIEKEDYEGHKYKIRRINGWTKRNDHRHHAMDALTIAFTKRSFIQYLNNLNSRIQKSIEEKVYLDRVELSDLNKKERVSVMYAIEQKELYRNSKGKLRFNPPMPLDEFRAEAKLALENVLISQKTKNKVVTKNINKAKNKSVTAITIQDGEQKIIKGQMTKTPRGQLHLETVYGSLKRYITKEEKVNASFDVKKIQMVANKGYREALLVRLCEFGGDAKKAFTGKNSLEKNPIWMNEQHSDKVPEKVKIVGFETIYTIRKAVDPDLNVAKVVDVKIKKILEDRLKEFKNDPKKAFVNLDENPIWLNKEKGIAIKRVTIKGVNNAIPLHSKRDKNGNLILDENGNKQPVDFVNTGNNHHVAIFKKPQLDKNGSPIIDENGNPKYDLDEVVVTFYEATNRANKGLPIIDKEHNKSEGWEFLFTMKQNEYFVFPCYDATGNMIFNPLDYDEEWFKNPDNYALISPNLFRMQKFSSHDYWFRHHLETVVTNDIKDLTYKRLMSLPFVTTIVKVRVDHIGQIISIGE

SEQ ID NO: 18683 - protein, 1092 aa, unidentified
  REGION 1..1092: note = Cas Enzyme sequence
DIVIFYQRKLKSQKSLISFCELESKEIIIDGKKKIVGPRVVPKSSPLFQEFKIWQRLNDVEIKKIGSKKRKTKSNSDQVHLFEEEKEFFNLDLEQKQILFDELNIKGDLSATNAIELLGLNPKEWSMNFLQLDGNRTNKEFYNAFLKIVDIEGYDVKTLLKVKSNKDEVELDDLKVFASEIKDMIKSIFDSLEINTQILNFNAELEGKDFEMQPAYQFWHLLYSYEGDDSASGNDTLYKILEAKFGFKREQAQILANIPLQDDYGSLSTRAIRKIIPFIKENNFSSACELASFRHSKNSLTKEEIETRVLKGELELLKKNSLRNPVVEKILNQMVNVINTLIYKHSEKDEKGNIIKYFKFDEIRIELARELKKNSEERKDLDTQVRDGKTRNEKVVKILQSEFGIQNPTKNDTIRYRLYEELKNIGFHDLYTGKYIPKDKIFSKEIDIEHIIPQSKLFDDSFSNKTLTYRQDNLDKGNQTAYDFIKTKFGEEELVNFESRVEKLFELGKKNKEEGISKAKYKKLLMPESEIGEGFIERDLRESQYIAKKAKEMLFEITKSVVSTSGGITDRLREDWGLVNIMKEINLPKYQALGLTEFQERRHGNKVEVIKDWTKRNDHRHHAMDALTIAFTKRSFIQYLNNLNARRQDIYDEGISNSKNRSSIKTSDLKISSKDVLGIEAKELKRDEDNKLRFNLPIPNFRQVAKEHLESVIISHKAKNKVATINKNKISGKSEPQIVLTPRGQLHKESVYGQYSFAETKEEKIGPKFDAKTIEMVTKPLYKKLLLERLAENDNDPKKAFGGKNALDKKPIYLNEEKTETLPEKVKLEWYTKDFSIRKDINPVNFKDEKLIEKILDEGVKRILKQRLKENGNDPKKAFSDLDKNPIWLNKDKGISIKRVTIKGVNNAVALHNKKDHLGNEILDKEGKVIPVDFVSTGNNHHVAIYRDEKGDLQEEVVSLMEAVTRKNQGLPVVNKNHEKGWEFLFTMKQNELFVFPNEKTGFDPKEIDLTDKTKYKEISQNLFRVQSLSIVRYGNNTIRDFKFRHHLETTLNDNSILNGIVYQQIKSLPPLNKIIKIRQNHLGEIVHIGEY

SEQ ID NO: 18684 - protein, 1123 aa, unidentified
  REGION 1..1123: note = Cas Enzyme sequence
MNKKILGLDLGVGSIGWSLITLDEGGHPAEILGMGSRIVPLTSDDMQEFQKGKAITKNKDRTMKRSARRGLDRYQQRRAKLSRLLCEFGLGFPRPLMSLSPLTLWGLRADAATEGKVISLAELGRVLYHLNQKRGYRHSKSDESSKQDTEYVAAVKTRYAELKNESLTIGQYMYRYLSASAERGADALSCVHYRVKDQVYPREAYMEEFDRIMAVQQKAYPEVLTSVVLQKLRDCIFFQRPLKSCKHLVSYCEFERKTREVQIPVVGADGTTSYKTKIVDIGPKVAPVSSPLAEVCRLWESINNIRIYYPDGAVYPLSLEHKQAFFNKLQESESLKFSDAKKIIGAKAKDKLWCNDLLKSGIKGNRTTATLRKLIEDYPQYKALLRFDLKQEDSCRVDLSTGEVLPLISVSYLNEPLYKLWHILYSVAEREAMGNALRKQLGVEQGDLDKGLLDACMKIDFTKQGYCNKSAKFMCKLLPYLQQGYMYSEAADLAGYKHSDSKTKEELEHRELKPRIELLPKNSLRQPIVEKVLNQMINLVNALKDKYGEIDEVRVELARELKMGREERKKYWTRNRENEDDNKRVAKEISKFCTPTKSRIQKYKLWEEANHACIYCGKEITKPSLFSDGEAEIEHIIPRSVLYDDSMSNKTCACRSCNKAKNNRAAMDWVLTQTEEFQTKYFNRLEELVAKKSLSNGKRQRLMTLLKDIPEDFIERHLRLTQYISRKATEILKDGIRYVWSSEGSVTSTLRHLWGYDKVLEDLNFERYKSMGETQTILVKRGSVEQEVERIKDWNKRKDHRHHAIDALVVACTRQSYIQRLNRLSSEEDRQSMQSELGSSYAPSKEERMQLLDKWLTAQPHFPVQVVRDYVRGILVSFRPDRRTYTKSRNKVKIKGRVSLQTGILTPRGALSEETIYGAIHVDGVKKIVCKYSLDKLQGKKVLKIVDKGIQRIIKARLEAYNNDAKKAFAEPLYSDAAQTKQIRSVRCLTGRVREKLVPLRRNDAGEEIAFVAPGSNHHVAFYRDSEGVLQEVVVSFYQAIERAKYQLPMIIKDPRAVVEEALERNVPDSVLSTLPQSSWTFVESLQKNEMFLIGLSDDEIASIGGKTKRVIYDQSRTCLELA

SEQ ID NO: 18685 - protein, 1178 aa, unidentified
  REGION 1..1178: note = Cas Enzyme sequence
MNKKILGLDLGVGSIGWSLITLDEGGHPAEILGMGSRIVPLTSDDMQEFQKGKAITKNKDRTMKRSARRGLDRYQQRRAKLSRLLCEFGLGFPRPLMSLSPLALWGLRADAATEGKVISLAELGRVLYHLNQKRGYRHSKSDESSKQDTEYVAAVKTRYAELRNESLTIGQYMYRYLSASAERGADALSCVHYRVKDQVYPREAYMEEFDRIMAVQQKAYPEVLTSVVLQKLRDCIFFQRPLKSCKHLVSYCEFERKTKEVQIPVVGADGTTSYKTKIVDIGPKVAPVSSPLAEVCRLWESINNIRIYYPDGAVYPLSLEHKQAFFNKLQESESFKFSDAKKIIGAKAKDKLWCNDLLKSGIKGNRTTATLRKLIEDYPQYKALLRFDLKQEDSCRVDLSTGEVLPLISVSYLNEPLYKLWHILYSVAEREAMGNALRKQLGVEQGDLDKGLLDACMKIDFTKQGYCNKSAKFMCKLLPYLQQGYMYSEAADLAGYKHSDSKTKEELEHRALKPRLELLPKNSLRQPIVEKVLNQMINLVNALKDKYGEIDEVRVELARELKMGREERETTSRRIAANEKDNKRVAEAIAEYGTPTKNRIQKYKLWEEANYECIYCGKQIGLANLFSDGEAEIEHIIPRSVLYDDSMSNKTCACRSCNKAKNNRAAMDWVLTQTEEFQTKYFNRLEGLVATKRLSNGKRQRLMTLLKDIPEDFIERHLRLTQYISRKATEILKDGIRYVWSSEGSVTSTLRHLWGYDKVLEDLNFERYKSMGETQTVLVKRGSAEQEVERIKDWNKRKDHRHHAIDALVVACTRQSYIQRLNRLNSEEDRQSMQSELGSSYSPSKEERMQLLDKWLTAQPHFSVQAVRDYVRGILVSYSPDRRTYTKSRNKVKIKGRVSLQTGILTPRGALSEETIYGAIQVGKRKEIVCKRRLENLQAKDIPSIVDKGIQRIVKARLEAYNNDAKKAFAEPLYSDAAQTKQMRSVRCFSRCVYKNMIPLRRNDAGEEIAFVAPGSNHHVAFYRDSKGVLQEAVVSFYQAIERAKYQLPMIVKEPRAVVEEALERNVPDSVLSALPHSSWTFVESLQKNEMFLIGLSDDEIARTIKEGDRATLNDHLYRVQKYSSKYYCFRYHIETLLDEIIEGDIPKLYRICSMKTYMELNPRKVRVDLLGNLSLME

SEQ ID NO: 18686 - protein, 992 aa, unidentified
  REGION 1..992: note = Cas Enzyme sequence
AICEKQHLDVELVKALENAIFYQRPLKSQKGQVGHCTFEKSKARCPISHPRYEEFRMLCFINNIKVKTWNDDDYRTLDSDEVKQIIPLFFRKSKSQFEFEDIAKKIAGKGNYCDKVDKSEKPYRFNYKMFTSVSGCPVTAGLRSVFGDDWLNQICGVYSLGEGKTQDQILNDIWHVLFSFDDEEKLKEWAKEKLQMSDEEAEAFEKISIPQGYASLSLNAINKILPYLRKGYRYDEAVIMANLPAVMGCDAEHLPGEVAENIAVIMEDHVSNPLEKKKSIHQSVTEYLRDCQNVDSKCIEKLYHPSMIETYQAALPVDGIYKLGSPRTSSVRNPMAMRALFRLRKLLNELLRDGKIDSDTLVRIEFSRDLNDSNMRKAIEINQREQKRLHDDYSAKIKEQMGEDYVPSDEEILKYQLWEEQKHRCPYTGAQIGLEDFLGASPKYDIEHTVPRSRGGDNSQMNKTLCESRFNRDVKKGMLPAELANHIEVMANVDSFGWQEEIDSLRKRLERTRSYSATKEEKDRKIQDRHYLKMKLDYLEGKLKRFAMTEVPEGFSNRQGVDIGIIGRYARMYLQTVFKRVSTVKGATTAEFRKMWGLQDYYSKKERVSHAHHCVDAITIACIGRNEYDRWAQYMRDEERYRLSAADRPHFPKPWDTFTEDVLSVSDSILVPHYTPSNLSKHTKKRLRIRGKLQYGPNGERLYVQGDTARCSLHEQTFYGAIKKNDEIKYVVRKSLDSLEPKDVDKIVDDVVREKVKKAIDEKGFKKAMSEVIWMNEELQIPIKKVRISTGLKNPIRLKAHRDKSVHEHKRCLYVKNDGNYCMAIYEGNNDRGKIIRSYKLVNNLDAVNYFNGKTDLDNIVPYSDDKDLPLKCILKTGTMVLFYEKSPRELYECGVEELSKRLYKVIVMNKDGRVAFKYHLEARNDEKIKEDYWKEFKSEPPKLLTKGYSSINFVEPYPKLLLSKDNFNMMVEGYHFNITSAGKIILKNVLW

SEQ ID NO: 18687 - protein, 1078 aa, unidentified
  REGION 1..1078: note = Cas Enzyme sequence
SVISNRYMLGRAFYHMVQRRGFISNRKETKKDDEGKVKDSIKSLTKAMQENGCDYLGEYFYRLYEKGGKIRKNYTDRVEHYKKEFSAICEKQHLDVELVKALENAIFYQRPLKSQKGQVGHCTFEKSKARCPISHPRYEEFRMLCFINNIKVKTWNDDDYRTLDSDEVKQIIPLFFRKSKSQFEFEDIAKKIAGKGNYCDKVDKSEKPYRFNYKMFTSVSGCPVTAGLRSVFGDDWLNQICGVYSLGEGKTQDQILNDIWHVLFSFDDEEKLKEWAKEKLQMSDEEAEAFEKISIPQGYASLSLNAINKILPYLRKGYRYDEAVIMANLPAVMGCDAEHLPGEVAENIAVIMEDHVSNPLEKKKSIHQSVTEYLRDCQNVDSKCIEKLYHPSMIETYQAALPVDGIYKLGSPRTSSVRNPMAMRALFRLRKLLNELLRDGKIDSDTLVRIEFSRDLNDSNMRKAIEINQREQKRLHDDYSAKIKEQMGEDYVPSDEEILKYQLWEEQKHRCPYTGAQIGLEDFLGASPKYDIEHTVPRSRGGDNSQMNKTLCESRFNRDVKKGMLPAELANHIEVMANVDSFGWQEEIDSLRKRLERTRSYSATKEEKDRKIQDRHYLKMKLDYLEGKLKRFAMTEVPEGFSNRQGVDIGIIGRYARMYLQTVFKRVSTVKGATTAEFRKMWGLQDYYSKKERVSHAHHCVDAITIACIGRNEYDRWAQYMRDEERYRLSAADRPHFPKPWDTFTEDVLSVSDSILVPHYTPSNLSKHTKKRLRIRGKLQYGPNGERLYVQGDTARCSLHEQTFYGAIKKNDEIKYVVRKSLDSLEPKDVDKIVDDVVREKVKKAIDEKGFKKAMSEVIWMNEELQIPIKKVRISTGLKNPIRLKAHRDKSVHEHKRCLYVKNDGNYCMAIYEGNNDRGKIIRSYKLVNNLDAVNYFNGKTDLDNIVPYSDDKDLPLKCILKTGTMVLFYEKSPRELYECGVEELSKRLYKVIVMNKDGRVAFKYHLEARNDEKIKEDYWKEFKSEPPKLLTKGYSSINFVEPYPKLLLSKDNFNMMVEGYHFNITSAGKIILKNVLW

SEQ ID NO: 18688 - protein, 1214 aa, unidentified
  REGION 1..1214: note = Cas Enzyme sequence
MEKVLGLDLGTNSIGWAIVQHNDDSSYSLLDKGVNIFQDGVAHDKSGEKPMVSERTAARSSRRHYFRRRLRKIELLKVLVKYNLCPYLSDEDLSEWKNHKKYPLKDDFLEWQKTDDDLDRNPYHDRYVCLTQDLDLSVISNRYMLGRAFYHMVQRRGFISNRKETKKDDEGKVKDSIKSLTKAMQENGCDYLGEYFYRLYEKGGKIRKNYTDRVEHYKKEFSAICEKQHLDVELVKALENAIFYQRPLKSQKGQVGHCTFEKSKARCPISHPRYEEFRMLCFINNIKVKTWNDDDYRTLDSDEVKQIIPLFFRKSKSQFEFEDIAKKIAGKGNYCDKVDKSEKPYRFNYKMFTSVSGCPVTAGLRSVFGDDWLNQICGVYSLGEGKTQDQILNDIWHVLFSFDDEEKLKEWAKEKLQMSDEEAEAFEKISIPQGYASLSLNAINKILPYLRKGYRYDEAVIMANLPAVMGCDAEHLPGEVAENIAVIMEDHVSNPLEKKKSIHQSVTEYLRDCQNVDSKCIEKLYHPSMIETYQAALPVDGIYKLGSPRTSSVRNPMAMRALFRLRKLLNELLRDGKIDSDTLVRIEFSRDLNDSNMRKAIEINQREQKRLHDDYSAKIKEQMGEDYVPSDEEILKYQLWEEQKHRCPYTGAQIGLEDFLGASPKYDIEHTVPRSRGGDNSQMNKTLCESRFNRDVKKGMLPAELANHIEVMANVDSFGWQEEIDSLRKRLERTRSYSATKEEKDRKIQDRHYLKMKLDYLEGKLKRFAMTEVPEGFSNRQGVDIGIIGRYARMYLQTVFKRVSTVKGATTAEFRKMWGLQDYYSKKERVSHAHHCVDAITIACIGRNEYDRWAQYMRDEERYRLSAADRPHFPKPWDTFTEDVLSVSDSILVPHYTPSNLSKHTKKRLRIRGKLQYGPNGERLYVQGDTARCSLHEQTFYGAIKKNDEIKYVVRKSLDSLEPKDVDKIVDDVVREKVKKAIDEKGFKKAMSEVIWMNEELQIPIKKVRISTGLKNPIRLKAHRDKSVHEHKRCLYVKNDGNYCMAIYEGNNDRGKIIRSYKLVNNLDAVNYFNGKTDLDNIVPYSDDKDLPLKCILKTGTMVLFYEKSPRELYECGVEELSKRLYKVIVMNKDGRVAFKYHLEARNDEKIKEDYWKEFKSEPPKLLTKGYSSINFVEPYPKLLLSKDNFNMMVEGYHFNITSAGKIILKNVLW

SEQ ID NO: 18689 - protein, 1208 aa, unidentified
  REGION 1..1208: note = Cas Enzyme sequence
MEKVLGLDLGTNSIGWAIVQHNDDLSYSLLDKGVNIFQDGVAHDKSGEKPMVSERTAARSSRRHYFRRRLRKIELLKVLVKYDLCPYLSEEELSEWKNHKKYPLKDEFLEWQKTDDELDRNPYHDRYMCLTQDLDLSVISNRYMLGRAFYHMVQRRGFISNRKETKKDDEGKVKDSIKSLTKAMQENGCDYLGEYFYRLYEKGGKIRKNYTDRVEHYKKEFSAICEKQHLDVELVKALENAIFYQRPLKSQKGQVGHCTFEKNKTRCPISHPRYEEFRMWCFINNIKVRTWKDENYRSLNQEEVELILPLFYRKSKTQFDFDDIAKRIAGKGNYCDRIDKAEKAYRFNYKMYTSVSGCPVTAGLRNVFGDDWLNQICGVYSLGEGKTQDQILNDIWHVLFSFDDEDKLKEWAKAKLQLSDEEAEAFEKISAPQGYASLSLNAINKILPYLRKGYRYDEAVIMANLPAVMGCDAEHLPDEVTENIAIIMEDNISNPLEKKKSIHQSVTEYLRDCQGIDSRHIEKLYHPSMIETYQAALPVAGIYKLGSPRTSSVRNPMAMRALFRLRKLLNELLRDGKIDSDTLVRIEFSRGLNDSNMRKAIETYQREQKRLHDDYSAKIKEQMGDDYVPSDDEMLKYQLWEEQKHRCPYTGAQIGLEDFLGVSPKYDIEHTVPRSRGGDNSQMNKTLCESKFNRDIKKGMLPAELTNHSEIMANVESFGWQEDIDSLKKRLERTRIYSATKEEKDRKIQDRHYLKMKLDYLEGKLKRFKMTEVPEGFSNRQGVDIGIIGRYARMYLQTVFKRVSTVKGATTAEFRKMWGLQDYYSKKERVSHAHHCVDAITIACIGRNEYDRWAQYMRDEERYLLSAAARPRFPKPWDTFTEDVLAVSDSILVPHYTPSNLSKHTKKRLRIRGKLQYGPNGEKLYVQGDTARCSLHEQTFYGAIKKNDEIKYVVRKSLDSLEEKDIKNIVDDVVREKVKMAVDEKGFRKAVSETIWMNEELHIPIKKVRIYTPTVTNPIKLKGHRDKSVHQHKRYLHVKNDGNYCMAIYEGNNDRGKVIRSYKLVNNLDAVNYFNGKTELDNLVPYSDEKDLPLKCVLRTGIMVLFYEKSPKELYECGVEELSKRLYKVTGMSVSTITQGEKKYDYGMVTCRYHLEARRSSDLKAKKGEWKLGENYRPVIELSHKQFNAYVEGYDFDITSSGQIKFKH

SEQ ID NO: 18690 - protein, 1208 aa, unidentified
  REGION 1..1208: note = Cas Enzyme sequence
MEKVLGLDLGTNSIGWAIVQHNDDLSYTLLDKGVNIFQDGVAHDKSGEKPMVTERTAARSSRRHYFRRRLRKIELLRVLVKSGLCPYLSDEDLLEWKNHKIYPLKEDFLDWQRTDDGSNKNPYHDRYICLTQKLDLSVMSDRYILGRALYHIVQRRGFLSNRKETTKDTDGKVKDSIKSLTKAMQDGGCAYIGEYFYKLYEEGGKIRKNYTDRLEHYKKEFVAICERQNLDVELRKALENAIFYQRPLKSQKGQVGHCTFEKNKTRCPISHPRYEEFRMWCFINNIKVKTWEDDDFRSLSSEEVGQIIPMFLRKSKNQFDFEDIAKKIAGKGNYCDKTDKSEKPYRFNYKMFTSVSGCTVSAGLRSIYGEDWLNQICGVYSLGEGKTPDQILNDIWHVLFSFDDEEKLKEWAKVKLQMSSEEADAFEKISVPQGYASLSLNAINKILPYLRKGYRYDEAVIMANLPAVMGCDAERLPDEVAENVAIIMEDNISNPLEKKKSIHQSVTEYLRDCHNVDCKRIEKLYHPSMIDTYQAALPVDGIYKLGSPRTSSVRNPMAMRALFRLRKLLNELLRDGKIDSDTLVRIEFSRGLNDSNMRKAIETYQREQKKLHDDYSAKIKEQMGDDFVPSDDEILKYQLWEEQKHRCPYTGAQIGLEDFLGASPKYDIEHTVPRSRGGDNSQMNKTLCESRFNRDVKKGMLPAELANHLEVMANVDSFGWQEEIDSLKKRLERTRGYSATKEDKDRKIQDRHYLKMKLEYLEGKLKRFTMTEVPEGFSNRQGVDIGIIGRYARMYLQTVFKRVSTVKGATTAAFRKMWGLQDYYSKKERVSHAHHCVDAITIACIGRNEYDRWAQYMRDEERYRLSAADRPHFPKPWETFTEDVLSVSDSIMVPHYTPSNLSKHTKKRLKVRGKLQYGPNGEKLYVQGDTARCSLHEQTFYGAIKKNDEIKYVVRKSVDSLEEKDIKNIVDEVVREKVATAVKEKGLKKAVAETIWMNEELQIPIKKVRIYTPTVTNPIKLKGHRDRSVHEHKRYLHVKNDGNYCMAIYEGNNDRGKVIRSYKLVNNLDAVNYFNGKTGLDNLVPYSDEKDLPLKCILKTGTMVLFYEKSPRELYECGVEELSKRLYKVIGLSSTVTTSGNKEYYFGRLDFRHHMEARRASDLSLKKGCWKIGEEYRPLVGMLHSQFSAYVEGYDFDITSSGQVKFKH

SEQ ID NO: 18691 - protein, 988 aa, unidentified
  REGION 1..988: note = Cas Enzyme sequence
FSAICEKQHLDVELVKALENAIFYQRPLKSQKGQVGHCTFEKNKTRCPISHPRYEEFRMWCFINNIKVRTWKDENYRSLNQEEVELILPLFYRKSKTQFDFDDIAKRIAGKGNYCDRIDKAEKAYRFNYKMYTSVSGCPVTAGLRNVFGDDWLNQICGVYSLGEGKTQDQILNDIWHVLFSFDDEDKLKEWAKAKLQLSDEEAEAFEKISAPQGYASLSLNAINKILPYLRKGYRYDEAVIMANLPAVMGCDAEHLPDEVTENIAIIMEDNISNPLEKKKSIHQSVTEYLRDCQGIDSRHIEKLYHPSMIETYQAALPVAGIYKLGSPRTSSVRNPMAMRALFRLRKLLNELLRDGKIDSDTLVRIEFSRGLNDSNMRKAIETYQREQKRLHDDYSAKIKEQMGDDYVPSDDEMLKYQLWEEQKHRCPYTGAQIGLEDFLGVSPKYDIEHTVPRSRGGDNSQMNKTLCESKFNRDIKKGMLPAELTNHSEIMANVESFGWQEDIDSLKKRLERTRIYSATKEEKDRKIQDRHYLKMKLDYLEGKLKRFKMTEVPEGFSNRQGVDIGIIGRYARMYLQTVFKRVSTVKGATTAEFRKMWGLQDYYSKKERVSHAHHCVDAITIACIGRNEYDRWAQYMRDEERYLLSAAARPRFPKPWDTFTEDVLAVSDSILVPHYTPSNLSKHTKKRLRIRGKLQYGPNGEKLYVQGDTARCSLHEQTFYGAIKKNDEIKYVVRKSLDSLEEKDIKNIVDDVVREKVKMAVDEKGFRKAVSETIWMNEELHIPIKKVRIYTPTVTNPIKLKGHRDKSVHQHKRYLHVKNDGNYCMAIYEGNNDRGKVIRSYKLVNNLDAVNYFNGKTELDNLVPYSDEKDLPLKCVLRTGIMVLFYEKSPKELYECGVEELSKRLYKVTGMSVSTITQGEKKYDYGMVTCRYHLEARRSSDLKAKKGEWKLGENYRPVIELSHKQFNAYVEGYDFDITSSGQIKFKH

SEQ ID NO: 18692 - protein, 1080 aa, unidentified
  REGION 1..1080: note = Cas Enzyme sequence
MNYVLGLDVGIASVGWAVLELNEEDNPIRIEGLGARIFDKAEVPKTGASLAAPRRMSRGIRRVIRRRRFRLQRVRSYLKRHNILPAEKVDHLYDVPSAIDIYELRKRALTEKVTAEEWARLLIFFAKHRGFKSNRKKASGDADEGEMLKAIAANAELLKNYRTIGEMLCDNEKFRKRKRNRDGAYNFTVSRAMLIEEIHTLFEIQRNLGQKFADEKLEEEYVILFAAQRKFDEGPGENSPYAGNQIEKMIGSCTLEGKKEKRAPKASYAFMAFNLWQKINHLKINRRGSERFLTEEERRRIADLAWKKEKLTYGSLREVLFLDPEDRFVGLRYDLKKEKEENLEEPVSEAEKMSFSWVKDYHSIRKALDKVEKNRILKLSHEQLDTIATAFSVYKNEETIEKYLEEGGIEKADREALLERLSGFSKFGHLSLKACYKILPFLEKGEVYSRACERAGYDFRKSSLENINDIPNPVVKRSISQTLKVINAIILRYGNPVEVHIELARELAKNFRDRKKMEKGMQENQAKNEKIRQRLMSEFGVLRPKGMDIVKFKLCEEQNGECAYSQKHFDMEKLLRDPSYAEVDHIIPYSRSFDDSYNNKVLVLTKENREKRNRIPMEYLADATERKDRFIHWVKSTIRNSRKRENLLRTDYTETTENEWKRRNLQDTQYISKYLYNYLRHHLVPAKGYTERKRRIIPVNGAVTAYIRKRLGINKIRENGDLHHAVDAVIIACATQGIVNKVSRYSKSRELWDYEVDMETGEVLQKKNENRKDIFPEPWLNFRYELEQKVRVRPLDIPETADITEMEEPFVSHMPNRKIHGPAHKETIRSGRLKEEGYTISKTALTDLKLTEDKEEIKGYYNKESDRLLYEALKKQLQRYSGKAKEAFKEPFHKPKADGTPGPIVNKVKIMEKSTMPVPVNGGKGLASNGNMVRIDVFRVEEKGKKKYYFIPVYVADTVKEELPNRAVLAHKPYEAWKIMKEEDFIFSLYPNDLIFVDAGKEIPFKAALKGSTLDPEKKASRFLMYYKGADIAGGTINGVNHDSTYGIRIGLQRLKGIRKCRIDVLGNISLVGKEKRKTF

SEQ ID NO: 18693 - protein, 1095 aa, unidentified
  REGION 1..1095: note = Cas Enzyme sequence
VDIFSKYFIQRREAMNYVLGLDVGIASVGWAVLELNEEDNPIRIEGLGARIFDKAEVPKTGASLAAPRRMSRGIRRVIRRRRFRLQRVRSYLKRHNILPAEKVDHLYDVPSAIDIYELRKRALTEKVTAEEWARLLIFFAKHRGFKSNRKKASGDADEGEMLKAIAANAELLKNYRTVGEMLCDNEKFRKRKRNRDGAYNFTVSRAMLIEEIHTLFEIQRNLGQKFADERLEEEYVILFVAQRKFDEGPGENSPYAGNQIEKMIGSCTLEGKKEKRVPKASYAFMAFNLWQKINHLKINRRGSERFLTEEERRRIADLAWKKEKLTYGSLREVLFLDPEDRFVGLRYDLKKEKEEDLEEPVSEAEKMSFSWVKDYHSIRKALDKVEKNRILKLSHEQLDTIATAFSVYKNEETIEKYLEEGGIEKADREALLERLSSFSKFGHLSLKACYKILPFLEKGEVYSRACERAGYDFRKSSLENINDIPNPVVKRSISQTLKVINAIILRYGNPVEVHIELARELAKNFRDRKKMEKGMQENQAKNEKIRQRLMSEFGVLCPKGMDIVKFKLCEEQNGECAYSQKHFDMEKLLKDPSYAEVDHIIPYSRSFDDSYNNKVLVLTKENREKRNRIPMEYLADAPEQKNRFIHWVKSTIRNSRKRENLLRTDYTAATENEWKRRNLQDTQYISKYLYNYLLENLELAKGYTERKRRIIPVNGAVTAYFRKRLGINKIRENGDLHHAVDAVIIACATQGIVNKVSRYSKSRELWDYEVDMETGEVLQKKNENRKDIFPEPWLNFRYELEQKVRVRPLDIPETADITEMEEPFVSHMPNRKIHGPAHKETIRSGRLKEEGYTISKTALTDLKLTEDKEEIKGYYNKESDRLLYEALKKQLRRYGGKAKEAFKEPFHKPKADGTPGPIVNKVKIMEKSTMPVPVNGGKGLASNGNMVRIDVFRVEEKGKKKYYFIPVYVADTVKEELPNRAVLAHKPYEAWKIMKEEDFIFSLYPNDLIFVDAGKEIPFKAALKGSTLDPEKKASRFLMYYKGADIAGGTINGVNHDSTYGIRIGLQRLKGIRKCRIDVLGNISLVGKEKRKTFR

SEQ ID NO: 18694 - protein, 1095 aa, unidentified
  REGION 1..1095: note = Cas Enzyme sequence
VDIFSKYFVQRREAMNYVLGLDVGIASVGWAVLELNEEDNPIRIEGLGARIFDKAEVPKTGASLAAPRRMSRGIRRVIRRRRFRLQRVRSYFKRHNILPAEKVDHLYDVPSAIDIYELRKRALTEKVTAEEWARLLIFFAKHRGFKSNRKKASGDADEGEMLKAIAANAEILKNYRTVGEMLCDNEKFRKRKRNRDGAYNFTVSRAMLMEEIHTLFEIQRNLGQKFADEKIEEEYVILFAAQRKFDEGPGENSPYAGNQIEKMIGSCTLEGKKEKRAPKASYAFMAFNLWQKINHLKINRRGSERFLTEEERRRIADLAWKKEKLTYGSLREVLFLDPEDRFVGLRYDLKKEKEEDLEEPVSEAEKMSFSWVKDYHSIRKALDKVEKNRILKLSHEQLDTIATAFSVYKNEETIEKYLEEGGIEKADREALLERLSGFSKFGHLSLKACYKILPFLEKGEVYSRACERAGYDFSKSSLENIDDIPNPVVKRSISQTLKVINAIILRYGNPVEVHIELARELARNFRDRKKMEKGMQENQAKNEKIRQRLISEFGVLRPKGMDIVKFKLCEEQNGECAYSQKHFDMEKLLRDPSYAEVDHIIPYSRSFDDSYNNKVLVLTKENREKRNRIPMEYLADAPERKNRFIHWVKSTIRNSRKRENLLRIDYTETTENEWKRRNLQDTQYISKYLYNYLRHHLVLAKGYTERKRRIIPVNGAVTAYFRKRLGINKIRENGDLHHAVDAVIIACATQGIVNKVSRYSKSRELWDYEVDMETGEVLQKKNKNTKDVFPEPWLNFRYELEQKVRVRPLDIPKTADITEMEEPFVSHMPNRKIHGPAHKETIRSGRLKEEGYTISKTALIDLKLTEDKEEIKGYYNKESDRLLYEALKKQLQRYGGKAKEAFKEPFHKPKADGTPGPIVNKVKIMEKSTMLIPVNGGKGLASNGNMVRIDVFRVEEKGKKKYYFIPVYVADTVKEELPNRAVLAHKPYEAWKIMKEEDFIFSLYPNDLIFVDAGKGIPFKAALKGSTLDPEKKASRFLMYYKGADIAGGTINGVNHDSTYGIRIGLQRLKGIRKCRIDVLGNISLVGKEKRKTFR

SEQ ID NO: 18695 - protein, 1082 aa, unidentified
  REGION 1..1082: note = Cas Enzyme sequence
MNYVLGLDVGIASVGWAVLELNEEDNPIRIEGLGARIFDKAEVPKTGASLAAPRRMSRGIRRVIRRRRFRLQRVRSYLKKHNILPAEKVDHLYDVPSAIDIYELRKRALTEKVTAEEWARLLIFFAKHRGFKSNRKKASGDADEGEMLKAIAANAEILKNYRTVGEMLCDNEKFRKRKRNRDGAYNFTVSRAMLMEEIHTLFEIQRNLGQKFADEKLEEEYVILFAAQRKFDEGPGENSPYAGNQIEKMIGSCTLEGKKEKRAPKASYAFMAFNLWQKINHLKVNRRGSERFLTEEERRRIADLAWKKEKLTYGSLRKVLSLDPEDRFVGLRYDLKKGKAENLEEPVSEAEKRSFSWVKDYHSIRKALDKVEKNRILKLSHEQLDTIATAFSVYKNEETIEKYLEEGGIGKADGEALLERLSGFSKFGHLSLKACYKLLPFLEKGEVYSRACELAGYDFSKSSLENIDDIPNPVVKRSISQTLKVINAIILRYGNPVEVHIELARELARSFRDRKKMEKGMQENQAKNEKIRQRLISEFGVLRPKGMDIVKFKLCEEQNGECAYSQKHFDMEKLLKDPSYAEVDHIIPYSRSFDDSYNNKVLVLTKENREKRNRIPMEYLADAPERKNRFIHWVKSTIRNSRKRENLLRTDYTATTENEWKRRNLQDTQYISKYLYNYLRHHLVLAKGYTERKRRIIPVNGAVTAYFRKRLGINKIRENGDLHHAVDAVIIACATQGIVNKVSRYSKSRELWDYEVDMETGEVLQKKNKNTKDVFPEPWLNFRYELEQKVRVRPLDIPETADITEMEEPFVSHMPNRKIHGPAHKETIRSGRLKEEGYTISKTALIDLKLTEDKEEIKGYYNKESDRLLYEALKKQLQRYGGKAKEAFKEPFHKPKADGTPGPIVNKVKIMEKSTMLIPVNGGKGLASNGNMVRIDVFRAEEKGKKKYYFIPVYVADTVKEELPNRAVLAHKPYEAWKIMKEEDFIFSLYPNDLIFVDAGKEIPFKAALKGSTLDPEKKASRFLMYYKGADIATGSISGVNHDETYKARGVGIQSLREIKKCCIDVLGNISFASKEKRQTFR

SEQ ID NO: 18696 - protein, 1094 aa, unidentified
  REGION 1..1094: note = Cas Enzyme sequence
VDIFSKYFVQRREAIYVLGLDVGIASVGWAVLELNEEDNPIRIEGLGARIFDKAEVPKTGASLAAPRRMSRGIRRVIRRRRFRLQRVRSYLKRHNILPAEKVDHLYDVPSAIDIYELRKRALTEKVTAEEWARLLIFFAKHRGFKSNRKKASGDADEGEMLKAIAANAEILKNYRTVGEMLCDNEKFRKRKRNRDGAYNFTVSRAMLMEEIHTLFEIQRNLGQKFADEKIEEEYVILFAAQRKFDEGPGENSPYAGNQIEKMIGSCTLEGKKEKRAPKASYAFMAFNLWQKINHLKINRRGSERFLTEEERRRIADLAWKKEKLTYGSLREVLFLDPEDRFVGLRYDLKKEKEEDLEEPVSEAEKMSFSWVKDYHSIRKALDKVEKNRILKLSHEQLDTIATAFSVYKNEETIEKYLEEGGIEKADREALLERLSGFSKFGHLSLKACYKILPFLEKGEVYSRACERAGYDFRKSSLENIDDIPNPVVKRSISQTLKVINAIILRYGNPVEVHIELARELAKNFRDRKKMEKGMQENQAKNEKIRQRLMSEFGVLRPKGMDIVKFKLCEEQNGECAYSQKHFDMEKLLRDPSYAEVDHIIPYSRSFDDSYNNKVLVLTKENREKRNRIPMEYLADATERKNRFIHWVKSTIRNSRKRENLLRTDYTETTENEWKRRNLQDTQYISKYLYNYLRHHLVPAKGYTERKRRIIPVNGAVTAYIRKRLGINKIRENGDLHHAVDAVIIACATQGIVNKVSRYSKSRELWDYEVDMETGEVLQKKNENRKDIFPEPWLNFRYELEQKVRVRPLDIPETADITEMEEPFVSHMPNRKIHGPAHKETIRSGRLKEEGYTISKTALTDLKLTEDKEEIKGYYNKESDRLLYEALKKQLQRYSGKAKEAFKEPFHKPKADGTPGPIVNKVKIMEKSTMPVPVNGGKGLASNGNMVRIDVFQAEEKGKKKYYFIPVYVADTVKEELPNRAVLAHKPYEAWKIMKEEDFIFSLYPNDLIFVDAGKEIPFKAALKGSTLDPEKKASRFLMYYKGADIAGGTINGVNHDSTYGIRIGLQRLKGIRKCRIDVLGNISLVGKEKRKTFR

SEQ ID NO: 18697 - protein, 1082 aa, unidentified
  REGION 1..1082: note = Cas Enzyme sequence
MNYVLGLDVGIASVGWAVLELNEEDNPIRIEGLGARIFDKAEVPKTGASLAAPRRMSRGIRRVIRRRRFRLQRVRSYLKRHNILPAEKVDHLYDVPSAIDIYELRKRALTEKVTAEEWARLLIFFAKHRGFKSNRKKASGDADEGEMLKAIAANAEILKNYRTVGEMLCDNEKFRKRKRNRNGAYNFTVSRAMLMEEIHTLFEIQRNLGQKFADEKLEEEYVILFAAQRKFDEGPGENSPYAGNQIEKMIGSCTFEGKKEKRAPKESYAFMAFNLWQKINHLKVNRRGSERFLTEEERRRIADLAWKKEKLTYGSLRKVLSLDPEDRFVGLRYDLKKGKAENLEEPVSEAEKRSFSWVKDYHSIRKALDKVEKNHILKLSHEQLDTIATAFSVYKNEETIEQYLEEGGIGKADREALLERLSGFSKFGHLSLKACYKLLPFLEKGEVYSRACELAGYDFSKSSLENIDDIPNPVVKRSISQTLKVINAIILRYGNPVEVHIELARELARSFRDRKKMEKGMQENQAKNEKIRQRLISEFGVLRPKGMDIVKFKLCEEQNGECAYSQKHFDMEKLLKDPSYAEVDHIIPYSRSFDDSYNNKVLVLTKENREKRNRIPMEYLADAPERKNRFIHWVKSTIRNSRKRENLLRTDYTATTENEWKRRNLQDTQYISKYLYNYLRHHLVLAKGYTERKRRIIPVNGAVTAYFRKRLGINKIRENGDLHHAVDAVIIACATQGIVNKVSRYSKSRELWDYEVDMETGEVLQKKNKNTKDVFPEPWLNFRYELEQKVRVRPLDIPETADITEMEEPFVSHMPNRKIHGPAHKETIRSGRLKEEGYTISKTALIDLKLTEDKEEIKGYYNKESDRLLYEALKKQLQRYGGKAKEAFKEPFHKPKADGTPGPIVNKVKIMEKSTMLIPVNGGKGLASNGNMVRIDVFRAEEKGKKKYYFIPVYVADTVKEELPNRAVLAHKPYEAWKIMKEEDFIFSLYPNDLIFVDAGKEIPFKAALKGSTLDPEKKASRFLMYYKGADIATGSISGVNHDETYKARGVGIQSLREIKKCCIDVLGNISFASKEKRQTFR

SEQ ID NO: 18698 - protein, 1082 aa, unidentified
  REGION 1..1082: note = Cas Enzyme sequence
MNYVLGLDVGIASVGWAVLELNEEDNPIRIEGLGARIFDKAEVPKTGASLAAPRRMSRGIRRVIRRRRFRLQRVRSYLKKHNILPAEKVDHLYDVPSAIDIYELRKRALTEKVTAEEWARLLIFFAKHRGFKSNRKKASGDADEGEMLKAIAANAEILKNYRTVGEMLCDNEKFRKRKRNRDGAYNFTVSRAMLMEEIHTLFEIQRNLGQKFADEKLEEEYVILFAAQRKFDEGPGENSPYAGNQIEKMIGSCTLEGKKEKRAPKASYAFMAFNLWQKINHLKVNRRGSERFLTEEERRRIADLAWKKEKLTYGSLRKVLSLDPEDRFVGLRYDLKKGKAENLEEPVSEAEKRSFSWVKDYHSIRKALDKVEKNRILKLSHEQLDTIATAFSVYKNEETIEKYLEEGGIGKADGEALLERLSGFSKFGHLSLKACYKLLPFLEKGEVYSRACELAGYDFSKSSLENIDDIPNPVVKRSISQTLKVINAIILRYGNPVEVHIELARELARSFRDRKKMEKGMQENQAKNEKIRQRLISEFGVLRPKGMDIVKFKLCEEQNGECAYSQKHFDMEKLLKDPSYAEVDHIIPYSRSFDDSYNNKVLVLTKENREKRNRIPMEYLADAPERKNRFIHWVKSTIRNSRKRENLLRTDYTATTENEWKRRNLQDTQYISKYLYNYLRHHLVLAKGYTERKRRIIPVNGAVTAYFRKRLGINKIRENGDLHHAVDAVIIACATQGIVNKVSRYSKSRELWDYEVDMETGEVLQKKNKNTKDVFPEPWLNFRYELEQKVRVRPLDIPETADITEMEEPFVSHMPNRKIHGPAHKETIRSGRLKEEGYTISKTALIDLKLTEDKEEIKGYYYKESDRLLYEALKKQLQRYGGKAKEAFKEPFHKPKADGTPGPIVNKVKIMEKSTMLIPVNGGKGLASNGNMVRIDVFRAEEKGKKKYYFIPVYVADTVKEELPNRAVLAHKPYEAWKIMKEEDFIFSLYPNDLIFVDAGKEIPFKAALKGSTLDPEKKASRFLMYYKGADIATGSISGVNHDETYKARGVGIQSLREIKKCCIDVLGNISFASKEKRQTFR

SEQ ID NO: 18699 - protein, 1080 aa, unidentified
  REGION 1..1080: note = Cas Enzyme sequence
MNYVLGLDVGIASVGWAVLELNEEDNPIRIEGLGARIFDKAEVPKTGASLAAPRRMSRGIRRVIRRRRFRLQRVRSYFKRHNILPAEKVDHLYDVPSAIDIYELRKRALTEKVTAEEWARLLIFFAKHRGFKSNRKKASGDADEGEMLKAIAANAEILKNYRTVGEMLCDNEKFRKRKRNRDGAYNFTVSRAMLMEEIHTLFEIQRNLGQKFADEKIEEEYVILFAAQRKFDEGPGENSPYAGNQIEKMIGSCTLEGKKEKRAPKASYAFMAFNLWQKINHLKINRRGSERFLTEEERRRIADLAWKKEKLTYGSLREVLFLDPEDRFVGLRYDLKKEKEEDLEEPVSEAEKMSFSWVKDYHSIRKALDKVEKNRILKLSHEQLDTIATAFSVYKNEETIEKYLEEGGIEKADREALLERLSGFSKFGHLSLKACYKILPFLEKGEVYSRACERAGYDFSKSSLENIDDIPNPVVKRSISQTLKVINAIILRYGNPVEVHIELARELARNFRDRKKMEKGMQENQAKNEKIRQRLISEFGVLRPKGMDIVKFKLCEEQNGECAYSQKHFDMEKLLRDPSYAEVDHIIPYSRSFDDSYNNKVLVLTKENREKRNRIPMEYLADAPERKNRFIHWVKSTIRNSRKRENLLRIDYTETTENEWKRRNLQDTQYISKYLYNYLRHHLVLAKGYTERKRRIIPVNGAVTAYFRKRLGINKIRENGDLHHAVDAVIIACATQGIVNKVSRYSKSRELWDYEVDMETGEVLQKKNKNTKDVFPEPWLNFRYELEQKVRVRPLDIPKTADITEMEEPFVSHMPNRKIHGPAHKETIRSGRLKEEGYTISKTALIDLKLTEDKEEIKGYYNKESDRLLYEALKKQLQRYGGKAKEAFKEPFHKPKADGTPGPIVNKVKIMEKSTMLIPVNGGKGLASNGNMVRIDVFRVEEKGKKKYYFIPVYVADTVKEELPNRAVLAHKPYEAWKIMKEEDFIFSLYPNDLIFVDAGKGIPFKAALKGSTLDPEKKASRFLMYYKGADIAGGTINGVNHDSTYGIRIGLQRLKGIRKCRIDVLGNISLVGKEKRKTF

SEQ ID NO: 18700 - protein, 1095 aa, unidentified; identical to SEQ ID NO: 18694
  REGION 1..1095: note = Cas Enzyme sequence

SEQ ID NO: 18701 - protein, 1081 aa, unidentified
  REGION 1..1081: note = Cas Enzyme sequence
MNYVLGLDVGIASVGWAVLELDEKDEPIRIIDLSSRIFDKAEVPRTGASLAQARRIARGVRRRLRRRRFRLHRVRSYLIRQSILTKEELQNIYHCSHEESIYELRYKGLSEKLSATNWGRLLLFFAKHRGFRSNRKNDQSKEDGLMLKAISENEELLKKYRTVGEMIYSDEKFKEYKRNKGGNYQFTVSRSMLIDEIKMLFETQRKLGQFFAEQELEEKYLDIFSAQRNFDEGPGGNGFYSGNQIEKKIGVCTFEKGENGENPPKRAPKASYAFMAFTLWGKINHLRINSKGTRRALTQEEKEKVAKLSWEKASINFSTIRKELQLSPEDHFIDVRYTYGKTDEECEKGTKWNYCASYHTMRKALDKVYKNRIKELMSEQDEQKQLDDIAYAFTVYKSDEKIKNYLLQCQLEEKDAEALLAGVNNFSGFGHLSNKACYKILLHLKQGYEYAKACEMAGYDFKNISLEDIKDIPNPVVKRAIIQTLKVVRAVVREYGNPVEVHIELARDLGRNFKDRDLIKSNMEKNQKKNDEIKERIVNEFGIMQPKSQDIVKLKLCEQQDNVCVYSQKSFDLHRLFEKNYVEVDHIIPYSRSFDDTYANKVLVFNKENRDKGNKLPLEYLANQPERKEKFIAWVKSHIKDRKKRDNLLRESYSAEDKNGWKQRNLQDTQYISSYLYRYLMQNITLAPGYTDRKERIISLNGVVTGYVRKRWRIPKIRANGDLHHAVDAVVIACINDRLIKRVTEYSKAKELEYTPSDSGAVKTSMKDGFPEPWYCFRQELKARLSETPDEAIRNLHLATYCNVGNIKTPFVSRMLKCKVTGQANKETIGSGRLKDEEYVIEKTLLTELKLDKNNEIEGYYRPEDDKLLYEALKKQLMNHGGKGDKAFQAPFYKPKSDGTPGPLVKKVKLKVKLNSQVHVYQGKGIAQNGDMIRIDVFCVNKKGKKAYYFVPIYVADTVKKELPGKAVVSGKPYSAWKPMDDKDFIFSLYKNNLIYIEFNKPKSFVAEEGCTLSQTVDVKKAFLYYIKADRFAGTITVVNHDNTYKTRTGIKNTLLRFKKCVVDPLGRISFVEKEKRQRFQ

SEQ ID NO: 18702 - protein, 1075 aa, unidentified
  REGION 1..1075: note = Cas Enzyme sequence
LAGPRRAARTTRRRLRRRKHRLDRIKWLFENQGLINIDDFLKRYNMAGLPDVYQLRYEALDRKLTDEELAQVLLHIAKHRGFRSTRKAETAAKENGAVLKATDENQKRMQEKGYRTVGEMIYLDEAFRTGCSWSEKGYILTPRNKAENYQHTMLRAMLVEEVKEIFSSQRRLGNEKATEELEEKYLEIMTSQRSFDLGPGMQPDGKPSPYAMEGFSDRVGKCTFLGDQGELRGAKGTYTAEYFVALQKINHTKLVNQDGETRNFTEEERRALTLLLFTQKEVKYAAVRKKLGLPEDILFYNLNYKKAATKEEQQKENQNTEKAKFIGMPYYHDYKKCLEERVKYLTENEVRDLFDEIGMILTCYKNDDSRTERLAKLGLVPIEMEGLLAYTPTKFQHLSMKAMRNIIPFLEKGMTYDKACEEAGYDFKADSKGIKQKLLTGEKVNQTINEITNPVVKHSVSQTVKVINAIIRTYGSPQAINIELAREMSKTFEERRKIKGDMEKRQKNNEDVKKQIQELGKLSPTGQDILKYRLWQEQQGICMYSGKTIPLEELFKPGYDIDHILPYSITFDDSFRNKVLVTSQENRQKGNRTPYEYMGNDEQRWNEFETRVKTTIRDYKKQQKLLKKHFSEEERSEFKERNLTDTKYITTVIYNMIRQNLEMAPLNRPEKKKQVRAVNGAITAYLRKRWGLPQKNRETDTHHAMDAVVIACCTDGMIQKISRYTKVRERCYSKGTEFVDAETGEIFRPEDYSRAEWDEIFGVHIPKPWETFRAELDVRMGDDPKGFLDTHSDVALELDYPEYIYENLRPIFVSRMPNHKVTGAAHADTIRSPRHFKDEGIVLTKTALTDLKLDKHGEIDGYYNPQSDLLLYEALKKQLLLYGNDAKKAFAQDFHKQKADGTEGPVVRKVKIQKKQTMGVFVDSGNGIAENGGMVRIDVYRVNGKYYFVPVYTADVVKKVLPDRASTANKPYSEWRTMEDKDFLFSLYSRDLVHIKSKKGIPIKNVDGSLGESKEVYAYYIGADISGAKIEGKAHDSRYTFRGIGVQKLELIEKCQVDILGHISTVKNEKRMGFS

SEQ ID NO: 18703 - protein, 1128 aa, unidentified; identical to SEQ ID NO: 16229
  REGION 1..1128: note = Cas Enzyme sequence

SEQ ID NO: 18704 - protein, 1128 aa, unidentified
  REGION 1..1128: note = Cas Enzyme sequence
MDEKMDYRIGLDIGIASVGWAVLQNNSDDEPVRIVDLGVRIFDTAEIPKTGESLAGPRRAARTTRRRLRRRKHRLDRIKWLFENQGLINIDDFLKRYNMAGLPDVYQLRYEALDRKLTDEELAQVLLHIAKHRGFRSTRKAETAAKENGAVLKATDENQKRMQEKGYRTVGEMIYLDEAFRTGCSWSEKGYILTPRNKAENYQHTMLRAMLVEEVKEIFSSQRRLGNEKATEELEEKYLEIMTSQRSFDLGPGMQPDGKPSPYAMEGFSDRVGKCTFLGDQGELRGAKGTYTAEYFVALQKINHTKLVNQDGETRNFTEEERRALTLLLFTQKEVKYAAVRKKLGLPEDILFYNLNYKKAATKEEQQKENQNTEKAKFIGMPYYHDYKKCLEERVKYLTENEVRDLFDEIGMILTCYKNDDSRTERLAKLGLVPIEMEGLLAYTPTKFQHLSMKAMRNIIPFLEKGMTYDKACEEAGYDFKADSKGIKQKLLTGEKVNQTINEITNPVVKRSVSQTVKVINAIIRTYGSPQAINIELAREMSKTFEERRKIKGDMEKRQKNNEDVKKQIQELGKLSPTGQDILKYRLWQEQQGICMYSGKTIPLEELFKPGYDIDHILPYSITFDDSFRNKVLVTSQENRQKGNRTPYEYMGNDEQRWNEFETRVKTTIRDYKKQQKLLKKHFSEEERSEFKERNLTDTKYITTVIYNMIRQNLEMAPLNRPEKKKQVRAVNGAITAYLRKRWGLPQKNRETDTHHAMDAVVIACCTDGMIQKISRYTKVRERCYSKGTEFVDAETGEIFRPEDYSRAEWDEIFGVHIPKPWETFRAELDVRMGDDPKGFLDTHSDVALELDYPEYIYENLRPIFVSRMPNHKVTGAAHADTIRSPRHFEDEGIVLTKTALTDLKLDKHGEIDGYYNPQSDLLLYEALKKQLLLYGNDAKKAFAQDFHKPKADGTEGPVVRKVKIQKKQTMGVFVDSGNGIAENGGMVRIDVYRVNGKYYFVPVYTADVVKKVLPDRASTANKPYSEWRTMEDKDFLFSLYSRDLVHIKSKKGIPIKNVDGSLGESKEVYAYYIGADISGAKIEGKAHDSRYTFRGIGVQKLELIEKCQVDILGHISTVKNEKRMGFS

SEQ ID NO: 18705 - protein, 1128 aa, unidentified; identical to SEQ ID NO: 16238
  REGION 1..1128: note = Cas Enzyme sequence

SEQ ID NO: 18706 - protein, 1128 aa, unidentified; identical to SEQ ID NO: 16243
  REGION 1..1128: note = Cas Enzyme sequence

SEQ ID NO: 18707 - protein, 1128 aa, unidentified
  REGION 1..1128: note = Cas Enzyme sequence
MDEKMDYRIGLDIGIASVGWAVLQNNSDDEPVRIVDLGVRIFDTAEIPKTGESLAGPRRAARTTRRRLRRRKHRLDRIKWLFENQGLINIDDFLKRYNMAGLPDVYQLRYEALDRKLTDEELAQVLLHIAKHRGFRSTRKAETAAKENGAVLKATDENQKRMQEKGYRTVGEMIYLDEAFRTGCSWSEKGYILTPRNKAENYQHTMLRAMLVEEVKEIFSSQRRLGNEKATEELEEKYLEIMTSQRSFDLGPGMQPDGKPSPYAMEGFSDRVGKCTFLGDQGELRGAKGTYTAEYFVALQKINHTKLVNQDGETRNFTEEERRALTLLLFTQKEVKYAAVRKKLGLPEDILFYNLNYKKAATKEEQQKENQNTEKAKFIGMPYYHDYKKCLEERVKYLTENEVRDLFDEIGMILTCYKNDDSRTERLAKLGLVPIEMEGLLAYTPTKFQHLSMKAMRNIIPFLEKGMTYDKACEEAGYDFKADSKGIKQKLLTGEKVNQTINEITNPVVKHSVSQTVKVINAIIRTYGSPQAINIELAREMSKTFEERRKIKGDMEKRQKNNEDVKKQIQELGKLSPTGQDILKYRLWQEQQGICMYSGKTIPLEELFKPGYDIDHILPYSITFDDSFRNKVLVTSQENRQKGNRTPYEYMGNDEQRWNEFETRVKTTIRDYKKQQKLLKKHFSEEERSEFKERNLTDTKYITTVIYNMIRQNLEMAPLNRPEKKKQVRAVNGAITAYLRKCWGLPQKNRETDTHHAMDAVVIACCTDGMIQKISRYTKVRERCYSKGTEFVDAETGEIFRPEDYSRAEWDEIFGVHIPKPWETFRAELDVRMGDDPKGFLDTHSDVALELDYPEYIYENLRPIFVSRMPNHKVTGAAHADTIRSPRHFKDEGIVLTKTALTDLKLDKHGEIDGYYNPQSDLLLYEALKKQLLLYGNDAKKAFAQDFHKPKADGTEGPVVRKVKIQKKQTMGVFVDSGNGIAENGGMVRIDVYRVNGKYYFVPVYTADVVKKVLPDRASTANKPYSEWRTMEDKDFLFSLYSRDLVHIKSKKGIPIKNVDGSLGESKEVYAYYIGADISGAKIEGKAHDSRYTFRGIGVQKLELIEKCQVDILGHISTVKNEKRMGFS

SEQ ID NO: 18708 - protein, 1128 aa, unidentified
  REGION 1..1128: note = Cas Enzyme sequence
MDEKMDYRIGLDIGIASVGWAVLQNNSDDEPVRIVDLGVRIFDTAEIPKTGESLAGPRRAARTTRRRLRRRKHRLDRIKWLFENQGLINIDDFLKRYNMAGLPDVYQLRYEALDRKLTDEELAQVLLHIAKHRGFRSTRKAETAAKENGAVLKATDENQKRMQEKGYRTVGEMIYLDEAFRTGCSWSEKGYILTPRNKAENYQHTMLRAMLVEEVKEIFSSQRRLGNEKATEELEEKYLEIMTSQRSFDLGPGMQPDGKPSPYAMEGFSDRVGKCTFLGDQGELRGAKGTYTAEYFVALQKINHTKLVNQDGETRNFTEEERRALTLLLFTQKEVKYAAVRKKLGLPEDILFYNLNYKKAATKEEQQKENQNTEKAKFIGMPYYHDYKKCLEERVKYLTENEVRDLFDEIGTILTCYKNDDSRTERLAKLGLVPEDMEGLLAYTPTKFQHLSMKAMRNIIPFLEKGMTYDKACEEAGYDFKADSKGIKQKLLTGENVNQTINEITNPVVKRSVSQTVKVINAIIRTYGSPQAINIELAREMSKTFEERRKIKGDMEKRQKNNEDVKKQIQELGKLSPTGQDILKYRLWQEQQGICMYSGKTIPLEELFKPGYDIDHILPYSITFDDSFRNKVLVTSQENRQKGNRTPYEYMGNDEQRWNEFETRVKTTIRDYKKQQKLLKKHFSEEERSEFKERNLTDTKYITTVIYNMIRQNLEMAPLNRPEKKKQVRAVNGAITAYLRKRWGLPQKNRETDTHHAMDAVVIACCTDGMIQKISRYTKVRERCYSKGTEFVDAETGEIFRPEDYSRAEWDEIFGVHIPKPWETFRAELDVRMGDDPKGFLDTHSDVALELDYPEYIYENLRPIFVSRMPNHKVTGAAHADTIRSPRHFKDEGIVLTKTALTDLKLDKDGEIDGYYNPQSDLLLYEALKKQLLLYGNDAKKAFAQDFHKPKADGTEGPVVRKVKIQKKQTMGVFVDSGNGIAENGGMVRIDVFRVNGKYYFVPVYTADVVKKVLPNRASTANKPYSEWRTMEDKDFLFSLYSRDLVHIKSKKGIPIKNVDGSLGESKEVYAYYIGADISGAKIEGKAHDSRYTFRGIGVQKLELIEKCQVDILGHISTVKNEKRMGFS

SEQ ID NO: 18709 - protein, 1128 aa, unidentified
  REGION 1..1128: note = Cas Enzyme sequence
MDEKMDYRIGLDIGIASVGWAVLQNNSDDEPVRIVDLGVRIFDTAEIPKTGESLAGPRRAARTTRRRLRRRKHRLDRIKWLFENQGLINIDDFLKRYNMAGLPDVYQLRYEALDRKLTDEELAQVLLHIAKHRGFRSTRKAETAAKENGAVLKATDENQKRMQEKGYRTVGEMIYLDEAFRTGCSWSEKGYILTPRNKAENYQHTMLRAMLVEEVKEIFSSQRRLGNEKATEELEEKYLEIMTSQRSFDLGPGMQPDGKPSPYAMEGFSDRVGKCTFLGDQGELRGAKGTYTAEYFVALQKINHTKLVNQDGETRNFTEEERRALTLLLFTQKEVKYAAVRKKLGLPEDILFYNLNYKKAATKEEQQKENQNTEKAKFIGMPYYHDYKKCLEERVKYLTENEVRDLFDEIGTILTCYKNDDSRTERLAKLGLVPIEMEGLLAYTPTKFQHLSMKAMRNIIPFLEKGMTYDKACEEAGYDFKADSKGIKQKLLTGEKVNQTINEITNPVVKRSVSQTVKVINAIIRTYGSPQAINIELAREMSKTFEERRKIKGDMEKRQKNNEDVKKQIQELGKLSPTGQDILKYRLWQEQQGICMYSGKTIPLEELFKPGYDIDHILPYSITFDDSFRNKVLVTSQENRQKGNRTPYEYMGNDEQRWNEFETRVKTTIRDYKKQQKLLKKHFSEEERSEFKERNLTDTKYITTVIYNMIRQNLEMAPLNRPEKKKQVRAVNGAITAYLRKRWGLPQKNRETDTHHAMDAVVIACCTDGMIQKISRYTKVRERCYSKGTEFVDAETGEIYRPEDYSRAEWDEIFGVHIPKPWETFRAELDVRMGDDPKGFLDTHSDVALELDYPEYIYENLRPIFVSRMPNHKVTGAAHADTIRSPRHFKDEGIVLTKTALTDLKLDKHGEIDGYYNPQSDLLLYEALKKQLLLYGNDAKKAFAQDFHKPKADGTEGPVVRKVKIQKKQTMGVFVDSGNGIAENGGMVRIDVYRVNGKYYFVPVYTADVVKKVLPNRAATAHKPYGEWKVMEDKDFLFSLYSRDLIHIKSKKDIPIKMVNGGMEGIKETYAYYIGADISAANIQGIAHDSRYKFRGLGIQSLDVLEKCQIDVLGHVSVVRSEKRMGFS

SEQ ID NO: 18710 - protein, 1128 aa, unidentified
  REGION 1..1128: note = Cas Enzyme sequence
MDEKMDYRIGLDIGIASVGWAVLQNNSDDEPVRIVDLGVRIFDTAEIPKTGESLAGPRRAARTTRRRLRRRKHRLDRIKWLFENQGLINIDDFLKRYNMAGLPDVYQLRYEALDRKLTDEELAQVLLHIAKHRGFRSTRKAETAAKENGAVLKATDENQKRMQEKGYRTVGEMIYLDEAFRTGCSWSEKGYILTPRNKAENYQHTMLRAMLVEEVKEIFSSQRRLGNEKATEELEEKYLEIMTSQRSFDLGPGMQPDGKPSPYAMEGFSDRVGKCTFLGDQGELRGAKGTYTAEYFVALQKINHTKLVNQDGETRNFTEEERRALTLLLFTQKEVKYAAVRKKLGLPEDILFYNLNYKKAATKEEQQKENQNTEKAKFIGMPYYHDYKKCLEERVKYLTENEVRDLFDEIGTILTCYKNDDSRTERLAKLGLVPIEMEGLLAYTPTKFQHLSMKAMRNIIPFLEKGMTYDKACEEAGYDFKADSKGIKQKLLTGEKVNQTINEITNPVVKRSVSQTVKVINAIIRTYGSPQAINIELAREMSKTFEERRKIKGDMEKRQKNNEDVKKQIQELGKLSPTGQDILKYRLWQEQQGICMYSGKTIPLEELFKPGYDIDHILPYSITFDDSFRNKVLVTSQENRQKGNRTPYEYMGNDEQRWNEFETRVKTTIRDYKKQQKLLKKHFSEEERSEFKERNLTDTKYITTVIYNMIRQNLEMAPLNRPEKKKQVRAVNGAITAYLRKRWGLPQKNRETDTHHAMDAVVIACCTDGMIQKISRYTKVRERCYSKGTEFVDAETGEIFRPEDYSRAEWDEIFGVHIPKPWETFRAELDVRMGDDPKGFLDTHSDVALELDYPEYIYENLRPIFVSRMPNHKVTGAAHADTIRSPRHFKDEGIVLTKTALTDLKLDKDGEIDGYYNPQSDLLLYEALKKQLLLYGNDAKKAFAQDFHKPKADGTEGPVVRKVKIQKKQTMGVFVDSGNGIAENGGMVRIDVYRVNGKYYFVPVYTADVVKKVLPNRAATAHKPYGEWKVMEDKDFLFSLYSRDLIHIKSKKDIPIKMVNGGMEGIKETYAYYIGADISAANIQGIAHDSRYKFRGLGIQSLDVLEKCQIDVLGHVSVVRSEKRMGFS

SEQ ID NO: 18711 - protein, 989 aa, unidentified
  REGION 1..989: note = Cas Enzyme sequence
KAETAAKENGAVLKATDENQKRMQEKGYRTVGEMIYLDEAFRTGCSWSEKGYILTPRNKAENYQHTMLRAMLVEEVKEIFSSQRRLGNEKATEELEEKYLEIMTSQRSFDLGPGMQPDGKPSPYAMEGFSDRVGKCTFLGDQGELRGAKGTYTAEYFVALQKINHTKLVNQDGETRNFTEEERRALTLLLFTQKEVKYAAVRKKLGLPEDILFYNLNYKKAATKEEQQKENQNTEKAKFIGMPYYHDYKKCLEERVKYLTENEVRDLFDEIGMILTCYKNDDSRTERLAKLGLVPIEMEGLLAYTPTKFQHLSMKAMRNIIPFLEKGMTYDKACEEAGYDFKADSKGIKQKLLTGEKVNQTINEITNPVVKRSVSQTVKVINAIIRTYGSPQAINIELAREMSKTFEERRKIKGDMEKRQKNNEDVKKQIQELGKLSPTGQDILKYRLWQEQQGICMYSGKTILLEELFKPGYDIDHILPYSITFDDSFRNKVLVTSQENRQKGNRTPYEYMGNDEQRWNEFETRVKTTIRDYKKQQKLLKKHFSEEERSEFKERNLTDTKYITTVIYNMIRQNLEMAPLNRPEKKKQVRAVNGAITAYLRKRWGLPQKNRETDTHHAMDAVVIACCTDGMIQKISRYTKVRERCYSKGTEFVDAETGEIFRPEDYSRAEWDEIFGVHIPKPWELFRTELDVRMGDDPKGFLDTHSDVALELDYPEYIYENLRPIFVSRMPNHKVTGAAHADTIRSPRHFKDEGIVLTKTALTDLKLDKHGEIDGYYNPQSDLLLYEALKKQLLLYGNDAKKAFAQDFHKPKADGTEGPVVRKVKIQKKQTMGVFVDSGNGIAENGGMVRIDVFRVNGKYYFVPVYTADVVKKVLPNRAATAHKPYGEWKVMEDKDFLFSLYSRDLIHIKSKKDIPIKMVNGGMEGIKETYAYYIGADISAANIQGIAHDSRYKFRGLGIQSLDVLEKCQIDVLGHVSVVRSEKRMGFS

SEQ ID NO: 18712 - protein, 1128 aa, unidentified; identical to SEQ ID NO: 16230
  REGION 1..1128: note = Cas Enzyme sequence

SEQ ID NO: 18713 - protein, 1128 aa, unidentified
  REGION 1..1128: note = Cas Enzyme sequence
MDEKMDYRIGLDIGIASVGWAVLQNNSDDEPVRIVDLGVRIFDTAEIPKTGESLAGPRRAARTTRRRLRRRKHRLDRIKWLFENQGLINIDDFLKRYNMAGLPDVYQLRYEALDRKLTDEELAQVLLHIAKHRGFRSTRKAETAAKENGAVLKATDENQKRMQEKGYRTVGEMIYLDEAFRTGCSWSEKGYILTPRNKAENYQHTMLRAMLVEEVKEIFSSQRRLGNEKATEELEEKYLEIMTSQRSFDLGPGMQPDGKPSPYAMEGFSDRVGKCTFLGDQGELRGAKGTYTAEYFVALQKINHTKLVNQDGEIRNFTEEERRALTLLLFTQKEVKYAAVRKKLGLPEDILFYNLNYKKAATKEEQQKENQNTEKAKFIGMPYYHDYKKCLEERVKYLTENEVRDLFDEIGTILTCYKNDDSRTERLVKLGLVPIEMEGLLAYTPTKFQHLSMKAMRNIIPFLEKGMTYDKACEEAGYDFKADSKGIKQKLLTGEKVNQTINEITNPVVKRSVSQTVKVINAIIRTYGSPQAINIELAREMSKTFEERRKIKGDMEKRQKNNEDVKKQIQELGKLSPTGQDILKYRLWQEQQGICMYSGKTIPLEELFKPGYDIDHILPYSITFDDSFRNKVLVTSQENRQKGNRTPYEYMGNDEQRWNEFETRVKTTIRDYKKQQKLLKKHFSEEERSEFKERNLTDTKYITTVIYNMIRQNLEMAPLNRPEKKKQVRAVNGAITAYLRKRWGLPQKNRETDTHHAMDAVVIACCTDGMIQKISRYTKVRERCYSKGTEFVDAETGEIFRPEDYSRAEWDEIFGVHIPKPWETFRAELDVRMGDDPKGFLDTHSDVALGLDYPEYDYENLRPIFVSRMPNHKVTGAAHADTIRSPRHFKDEGIVLTKTALTDLKLDKDGEIDGYYNPQSDLLLYEALKKQLLLYGNDAKKAFAQDFHKPKADGTEGPVVRKVKIQKKQTMGVFVDSGNGIAENGGMVRIDVFHVNGKYYFVPVYTADVVKKVLPNRAATAHKPYGEWKVMEDKDFLFSLYSRDLIHIKSKKDIPIKMVNGGMEGIKETYAYYIGADISAANIQGIAHDSRYKFRGLGIQSLDVLEKCQIDVLGHVSVVRSEKRMGFS

SEQ ID NO: 18714 - protein, 1128 aa, unidentified
  REGION 1..1128: note = Cas Enzyme sequence
MDEKMDYRIGLDIGIASVGWAVLQNNSDDEPVRIVDLGVRIFDTAEIPKTGESLAGPRRAARTTRRRLRRRKHRLDRIKWLFENQGLINIDDFLKRYNMAGLPDVYQLRYEALDRKLTDEELAQVLLHIAKHRGFRSTRKAETAAKENGAVLKATDENQKRMQEKGYRTVGEMIYLDEAFRTGCSWSEKGYILTPRNKAENYQHTMLRAMLVEEVKEIFSSQRRLGNEKATEELEEKYLEIMTSQRSFDLGPGMQPDGKPSPYAMEGFSDRVGKCTFLGDQGELRGAKGTYTAEYFVALQKINHTKLVNQDGETRNFTEEERRALTLLLFTQKEVKYAAVRKKLGLPEDILFYNLNYKKAATKEEQQKENQNTEKAKFIGMPYYHDYKKCLEERVKYLTENEVRDLFDEIGMILTCYKNDDSRTERLAKLGLVPIEMEGLLAYTPTKFQHLSMKAMRNIIPFLEKGMTYDKACEEAGYDFKADSKGIKQKLLTGEKVNQTINEITNPVVKRSVSQTVKVINAIIRTYGSPQAINIELAREMSKTFEERRKIKGDMEKRQKNNEDVKKQIQELGKLSPTGQDILKYRLWQEQQGICMYSGKTIPLEELFKPGYDIDHILPYSITFDDSFRNKVLVTSQENRQKGNRTPYEYMGNDEQRWNEFETRVKTTIRDYKKQQKLLKKHFSEEERSEFKERNLTDTKYITTVIYNMIRQNLEMAPLNRPEKKKQVRAVNGAITAYLRKRWGLPQKNRETDTHHAMDAVVIACCTDGMIQKISRYTKVRERCYSKGTEFVDAETGEIFRPEDYSRAEWDEIFGVHIPKPWETFRAELDVRMGDDPKGFLDTHSDVALELDYPEYIYENLRPIFVSRMPNHKVTGAAHADTIRSPRHFKDEGIVLTKTALTDLKLDKHGEIDGYYNPQSDLLLYEALKKQLLLYGNDAKKAFAQDFHKPKADGTEGPVVRKVKIQKKQTMGVFVDSGNGIAENGGMVRIDVFRVNGKYYFVPVYTADVVKKVLPNRASTANKPYSEWRTMEDKDFLFSLYSRDLVHIKSKKGIPIKNVDGSLGESKEVYAYYIGADISGAKIEGKAHDSRYTFRGIGVQKLELIEKCQVDILGHISTVKNEKRMGFS

SEQ ID NO: 18715 - protein, 1128 aa, unidentified
  REGION 1..1128: note = Cas Enzyme sequence
MDEKMDYRIGLDIGIASVGWAVLQNNSDDEPVRIVDLGVRIFDTAEIPKTGESLAGPRRAARTTRRRLRRRKHRLDRIKWLFENQGLINIDDFLKRYNMAGLPDVYQLRYEALDRKLTDEELAQVLLHIAKHRGFRSTRKAETAAKENGAVLKATDENQKRMQEKGYRTVGEMIYLDEAFRTGCSWSEKGYILTPRNKAENYQHTMLRAMLVEEVKEIFSSQRRLGNEKATEELEEKYLEIMTSQRSFDLGPGMQPDGKPSPYAMEGFSDRVGKCTFLGDQGELRGAKGTYTAEYFVALQKINHTKLVNQDGETRNFTEEERRALTLLLFTQKEVKYAAVRKKLGLPEDILFYNLNYKKAATKEEQQKENQNTEKAKFIGMPYYHDYKKCLEERVKYLTENEVRDLFDEIGMILTCYKNDDSRTERLAKLGLVPIEMEGLLAYTPTKFQHLSMKAMRNIIPFLEKGMTYDKACEEAGYDFKADSKGIKQKLLTGEKVNQTINEITNPVVKRSVSQTVKVINAIIRTYGSPQAINIELAREMSKTFEERRKIKGDMEKRQKNNEDVKKQIQELGKLSPTGQDILKYRLWQEQQGICMYSGKTIPLEELFKPGYDIDHILPYSITFDDSFRNKVLVTSQENRQKGNRTPYEYMGNDEQRWNEFETRVKTTIRDYKKQQKLLKKHFSEEERSEFKERNLTDTKYITTVIYNMIRQNLEMAPLNRPEKKKQVRAVNGAITAYLRKRWGLPQKNRETDTHHAMDAVVIACCTDGMIQKISRYTKVRERCYSKGTEFVDAETGEIFRPEDYSRAEWDEIFGVHIPKPWETFRAELDVRMGDDPKGFLDTHSDVALELDYPEYIYENLRPIFVSRMPNHKVTGAAHADTIRSPRHFKDEGIVLTKTALTDLKLDKDGEIDGYYNPQSDLLLYEALKKQLLLYGNDAKKAFAQDFHKPKADGTEGPVVRKVKIQKKQTMGVFVDSGNGIAENGGMVRIDVFRVNGKYYFVPVYTADVVKKVLPNRASTANKPYSEWRTMEDKDFLFSLYSRDLVHIKSKKGIPIKNVDGSLGESKEVYAYYIGADISGAKIEGKAHDSRYTFRGIGVQKLELIEKCQVDILGHISTVKNEKRMGFS

SEQ ID NO: 18716 - protein, 1135 aa, unidentified
  REGION 1..1135: note = Cas Enzyme sequence
  REGION 751..759: note = misc_feature - Xaa can be any naturally occurring amino acid
MDEKMDYRIGLDIGIASVGWAVLQNNSDDEPVRIVDLGVRIFDTAEIPKTGESLAGPRRAARTTRRRLRRRKHRLDRIKWLFENQGLINIDDFLKRYNMAGLPDVYQLRYEALDRKLTDEELAQVLLHIAKHRGFRSTRKAETAAKENGAVLKATDENQKRMQEKGYRTVGEMIYLDEAFRTGCSWSEKGYILTPRNKAENYQHTMLRAMLVEEVKEIFSSQRRLGNEKATEELEEKYLEIMTSQRSFDLGPGMQPDGKPSPYAMEGFSDRVGKCTFLGDQGELRGAKGTYTAEYFVALQKINHTKLVNQDGETRNFTEEERRALTLLLFTQKEVKYAAVRKKLGLPEDILFYNLNYKKAATKEEQQKENQNTEKAKFIGMPYYHDYKKCLEERVKYLTENEVRDLFDEIGMILTCYKNDDSRTERLAKLGLVPIEMEGLLAYTPTKFQHLSMKAMRNIIPFLEKGMTYDKACEEAGYDFKADSKGIKQKLLTGEKVNQTINEITNPVVKRSVSQTVKVINAIIRTYGSPQAINIELAREMSKTFEERRKIKGDMEKRQKNNEDVKKQIQELGKLSPTGQDILKYRLWQEQQGICMYSGKTIPLEELFKPGYDIDHILPYSITFDDSFRNKVLVTSQENRQKGNRTPYEYMGNDEQRWNEFETRVKTTIRDYKKQQKLLKKHFSEEERSEFKERNLTDTKYITTVIYNMIRQNLEIAPLNRPEKKKQVRAVNGAITAYLRKRWGLPQKNRXXXXXXXXXDTHHAMDAVVIACCTDGMIQKISRYTKVRERCYSKGTEFVDAETGEIFRPEDYSRAEWDEIFGVHIPKPWETFRAELDVRMGDDPKGFLDTHSDVALELDYPEYIYENLRPIFVSRMPNHKVTGAAHADTIRSPRHFKDEGIVLTKTALTDLKLDKDGEIDGYYNPQSDLLLYEALKKQLLLYGNDAKKAFAQDFHKPKADGTEGPVVRKVKIQKKQTMGVFVDSGNGIAENGGMVRIDVYHVNGKYYFVPVYTADVVKKVLPDRASTANKPYSEWRTMEDKDFLFSLYSRDLVHIKSKKGIPIKNVDGSLGESKEVYAYYIGADISGAKIEGKAHDSRYTFRGIGVQKLELIEKCQVDILGHISTVKNEKRMGFS

SEQ ID NO: 18717 - protein, 1133 aa, unidentified
  REGION 1..1133: note = Cas Enzyme sequence
  REGION 141..145: note = misc_feature - Xaa can be any naturally occurring amino acid
  REGION 559..567: note = misc_feature - Xaa can be any naturally occurring amino acid
MDEKMDYRIGLDIGIASVGWAVLQNNSDDEPVRIVDLGVRIFDTAEIPKTGESLAGPRRAARTTRRRLRRRKHRLDRIKWLFENQGLINIDDFLKRYNMAGLPDVYQLRYEALDRKLTDEELAQVLLHIAKHRGFRSTRKXXXXXTAAKENGAVLKATDENQKRMQEKGYRTVGEMIYLDEAFRTGCSWSEKGYILTPRNKAENYQHTMLRAMLVEEVKEIFSSQRRLGNEKATEELEEKYLEIMTSQRSFDLGPGMQPDGKPSPYAMEGFSDRVGKCTFLGDQGELRGAKGTYTAEYFVALQKINHTKLVNQDGETRNFTEEERRALTLLLFTQKEVKYAAVRKKLGLPEDILFYNLNYKKAATKEEQQKENQNTEKAKFIGMPYYHDYKKCLEERVKYLTENEVRDLFDEIGTIMTCYKNDDSRTERLAKLGLVPIEMEGLLAYTPTKFQHLSMKAMRNIIPFLEKGMTYDKACEEAGYDFKADSKGIKQKLLTGEKVNQTINEITNPVVKRSVSQTVKVINAIIRTYGSPQAINIELAREMSKTFEERRKIKGDMXXXXXXXXXEDVKKQIQELGKLSPTGQDILKYRLWQEQQGICMYSGKTIPLEELFKPGYDIDHILPYSITFDDSFRNKVLVTSQENRQKGNRTPYEYMGNDEQRWNEFETRVKTTIRDYKKQQKLLKKHFSEEERSEFKERNLTDTKYITTVIYNMIRQNLEMAPLNRPEKKKQVRAVNGAITAYLRKRWGLPQKNRETDTHHAMDAVVIACCTDGMIQKISRYTKVRERCYSKGTEFVDAETGEIFRPEDYSRAEWDEIFGVHIPKPWETFRAELDVRMGDDPKGFLDTHSDVALELDYPEYDYENLRPIFVSRMPNHKVTGAAHADTIRSPRHFKDEGIVLTKTALTDLKLDKDGEIDGYYNPQSDLLLYEALKKQLLLYGNDAKKAFAQDFHKPKADGTEGPVVRKVKIQKKQTMGVFVDSGNGIAENGGMVRIDVFHVNGKYYFVPVYTADVVKKVLPNRAATAHKPYGEWKVMEDKDFLFSLYSRDLIHIKSKKDIPIKMVNGGMEGIKETYAYYIGADISAANIQGIAHDSRYKFRGLGIQSLDVLEKCQIDVLGHVSVVRSEKRMGFS

SEQ ID NO: 18718 - protein, 1208 aa, unidentified
  REGION 1..1208: note = Cas Enzyme sequence
MEKVLGLDLGTNSIGWAIVQHNDDLSYSLLDKGVNIFQDGVAHDKSGEKPMVSERTAARSSRRHYFRRRLRKIELLEVLIKHNLCPYLSGEDLSEWKNHKKYPLKDEFLEWQKTDDDMDRNPYHDRYVCLTQELDLSVISNRHMLGRAFYHMVQRRGFISNRKETKKDDEGKVKDSIKSLTKAMQESGCDYLGEYFYRLYEKGGKIRKNYTDRVEHYKKEFSAICEKQHLDVELVKLLENAIFYQRPLKSQKGQVGHCTFEKNKTRCPISHPRYEEFRMWCFINNIKVRTWKDDDFRSLSSEEVGQIISLFFRKSKNQFDFEDIAKKIAGKGNYCDKTDKSEKPYRFNYKMFTSVSGCTVSAGLRSIYGEDWLNQICGVYSLGEGKTPDQILNDIWHVLFSFDDEEKLKEWAKVKLQMSSEEADAFEKISVPQGYASLSLNAINKILPYLRKGYRYDEAVIMANLPAVMGCDAERLPDEVAENIAIIMEDHMSNPLEKKKSIHQSVTEYLRDCQNVDSKRIEKLYHPSMIETYQAALPVDGIYKLGSPRTSSVRNPMAMRALFRLRKLLNELLRDGKIDSDTLVRIEFARGLNDSNMRKAIETYQREQKRLHDDYSANIKEQMGDDYAPSDDEILKYQLWEEQKHRCPYTGAQIGLEDFLGASPKYDIEHTVPRSRGGDNSQMNKTLCESRFNRDVKKGMLPAELANHLEVMANVDSFGWQEEIDSLRKRLERTRSYSATKEEKDRKIQDRHYFKMKLDYLEGKLKRFAMTEVPEGFSNRQGVDIGIIGRYARMYLQTVFKRVSTVKGATTAEFRKMWGLQDYYSKKERVSHAHHCVDAITIACIGRNEYDRWAQYMRDEERYRLSAADRPHFPKPWETFTEDVLSVSDSILVPHYTPSNLSKHTKKRLRVRGKLQYGPGGEKLYVQGDTARCSLHEQTFYGAIKKNDEIKYVVRKSLDSLEEKDIKNIVDEVVREKVAIAVKEKGLKKAVADTIWMNEELRIPIKKVRIYTPTVTNPIKLKGHRDKSVHQHKRYLHVKNDGNYCMAIYEGNNDRGKVIRSYKLVNNLDAVNYFNGKTGLDNLVPYSDEKDLPLKCILRTGTMVLFYEKSPKELYECGVEELSKRLYKVTGMSSMTIKQGDRSYVYGTIECRHHLEARRSSDLKSKSGAWKNGETYRSVISLLHSQLNAYVEGYDFDITSSGQLKFKH

SEQ ID NO: 18719 - protein, 1506 aa, unidentified
  REGION 1..1506: note = Cas Enzyme sequence
MKTILGLDLGPNSIGWAKVEVDDEGNYLRNIKLGSRIIPMTQDMLGDFDKGVKVSQTATRTDFRGIRRLIERHLLRRERLHRVLHVLKFLPKHYEDAIGWDRNEPATYGKFVNNSEPKLAWERQEDGSMRFLFMESFNEMVADFAQNQPSLVSDGKKIPLDWTIYYLRKKALTQPIKKEELAWILLNFNQKRGYYQLRGEEEEDNLTKRKEYYKLKVVGVEADGAPKGGKTWYNIHLENGWTARCQSKIPLDDWVGKVKEYIVTTEYEDDGKTPKCDKEGKVKRSFKSPEKDDWQLIKTRTEKFIDDSNKTVGAFIYDHLLEKPFDKIRGKYIRTIERKYYKNELREILREQTKYHEGLHSLEALKICAEELYKNNQQHQEYLLKKDMTFLLLNDLIFYQRPLKSKKSLIADCPYEVYKYDDKLTGKKGQKKIKCIAKSNPYYQEFRLWQFIANLRLFSVTDGKEVTAEYLKTEEDYVRLFSFLNDRKDIKQETFLRSFLKLKKVPIGSEKIYPIRWNYIEDANKSYPCNATRHELLLAFDRADIPRELLDVEGREYRLWHLLYSIEAKEETESALRKLKANKAFGDLNIDDDFVNSFLKIKPFEKEYGAYSEKAIKKLLAVMRRGSLWKEADICEATKQNIAKILQNDIDEKLKKKIEAAVSSFNKLSDFQGLPTWLACYVVYGRHSEAAQIQCWQSPEDLKTYINKFKQHSLRNPIVEQCLLETLRTVYDIWKDAGEIDEIHIELGRNMKSTAEQRARKTNEFLRNENTNLRIKNLLVELKNDDKIENVRPYSPSQQEILRIYEEGALQELSKDDEMFEDISKISKMAQPSPTELSRYKLWLEQKYRSPYTGRVIPLSKLFTTAYQIEHIIPQSRYFDDSFNNKVICESEVNSLKDNMLGYEFIKECGGRIVHCTLLGDVKIFTKEEYKDFVTKHYIDNTYKRDKLLLEDIPQEFSARQLNDSRYISKMVQTVLSNIVRAENEQEATSKFVVSCNGAITNRLKKDWGLNDVWSSIVCPRFKRLNEITKTNAFGHWEDKAGKHVFQTTVPLELQRGFSKKRIDHRHHAMDALVIACASRNIVNYLNNESANSPEKREDLRKKLCDEKRKIRKPWKTFTQDAREALSDVVVSFKNYVRVINKATNYYEHYSSSGNKVMISQKGNDMWAIRKPLHKESVFGRVNLRRKVIVSLKKALENIPAICDKTLRDYINALVEKHFNTRQLLAHFKSINYRLNRKRVDKVEVWQFSDEKIEMVARRKSLDTSFDDKQISSITDTGIQKILLNYLQTKDGNAEIAFTPEGIEEMNKNISLYNGGKAHQPILKVRVATPKGMKYPVGQTGNKATKFVVAEKGTNLYFAIYENELGIRSYDTIPLNIVVERLKEGLSPVPQANEADIPLKFYLSPNDLVYVPTKENEDELCRDRIYKFVDSSGTTANFVPHTSANTIYNVDKEYAEKCCNGAVILNEYGLGSSQSKNQKALDGEMIKEICWKLKVDRLGNIIKVIK

SEQ ID NO: 18720 - protein, 1128 aa, unidentified
  REGION 1..1128: note = Cas Enzyme sequence
MSDLVLGLDIGIGSVGVGILNKVTGEIIHKNSRIFPAAQAENNVERRTNRQGRRLTRRKKHRRVRLNHLFEESGLITDFTQVSINLNPYQLRVKGLTDELSNEELFIALKNMVKHRGISYLDDASDDGNSSVGDYAQIVKENSKQLETKTPGQIQLERYQKYGQLRGDFTVEEDGKKHRLINVFPTSAYRAEALRILQTQQEFNSQITDEFINRYLEILTGKRKYYHGPGNEKSRTDYGRYTTKKDSEDEYITLDNIFGILIGKCTFYPEEFRAAKASYTAQEFNLLNDLNNLTVPTETKKLSEEQKNQIINYVKNEKAMGAAKLFKYIAKLLSCDVADIKGYRIDKSDKAEIHTFEAYRKMKTIETIDIEQMDREKLDRLAYVLTLNTEKEGIQEAIEHEFADGTFSQEQVDELVQFRKANSSIFGKGWHNFSVKLMMELIPELYATSEEQMTILTRLGKQKTTSSSNKTKYIDERLLTEEIYNPVVAKSVRQAIKIVNAAIKEYGDFDNIVIEMARETNKDDEKKAIQKIQKANKDEKDAAMLKAANQYNGKAELPHSVFHGHKQLATKIRLWHQQGERCLYTGKTISIHDLINNPNQFEIDHILPLSITFDDSLANKVLVYATANQEKGQRTPYQALDSMDDAWSFRELKAFVRESKTLSNKKKEYLLTEEDISKFDVRKKFIERNLVDTRYASRVVLNALQEHFRARKIDTKVSVVRGQFTSQLRRHWGIDKTRDTYHHHAVDALIIAASSQLNLWKKQKNTLVSYSEDQLLDIETGELISNDEYKESVFKAPYQHFVDTLKSKEFEDSILFSYQVDSKFNRKISDATIYATRHAKVGKDKKDETYVLGKIKDIYSQTGYDAFIKIYQKDKSKFLMYRHDPQTFEKVIEPILENYPNKEMNEKGKEVPCNPFLKFKEEHGDYIRKYSKKGNGPEIKSLKYYDSKLGNHIDITPKNSNNKVVLQSVSPWRADVYFNKTTGKYEILGLKYADLQFEKGTGTYKISQEKYNAIKKKEGVDSDSEFKFTLYKNDLLLIKDTGTKEQQLFRFLSRSMPNKKHYVELKPYSKDKFEKNESLIEILGPADKSGRCIKGLAKSNISIYKVRTDVLGNQHIIKNEGDKPKLDF

SEQ ID NO: 18721 - protein, 1121 aa, unidentified
  REGION 1..1121: note = Cas Enzyme sequence
MNGLVLGLDIGIASVGVGILNKDTGEIIHTNSRIFPAATADNNVERRNSRQARRLNRRKKHRVVRFQDLFDDYGLLTDFSKVSINLNPYRLRVHGLNQQLTNEELFIALKNIVKRRGISYLDDASEDGGAVSSDYGKAVEENRKLLAEQTPGQIQLERFEKYGQVRGDFTVEEKGDKHRLINVFSTSAYRKEAERILRKQQEFNNQITDKFIEDYLKILTEKRKYYHGPGNEKSRTDYGRFRTDGTTLDNIFGILIGKCTFYPNEYRASKASYTAQEFNLLNDLNNLTVPTETKKLSEEQKKLIIEYTKTTKTLGASTLLKYIAKMIGASVDQIRGYRVDVNNKPEMHTFEVYRKMQSLETIKVEELPRKVLDELAHILTLNTEREGIEEAINLKLKNTFRSEQVLELVQFRKNNSSLFAKGWHNFSLKLMMELIPELYETSEEQMAILTRLGKQKFKETSKRTKYIDEKEVTEEIYNPVVAKSVRQAIKIINEATKKYGIFDNIVIEMARENNEEDAKKDYIKRQKANHDEKNAAMEKAAFQYNGKKELPDSIFHGHKELATKIRLWHQQGEKCLYTGKNIPISDLIHNQYKYEIDHILPLSLSFDDSLSNKVLVLATANQEKGQRTPFQALDSMDDAWSYREFKSYVKDSKLLGNKKKDYLLTEEDISKIEVKQKFIERNLVDTRYSSRVVLNALQDFYKAHKFDTTISVVRGQFTSQLRRKWGLEKSRETYHHHAVDALIIAASSQLRLWKKQNNPLISYKEGQFVDSETGEIISLSDDEYKELVFKAPYDYFVDILRSKKFEDSILFSYQVDSKFNRKISDATIYATRKAKLDKDKSEETYVLGKIKDIYSQAGYDTFIKIYNKDKSKFLMYHKDPQTFEKVIEEILRTYPSKEFNEKNKEVPCNPFEKYRQENGPIRKYSRKGNGSEIKSLKYYDKNIPESFINITPSNSKNKVILRQLNPWRTDVYFNHQTEKYELLGLKYADLQFEKKTGTYSITINKYNEIKEKEGVGKESEFKFTLYKNDLLLIKDTKNNEEQIFRFLSRTMPNQNHYVELKPYDKGNFEGKEKIKVFKMTSNGRCIKGLGKKYLSIYKVKTDILGNKHFIKKEGDEPKLKF

SEQ ID NO: 18722 - protein, 1127 aa, unidentified
  REGION 1..1127: note = Cas Enzyme sequence
MNGLVLGLDIGIASVGVGILKKDTGEIIHANSRLFPAATADNNVERRGFRGGRRLTRRKKHRSVRLHDLFEEYGLLTDFSKVSINLNPYRLRVQGLDNQLTNEKLFIALKNIVKRRGISYLDDASEDGSTVSSDYGKAVEENRKLLSEQTPGQIQLDRFEKYGQLRGDFTVLENSEKRRLINVFSTYAYRKEAERILRKQQEFNNKITDEFIEDYLTILTGKRKYYHGPGNEKSRTDYGRYTTKKDSEGKYITLDNIFGVLIGKCTFYPDEYRASKASYTAQEFNLLNDLNNLTVPTETKKLSEEQKKTIIEYAKTAKTLGASTLLKYIAKLIGASVDQIHGYRIDPNKKPEMHTFEVYRKMQSLETIKVEELPRKVIDELAHILTLNTEREGIEEAINAKLKDTFSQDQVLELVQFRKNNSSLFSKGWHNFSLKLMMELIPELYETSEEQMTIITRLGKQKSKEISKRTKYIDEKELTEEIYNPVVAKSVRQAIKIINESTKKYGIFDNIVIEMARENNEEDAKKEYIKHQKANLDEKNAAMEKAAFQYNGKKELPDNVFHGHKELATKIRLWHQQGEKCLYTGKNIPISGLIQNQYKYEIDHILPLSISFDDSLSNKVLVLATANQEKGQRTPFQALDSMDDAWSYREFKSYVKDSKLISNKKKEYLLTEEDISKIEVKQKFIERNLVDTRYSSRVVLNALQDFYKNHNFDTTISVVRGQFTSQLRRKWGLEKSRETYHHHAVDALIIAASSQLRLWKKQNNPLISYKEEQFVDQKTGEIISLSDDEYKELVFKAPYNHFVDTLKSKKFEDNILFSYQVDSKYNRKISDATIYATRKAKLDKDKSEETYVLGKIKDIYSQAGYDAFIKIYNKDKSRFLMYHKDPQTFEKVIEEIIRTYPSKELNEKNKEVPCNPFEKYRQENGPIRKYSRKGNGPEIKSLKYYDNKLGNHIDITPNESMNQVVLQSLKPWRTDVFFNHQTEKYELMGLKYSDLNFEKGSGKYSISLEKYNSIKMNEGVSEESEFKFTLYKNDLILIKDALTKEAQIFRYGSRNDTSKHYVELKPYDMSKFEGDEKLIKVLGTVAKGGRCIKGLNKKDISIYKVKTDVLGNKHFIKKEGEEPKLKF

SEQ ID NO: 18723 - protein, 1122 aa, unidentified
  REGION 1..1122: note = Cas Enzyme sequence
MSDLVLGLDIGIGSVGVGILNKVTGEIIHKNACIFPAAQAENNVERRTNRQGRRLTRRKKHRRVRLNHLFEESGLITDFTQVSINLNPYQLRVKGLTDELSNEELFIALKNMVKHRGISYLDDASDDGNSSVGDYAQIVKENSKQLETKTPGQIQLERYQKYGQLRGDFTVEEDGKKHRLINVFPTSAYRAEALRILQTQQEFNPKITDEFINRYLEILTGKRKYYHGPGNEKSRTDYGRYRTSGETLDNIFGILIGKCTFYPEEYRAAKASYTAQEFNLLNDLNNLTVPTETKKLNEEQKNQIITYVKNEKAMGPAKLFKYIAKLLACDVADIKGYRIDKSDKPEIHTFEAYRKMKTLETIDVEQMEREKLDKLAYVLTLNTEREGIQEAIEHEFADGTFSQEQVDELVQFRKSNSSIFGKGWHNFSVKLMMELIPELYATSEEQMTILTRLGKQKRTSSSNKTKYIDEKQLTEEIYNPVVAKSVRQAIKIVNVAIKEYGDFDNIVIEMAREMNEDDEKKAIKKIQEANKSEKDAAMRKAANQYNGKAELPHSVFHGHKQLATKIRLWHQQGERCLYTGKTISIHDLINNPNQFEIDHILPLSITFDDSLANKVLVYATANQEKGQRTPYQALDSMDDAWSFRELKAFVRESKTLSNKKKEYLLTEEDISKFDVRKKFIERNLVDTRYASRVVLNALQEHFRTRKIDTKVSVVRGQFTSQLRRHWGIDKTRDTYHHHAVDALIIAASSQLNLWKKQKNTLVSYSEDQLLDIETGELISDDEYKESVFKAPYQHFVDTLKSKEFEDSILFSYQVDSKFNRKISDATIYATRQAKVGKDKKDETYVLGKIKDIYSQAGYDAFIKIYQKDKSKFLMYRHDPQTFEKVIEPILENYPNKEMNEKGKEVPCNPFLKYKEEHGDYIRKYSKKGNGPEIKSLKYYDSKLGNHIDITPKNSNNKVVLQSVSPWRADVYFNKTTGKYEILGLKYADLQFEKGTGTYKISQEKYNDIKKKEGVDSDSEFKFTLYKNDLLLIKDTETKEQQLFRFLSRSMPNKKHYVELKPYSKDKFEKNETLIEILGPADKSGRCIKGLAKSNLSIFKVRTDILGNKHIIKNEGDKPKLDF

SEQ ID NO: 18724 - protein, 1133 aa, unidentified
  REGION 1..1133: note = Cas Enzyme sequence
VRSFIMNGLVLGLDIGIASVGVGILKKDTGEIIHANSRLFPAATADNNVERRGFRGGRRLTRRKKHRSVRLHDLFEDFGLLTDFSKVSINLNPYQIRVQGLDKRLTNEELFIALKNIIKRRGISYLDDASEDGGTVSSDYGKAVEENRKLLTQQTPGQIQLDRFEKYGQVRGDFTVVENGEKRRLINVFSTSAYRKEAERILRKQQEFNNKITEGFIEDYLTILTGKRKYYHGPGNEKSRTDYGRYTTKKDSQGEYITLDNIFGILIGKCTFYPDEYRASKASYTAQEFNLLNDLNNLTVPTETKKLSEEQKKIIIEYAKTAKTLGAATLLKYIAKMIGASVDQIHGYRIDPNKKPEMHTFEAYRKMQSLETIRVEELPRKVIDELAHILTLNTEREGIEEAINAKLKDIFSQDQVLELVQFRKNNSSLFSKGWHNFSLKLMMELIPELYETSEEQMTILTRLGKQKSKETSKRTKYIDEKELTEEIYNPVVAKSVRQAIKIINEATKRYGIFDNIVIEMARENNEDDAKKEYIKRQKANLDEKNAAMEKAAFQYNGKKELPDNVFHGHKELATKIRLWHQQGEKCLYTGKNIPISDLIQNRYKYEIDHILPLSLSFDDSLSNKVLVLATANQEKGQRTPFQALDSMDDAWSYREFKSYVKDSKLLSNKKKEYLLTEEDISKIEVKQKFIERNLVDTRYSSRVVLNALQDFYKEHQFDTTISVVRGQFTSQLRRKWGLEKSRETYHHHAVDALIIAASSQLRLWKKQNNPLISYKEEQFVDQETGEIISLSDDEYKELVFKAPYDHFVDTLKSKKFEDNILFSYQVDSKYNRKISDATIYATRKAKLDKDKSEETYVLGKIKDIYSQAGYDAFIKIYNKDKSRFLMYHKDPQTFEKVIEEILRTYPSKELNEKNKEVPCNPFEKYRQENGPIRKYSRKGNGPEIKSLKYYDNKLGNHIDITPDKSNNKVVLQSINPWRTDVYYNNKSKKYEFLGLKYSDLYFEKGTGKYKISKNKYDVIKKIEGVDEKSEFKFTLCKNDLILIKDVDTGQEQLFRFLSRNNKGKHQVQLKPIDKSDFEKGEKLIDIFDTVPNSTTQCVKGLNKPNISIYKVKTDILGNKHFIKKEGEEPKLKF

SEQ ID NO: 18725 - protein, 1129 aa, unidentified
  REGION 1..1129: note = Cas Enzyme sequence
MNGLVLGLDIGIASVGVGILKKDTGEIIHTNSRIFPAATADNNVERRGFRGGRRLTRRKKHRSVRLHDLFEEYGLLTDFSKVSINLNPYRLRVQGLNNQLTNEELFIALKNIVKRRGISYLDDASEDGGTVSSDYGKAVEENRKLLAEQTPGQIQLDRFEKYGQVRGDFTVVENGEKRRLINVFSTSAYRKEAERILRKQQEFNNKITEGLIEDYLTILTGKRKYYHGPGNEKSRTDYGRYTTKKDSQGEYITLDNIFGILIGKCTFYPDEYRASKASYTAQEFNLLNDLNNLTVPTETKKLSEEQKKNIIEYAKTAKTLGAATLLKYIAKMIGASVDQIHGYRIDPNKKPEMHTFEAYRKMQLLETIRVEELPRKVIDELAHILTLNTEREGIEEAINAKLKDIFSQDQVLELVQFRKNNSSLFSKGWHNFSLKLMMELIPELYETSEEQMTILTRLGKQKSKETSKRTKYIDEKELTEEIYNPVVAKSVRQAIKIINEATKRYGIFDNIVIEMARENNEEDAKKEYIKRQKANLDEKNAAMEKAAFQYNGKKELPDNVFHGHKELATKILLWHQQGEKCLYTGKNIPISDLIQNRYKYEIDHILPLSLSFDDSLSNKVLVLATANQEKGQRTPFQALDSMDDAWSYREFKSYVKDSKLLSNKKKEYLLTEEDISKIEVKQKFIERNLVDTRYSSRVVLNALQDFYKEHQFDTTISVVRGQFTSQLRRKWGLEKSRETYHHHAVDALIIAASNQLRLWKKQKNPLVSYKEEQFVDQETGEIISLSDDEYKELVFKAPYDHFVDTLKSKKFEDSILFSYQVDSKYNRKISDATIYATRKAKLDKDKSEETYVLGKIKDIYSQAGYDAFIKIYNKDKSRFLMYHKDPQTFEKVIEEILRTYPSKELNEKNKEVPCNPFEKYRQENGPIRKYSRKGNGPEIKSLKYYDKNIPESFINITPHNSKNKVILRQLNPWRTDVYFNNQTEKYELLGLKYADLQFEKNTGNYSITIDKYNEIKEKEGVSKQSEFKFTLYKNDLILIKDTKNNEEQIFRFLSRTMPNQKNYVELKPYDKAKFDGNQELITIFGNVAKGGQCMKGLNKSDISIFKVITDVLGNKHFIKKEGEEPKLKF

SEQ ID NO: 18726 - protein, 1134 aa, unidentified
  REGION 1..1134: note = Cas Enzyme sequence
MNGLVLGLDIGIASVGVGILEKNSGKIIHANSRLFPAATADNNVERRKNRQARRLHRRKKHRGVRLKDLFEDYGFLTDFSKVSINLNPYRLRVDGLNQQLTNEELFIALKNIVKRRGISYLDDASEDGGTVSSDYGKAVEENRKLLAEQTPGQIQLERFEKYGQVRGDFTVVENGQKRRLINVFSTSAYRKEAERILRKQQKFNSKITDEFIEDCLKILTGKRKYYHGPGNEKSRTDYGRFRTDGTTLDNIFGILIGKCTFYPDEYRASKASYTAQEFNLLNDLNNLTVPTETKKLSEEQKKTIVEYAKSAKTLGASTLLKYIAKMIDASVDQIRGYRVDVNNKPEMHTFEVYRKMQSLETISVGELSRNVLNELAHILTLNTEREGIEEAINTKLKDSFSQDQVLELVHFRKNNSSLFSKGWHNFSLKLMMELIPELYETSEEQMTILTRLGKQKSKETSKRTNYIDEKELTEEIYNPVVAKSVRQALKIINEATKKYGIFDNIVIEMARENNEEDAKKDYIKRQKANQDEKNAAMEKAAFQYNGKKELPDNIFHGHKELATKIRLWHQQGEKCLYTGKNIPISDLIHNQYKYEIDHILPLSLSFDDSLSNKVLVLATANQEKGQRTPFHALDSMDDAWSYREFKSYVKESKLLSNKKKEYLLTEEDISKIEVKQKFIERNLVDTRYSSRVVLNTLQDFYKAHKFDTTISVVRGQFTSQLRRKWGLEKSRETYHHHAVDALIIAASSQLRLWKKQNNPLISYKEGQFVDSETGEIISLTDGEYKELVFKAPYDHFVDTLRSKTFEDSILFSYQVDSKYNRKISDATIYATRKAKLDKEKKEYIYTLGKIKDIYSLGTKTPSKTGFYKFLDLYNKDKSQFLMFQKDRKTWDEVIEKIMEQYRPFKEYDKTGKLVDFNPFEKYRQENGPIRKYSKKGNGPEIKSLKYYDILLGKHKNITPEGSRNTVALLSLNPWRTDVYYNMETKKYEFLGLKYADLPFEEGGAYGISADTYNELREKEGIGKNSEFKFTLYKNDLILIKDTETNCQQIFRFWSRTGKDNPKSFEKHKIELKPYEKARFEKGEELEVLGKVPPSSNQLQKNMQIENLSIYKVKTDVLGNKHFIKKEGDEPKLKF

SEQ ID NO: 18727 - protein, 1122 aa, unidentified
  REGION 1..1122: note = Cas Enzyme sequence
MMNGLVLGLDIGIGSVGVGILNKDTGEIIHANSRIFPAATADNNVVRRSSRQGRRLNHRKKHRSVRLKDLFEYYDLLTDFSKVSINLNPYRLRVNGLNQQLTNEELFIALKNIVKRRGISYLDDASEDGGAVSSDYGKAVEENRKLLAEQTPGQIQLERFEKYGQVRGDFTVVENGEKRRLINVFSTSAYKKEAERILRKQQEYNNQIMDEFIADYLTILTGKRKYYHGPGNEKSRTDYGRFRTDGTTLDNIFGILIGKCTFYPEKYRASKASYTAQEFNLLNDLNNLTVPTETKKLSEEQKKTIVEYAKSAKTLGASTLLKYIAKMIDASVDQIRGYRVDVKNKPEMHTFEVYRKMQSLETISVGEFSREVLDELAHVLTLNTEREGIEEAINTKLRDSFSQDQILELVQFRKNNSSLFSKGWHNFSLKLMMELIPELYETSEEQMAILTRLGKQKFKETSKRTKYIDEQEVTEEIYNPVVAKSVRQAIKIINEATKKYGIFDNIVIEMARENNEEEAKKDYIKRQKANHDEKNAAMEKAAFQYNGEKELPDSIFHGHKELATKVRLWHQQGEKCLYTGKNIPISDLIHNQYKYEIDHILPLSLSFDDSLSNKVLVLATANQEKGQRTPFQALDSMDDAWSYREFKSYVKDSKSLGNKKKDYLLTEEDISKIEVKQKFIERNLVDTRYSSRVVLNTLQDFYKAHKFDTTISVVRGQFTSQLRRKWGLEKSRETYHHHAVDALIIAASSQLRLWKKQNNPLISYKEGQFVDSETGEIISLTDDEYKELVFKAPYDHFVDTLRSKKFEDSILFSYQVDSKFNRKISDATIYATRKTKLDKDKSEETYVLGKIKDIYSQSGYDAFIKIYNKDKSKFLMYHKDPQTFEKVIEEILRTYPSKEFNEKNKEVSCNPFEKYKQENGPIRKYSKKGNGPEIKSLKYYDKNIPESFINITPSNSKNKVILRQLNPWRTDVYFNHQTEKYELLGLKYADLQFEKKTGTYSITIDKYNEIKEKEGVSEHSEFKFTLYKNDLLLIKDTEIKEEQIFRFLSRTMPNQKHYVELKPYYKGNFEGKERIKVFNTTSNGRCLKGLRKKGLSIYKIKTDVLGNKHFIKKEGEKPKLKF

SEQ ID NO: 18728 - protein, 1123 aa, unidentified
  REGION 1..1123: note = Cas Enzyme sequence
MNGLVLGLDIGIASVGVGILKKETGEIVHSNSRLFPAATADNNVERRGFRGGRRLTRRKKHRSVRLHDLFEDFGLLTDFSKVSINLNPYQFRVQGLDNQLTNEELFIALKNIVKRRGISYLDDASEDGGTVSSDYGKAVEENRKLLAEQTPGQIQLNRFEKYGQVRGDFTVMENGEKRRLINVFSTSAYRIEAERILRKQQEFNKKITDGFIEDYLTILTGKRKYYHGPGNEKSRTDYGRFRADGTTLDNIFGVLIGKCTFYPDEYRASKASYTAQEFNLLNDLNNLTVPTETKKLNEEQKKIIVEYAKTAKTLGASTLLKYIAKLIGASVDQIHGYRIDSNKKPEMHIFETYRKMQSLETIRVEELHRKVLDELAHILTLNTEREGIEEAINANLKDTFSQDQVLELVQFRKNNSSLFSKGWHNFSLKLMMELIPELYETSEEQMTILTRLGKQKSKETSKRTKYIDEKELTEEIYNPVVAKSVRQAIKIINEATKKYGIFDNIVIEMARENNEEDAKKEYIKRQKANIDEKNAAMEKAAFQYNGKKELPDDVFHGHKELATKIRLWHQQGEKCLYTGKNIPIADLIQNQYKYEIDHILPLSLSFDDSLSNKVLVLATSNQEKGQRTPFQALDSMDDAWSYREFKTYVKDLKLLNNKKKDYLLTEEDISKIEVKQKFIERNLVDTRYSSRVVLNALQDFYKEHQFDTTISVVRGQFTSQLRRKWGLEKSRDTYHHHAVDALIIAASSQLRLWKKLNNSLISYKEEQFVDLETGEIIALSDDEYKELVFKAPYDHFVDTLKSKKFEDTILFSYQVDSKYNRKISDATIYATRKAKLDNDKSEETYVLGKIKDIYSQSGYDAFIKIYNKDKSRFLMYHKDPQTFEKVIEEILRTYPSKELNDKNKEVPCNPFEKYRQENGPIRKYSRKGNGPEIKSLKYYDKNIPESFINITPSNSKNKVILRQLNPWRTDVYFNHQTEKYELLGLKYADLQFEKKTGNYSITIDKYNEIKEKEGVSKQSEFKFTLYKNDLLLIKDTKNNEKQIFRFLSRTMPNQKNYVELKPYDKAKFDGNQELMTIFGNVAKGGQCMKGLNKSDISIFKVKTDVLGNKHFIKKEGEEPKLKF

SEQ ID NO: 18729 - protein, 1128 aa, unidentified
  REGION 1..1128: note = Cas Enzyme sequence
MSDLVLGLDIGIGSVGVGILNKVTGEIIHKNSRIFPAAQAENNVERRINRQGRRLTRRKKHRRVRLNHLFEESGLITDFTNVSINLNPYQLRVKGLTDELSNEELFIALKNMVKHRGISYLDDASDDGNSSVGDYAQIVKENSKQLETKTPGQIQLERYQKYGQLRGDFTVEEDGKKHRLINVFPTSAYRAEALRILQTQQEFNPQITDEFINSYLQILTGKRKYYHGPGNEKSRTDYGRYTTKKNSEDEYVTLDNIFGVLIGKCTFYPEEFRAAKASYTAQEFNLLNDLNNLTVPTETKKLSEEQKNQIITYVKNEKAMGPAKLFKYIAKLLACDVADIKGYRIDKSDKPEIHTFEAYRKMKTLETIDVEQMEREKLDKLAYVLTLNTEREGIQEAIEHEFADGTFSQEQVDELVQFRKSNSSIFGKGWHNFSVKLMMELIPELYATSEEQMTILTRLGKQKRTSSSNKTKYIDEKQLTEEIYNPVVAKSVRQAIKIVNVAIKEYGDFDNIVIEMAREMNEDDEKKAIKKIQEANKSEKDAAMRKAANQYNGKAELPPSVFHGHKQLATKIRLWHQQGERCLYTGKTISIHDLINNPNQFEIDHILPLSITFDDSLANKVLVYATANQEKGQRTPYQALDSMDDAWSFRELKAFVRESKTLSNKKKEYLLTEEDISKFDVRKKFIERNLVDTRYASRVVLNALQEHFRTHKIDTKVSVVRGQFTSQLRRHWGIDKTRDTYHHHAVDALIIAASSQLNLWKKQKNTLVSYSEDQLLDIETGELISDDEYKESVFKAPYQHFVDTLKSKEFEDSILFSYQVDSKFNRKISDATIYATRQAKVGKDKKDETYVLGKIKDIYSQAGYDAFMKIYKKDKSKFLMHRHDPQTFEKVIEPILENYPNKEMNEKGKEVSCNPFLKYKEEHGDYIRKYSKKGNGPEIKSLKYYDSKLGNHIDITPKDSNNKVVLQSVSPWRADVYFNKTTGKYEILGLKYADLQFEKGTGTYKISHEKYNDIKKKEGVDSDSEFKFTLYKNDLLLIKDTETKEQQLFRFLSRSMPNKKHYVELKPYDKQKFEGGEALIKVLGNVANGGQCVKGLGKSNISIYKVRTDVLGNQHIIKNEGDKPKLDF

SEQ ID NO: 18730 - protein, 1134 aa, unidentified
  REGION 1..1134: note = Cas Enzyme sequence
MNGLVLGLDIGIGSVGVGILKKDTGEIIHTNSRIFPAATADNNVERRNSRQGRRLNRRKKHRVVRFQDLFDDYGLLTDFSKVSINLNPYRLRVHGLNQQLTNEELFIALKNIVKRRGISYLDDASEDGGAVSSDYGKAVEENRKLLTEQTPGQIQLERFEKYGQVRGDFTVEEKGDKHRLINVFSTSAYRKEAERILRKQQEFNNQITDKFIEDYLKILTEKRKYYHGPGNEKSRTDYGRFRTDGTTLDNIFGILIGKCTFYPNEYRASKASYTAQEFNLLNDLNNLTVPTETKKLSEEQKKTIVEYAKSAKTLGASTLLKYIAKMIDASVDQIRGYRVDVNNKPEMHTFEVYRKMQSLETIPVGEFSREVLDELAHILTLNTEREGIEEAINTKLMDVFSQDQILELVQFRKNNSSLFSKGWHNFSLKLMMELIPELYETSEEQMAILTRLGKQKFKETSKRTKYIDEKEVTEEIYNPVVAKSVRQAIKIINEATKKYGIFDDIVIEMARENNEEDAKKDYIKRQKANHDEKNAAMEKAAFQYNGKKELPDSIFHGHKELATKIRLWHQQGEKCLYTGKNIPISDLIHNQYKYEIDHILPLSLSFDDSLSNKVLVLATANQEKGQRTPFQALDSMDDAWSYREFKSYVKDSKLLGNKKKDYLLTEEDISKIEVKQKFIERNLVDTRYSSRVVLNALQDFYKAHKFDTTISVVRGQFTSQLRRKWRLEKSRETYHHHAVDALIIAASSQLRLWKKQNNPLISYKEGQFVDSETGEIISLTDDEYKELVFKAPYDHFVDTLRSKKFEDSILFSYQVDSKFNRKISDATIYATRKAKLDKEKKEYTYTLGKIKDIYSLGTKTPSKTGFYKFLDLYNKDKSQFLMFQKDRKTWDEVIEKIMEQYRPFKEYDKTGKLVDFNPFEKYRQENGPIRKYSKKDNGPEIKSLKYYDILLGKHKNITPEGSRNTVALLSLNPWRTDVYYNMETKKYEFLGLKYADLPFEEGGAYGISTETYNKLREKEGIGKNSEFKFTLYKNDLILIKDTETNCQQIFRFWSRTGKDNPKSFEKHKIELKPYEKARFEKGEELEVLGKVPPSSNQLQKNMQIENLSIYKVKTDILGNKHFIKKEGDEPKLKF

SEQ ID NO: 18731 - protein, 1138 aa, unidentified
  REGION 1..1138: note = Cas Enzyme sequence
MLENIRIVLIETSHSGNIGSAARAMKTMGLTQLCLVSPKSVDEQSYALSAGAEDIVKNARVVDSFDEAVDDCSLVIGTSARLRHLQSTLIEPRECAEKVVAHEGKIAIVFGRERIGLTNEELFIALKNIVKRRGISYLDDASEDGGAVSSDYGKAVEENRKLLAEKTPGQIQLERFEKYGQVRGDFTVVENGEKRRLINVFSTSAYRKEAERILRKQQEFNNQITDEFIADYLTILTGKRKYYHGPGNEKSRTDYGRFRTNGTTLDNIFGILIGKCTFYPEEYRASKASYTAQEFNLLNDLNNLTVPTETKKLSEEQKKTIVEYAKSAKTLGASTLLKYIAKMLDASVDQIRGYRVDVNNKPEMHTFEVYRKMQALETIPVGELSREILDELAHILTLNTEREGIEEAINTKLKGSFSQDQVLELVQFRKNNSSLFSKGWHHFSLKLMLELIPELYATSEEQMTILTRLGKQKFKETSKRTKYIDEKEATEEIYNPVVAKSVRQAIKIINEATKKYGIFDNIVIEMARENNEEDAKKDYIKRQKANHDEKNAAMEKAAFQYNGEKELPDSIFHGHKELATKIRLWHQQGEKCLYTGKNIPISDLIHNQYKYEIDHILPLSLSFDDGLSNKVLVLATANQEKGQRTPFQALDSMDDAWSYRGFKSYVKESKLLGNKKKEYLLTEEDISKIEVKQKFIERNLVDTRYSSRVVLNALQYFYKAHKFDTTISVVRGQFTSQLRRKWGLEKSRETYHHHAVDALIIAASSQLRLWKKQANPLISYKEDQFVDSETGEIISLTDDQYKELVFKAPYDHFVDTLRSKKFEDSILFSYQVDSKYNRKISDATIYATRKAKLDKDKSEETYVLGKIKDIYSQAGYDAFIKIYNKDKGKFLMYHKDPQTFEKVIEEILRTYPSKEFNEKNKEVPCNPFEKYRQENGPIRKYSKKGNGPEIKSLKYYDKNIPESFINITPSNSKNKVILRQLNPWRTDVYFNHQTEKYELLGLKYADLQFEKKTGIYSITIDKYNEIKEKEGVSEHSEFKFTLYKNDLLLIKDTEIKEEQIFRFLSRTMPNQKHYVELKPYYKGNFEGKERIKVFNTTSNGRCLKGLGKKGLSIYKIKTDVLGNKHFIKKEGEKPKLKF

SEQ ID NO: 18732 - protein, 986 aa, unidentified
  REGION 1..986: note = Cas Enzyme sequence
MNGLVLGLDIGIASVGVGILKKDTGEIIHANSRLFPAATADNNVERRGFRGGRRLTRRKKHRSVRLHDLFEEYGLLTDFSKVSINLNPYRLRVQGLDNQLTNEKLFIALKNIVKRRGISYLDDASEDGSTVSSDYGKAVEENRKLLSEQTPGQIQLDRFEKYGQLRGDFTVLENSEKRRLINVFSTYAYRKEAERILRKQQEFNNKITDEFIEDYLTILTGKRKYYHGPGNEKSRTDYGRYTTKKDSEGKYITLDNIFGVLIGKCTFYPDEYRASKASYTAQEFNLLNDLNNLTVPTETKKLSEEQKKTIIEYAKTAKTLGASTLLKYIAKLIGASVDQIHGYRIDPNKKPEMHTFEVYRKMQSLETIKVEELPRKVIDELAHILTLNTEREGIEEAINAKLKDTFSQDQVLELVQFRKNNSSLFSKGWHNFSLKLMMELIPELYETSEEQMTIITRLGKQKSKEISKRTKYIDEKELTEEIYNPVVAKSVRQAIKIINESTKKYGIFDNIVIEMARENNEEDAKKEYIKHQKANLDEKNAAMEKAAFQYNGKKELPDNVFHGHKELATKIRLWHQQGEKCLYTGKNIPISGLIQNQYKYEIDHILPLSISFDDSLSNKVLVLATANQEKGQRTPFQALDSMDDAWSYREFKSYVKDSKLISNKKKEYLLTEEDISKIEVKQKFIERNLVDTRYSSRVVLNALQDFYKNHNFDTTISVVRGQFTSQLRRKWGLEKSRETYHHHAVDALIIAASSQLRLWKKQNNPLISYKEEQFVDQKTGEIISLSDDEYKELVFKAPYNHFVDTLKSKKFEDNILFSYQVDSKYNRKISDATIYATRKAKLDKDKSEETYVLGKIKDIYSQAGYDAFIKIYNKDKSRFLMYHKDPQTFEKVIEEIIRTYPSKELNEKNKEVPCNPFEKYRQENGPIRKYSRKGNGPEIKSLKYYDNKLGNHIDITPNESMNQVVLQSLKPWRTDVFLIIKLKNMN

SEQ ID NO: 18733 - protein, 1121 aa, unidentified
  REGION 1..1121: note = Cas Enzyme sequence
MNGLVLGLDIGIASVGVGILEKNSGKIIHANSRLFPAATADNNVERRKNRQARRLNRRKKHRGVRFQDLFEDYGLLTDFSKVSINLNPYRLRVDGLNQQLTNEELFIALKNIVKRRGISYLDDASEDGGAVSSDYGKAVEENRKLLAEQTPGQIQLERFEKYGQVRGDFTVVENGEKRRLINVFSTSAYRKEAEKILRKQQEFNNQITDEFIEDYLKILTGKRKYYHGPGNEKSRTDYGRFRTDGTTLDNIFGVLIGKCTFYPNEYRASKSSYTAQEFNLLNDLNNLTVPTETKKLSEEQKKVIVEYAKEAKTLGASTLLKYIVKMIDASVDQISGYRVDVNNKPEMHTFEVYRKMQSLETISVGELSRNVLDELAHILTLNTEREGIEEAINSKLMGVFSQDQVLELVQFRKNNSSLFSKGWHNFSLKLMMELIPELYETSEEQMTILTRLGKQKSKETSKRTKYIDEKELTEEIYNPVVAKSVRQAIKIINEATKKHGIFDNIVIEMARENNEEDAKKDYIKRQKANQDEKNAAMEKAAFQYNGKKELPGNIFNGHKELATKIRLWHQQGEKCLYTGKTIPISDLIHNQYKYEIDHILPLSLSFDDSLSNKVLVHATANQEKGQRTPFQALDSMDDAWSYREFKSYVKDLKSLSNKKKDYLLTEEDISKIEVKQKFIERNLVDTRYSSRVVLNALQDFYKSHQFDTTISVVRGQFTSQLRRKWGLEKSRETYHHHAVDALIIAASSQLRLWKKQNNPLITYKEGQFIDSQTGEIISLTDDEYKELVFKAPYDHFVDTLHSKTFEDGILFSYQVDSKYNRKISDATIYATRKAKLDKDKSEETYVLGKIKDIYSQAGYDAFIKIYNKDKRKFLMYHKDPQTFEKVIEEILRTYPSKERNDKNKEVPCNPFEKYRQENGPIRKYSKKGNGPEIKCLKYYDNKLGNYIDISPDGSDNQVVLQSLKPWRTDVYFNHQTKKYELMGLKYSDLSFEKGSGKYSISNEKYNSIKRIEGVNEQSEFKFTLYKNDLILIKDSENNEQKLFRFNSRNDTAKHYVELKPYDKARFDGQQELITILGNVAKGGQCLKGLNKSNISIFKVKTDVLGKKHIIKKEGDEPKLKF

SEQ ID NO: 18734 - protein, 1139 aa, unidentified
  REGION 1..1139: note = Cas Enzyme sequence
MSDLVLGLDIGIGSVGVGILNKVTGEIIHKNSRIFPAAQAENNVERRTNRQGRRLTRRKKHRRVRLNHLFEESGLITDFTQVSINLNPYQLRVKGLTDELSNEELFIALKNMVKHRGISYLDDASDDGNSSVGDYAQIVKENSKQLETKTPGQIQLERYQKYGQLRGDFTIEEDGKKHRLINVFPTSAYRAEALRILQTQQEFNPQITDEFINSYLQILTGKRKYYHGPGNEKSRTDYGRYTTKKDSEDEYLTLDNIFGILIGKCTFYPEEYRAAKASYTAQEFNLLNDLNNLTVPTETKKLSEEQKNKIITYVKNEKAMGPAKLFKYIAKLLSCDVADIKGYRIDKSDKAEIHTFEAYRKMKTLETIDIEQMEREKLDKLAYVLTLNTEKEGIQEALEHEFADGTFSQKQVDELVQFRKANSSIFGKGWHNFSVKLMMELIPELYATSEEQMTILTRLGKQKTTSSSNKTKYIDEKRLTEEIYNPVVAKSVRQAIKIVNAAIKEYSDFDNIVIEMARETNEDDEKKAIQKIQKANKDEKDAAMLKAANQYNGKAELPHSVFHGHKQLATKIRLWHQQGERCLYTGKTISIHDLINNPNQFEIDHILPLSITFDDSLANKVLVYATANQEKGQRTPYQALDSMDDAWSFRELKAFVRESKTLSNKKKEYLLTEEDISKFDVRKKFIERNLVDTRYASRVVLNALQEHFRTRKIDTKVSVVRGQFTSQLRRHWGIDKIRDTYHHHAVDALIIAASSQLNLWKKQKNTLVSYSEDQLLDIETGELISDDEYKESVFKAPYQHFVDTLKSKDFEDSILFSYQVDSKFNRKISDATIYATRKAKLDKEKKEYTYTLGKIKDIYALGTKTPSKTGFYKFLDLYKKDKSQFLMYQKDRKTWDEVIEKILEQYRPFKEKDKNGKEVDFNPFEKYRIENGPIRKYSRKGNGPEIKSLKYYDNLLGRFVDITPSESKNPVALLSLNPWRTDVYYNTETRKYEFLGLKYADLCFEKGGSYGISKVKYNKIREKEGIGKNSEFKFTLYKNDLILIKDTETNRQQIFRFWSRTGKDNPKSFEKHKIKLKPYEKARFEKGEELEVLGKVPPSSNQLQKNMQIENLSIYKVRTDVLGNQHIIKNEGDKPKLDF

SEQ ID NO: 18735 - protein, 1134 aa, unidentified
  REGION 1..1134: note = Cas Enzyme sequence
MNGLVLGLDIGIASVGVGILEKNSGKIVHASSRIFPAATADNNVERRKNRQARRLHRIKKHRGARLKDLFEYYGLLTDFSKVSINLNPYRLRVDGLDQQLTNEELFIALKNIVKRRGISYLDDASEDGGTVSSDYGKAVEENRKLLAEQTPGQIQLERFEKYGQLRGDFTVVENSEKCRLINVFSTSAYKKEAERILRKQQEFNNQITDEFIEDYLKILTGKRKYYHGPGNEKSRTDYGRFRTDGATLDNIFGILIGKCTFYPNEYRASKASYTAQEFNLLNDLNNLTVPTETKKLSEEQKKTIIEYAKSAKTLGASTLLKYIAKMIDASVDQIRGYRVDVNNKPEMHTFEVYRKMQSLETISVGELSRNILDELAHILTLNTEREGIEEAINTKLRNSFSQDQVLELVQFRKNNSSLFSKGWHNFSLKLMMELIPELYETSEEQMTILTRLGKQKSKETSKRTKYIDEKEVTEEIYNPVVAKSVRQAIKIINEATKKHGIFDNIVIEMARENNEEDAKKDYIKRQKANQDEKYAAMEKAAFQYNGKKELPDNIFHGHKELATKIRLWHQQGEKCLYTGKSIPISDLIHNQYKYEIDHILPLSLSFDDSLSNKVLVLATANQEKGQRTPFQALDSMDDAWSYREFKSYVKESKLLGNKKKEYLLTEEDISKIEVKQKFIERNLVDTRYSSRVVLNALQDFYKNHNFDTTISVVRGQFTSQLRRKWGLEKSRETYHHHAVDALIIAASSQLRLWKKQNNPLIAYKEGQFVDSQTGEIISLTDDEYKELVFKAPYDHFVDTLSSKTFEDSILFSYQVDSKFNRKISDATIYATRKAKLDKEKKEYTYTLGKIKDIYSLGTKTPSKTGFYKFLDLYNKDKSQFLMFQKDRKTWDEVIEKIMEQYRPFKEYDKAGKLVDFNPFEKYRQENGPIRKYSKKGNGPEIKSLKYYDILLGKHKNITPEGSRNTVALLSLNPWRTDVYYNMETKKYEFLGLKYADLPFEEGGAYGISTETYNELREKEGIGKNSEFKFTLYKNDLILIKDTETNCQQFFRFWSRTGKDNPKSFEKHKIELKPYEKAKFEKGEELEVLGKVPPSSNQFQKNMQIENLSIYKVKTDVLGNKHFIKKEGDKPKLKF

SEQ ID NO: 18736 - protein, 1124 aa, unidentified
  REGION 1..1124: note = Cas Enzyme sequence
MMNGLVLGLDIGISSVGVGIIKKDTGEIIHANSRLFPAATADNNVVRRSIRQARRLTRRKRHRAVRLHDLFEDYALLTDFSKVSINLNPYKLRVEGMNIQLTTEELFIALKNIIKRRGISYLDDASEDGGTVSSDYGKAVEENRKLLSEQTPGQIQLERFEKYGQVRGDFTVVENGEKRRLINVFSTSAYRKEAERILRKQQEFNNKITDDFIEDYLIILTGKRKYYHGPGNEKSRTDYGRFRTDGTTLDNIFGILIGKCTFYPDEYRASKASYTAQEFNLLNDLNNLTVPTETKKLSEEQKKTIIEYAKSAKTLGASTLLKYIAKMIDASVDQIRGFRVDVNNKPEMHTFEVYRKMQSLETIPIGKLSREVLDELAHILTLNTEREGIEEAINTKLMDVFSQDQVLELIQFRKNNSSLFSKGWHNFSLKLMKELIPELYETSEEQMTILTRLGKQKSKETSKRTKYNDEKELTEEIYNPVVAKSVRQAIKIINEATKQYGIFDNIVIEMARENNEEEAKKDYIKRQKANLDEKNAAMEKAAFQYNGKKVLPDSIFHGHKELATKIRLWHQQGEKCLYTGKNIPISDLIQNQYKYEIDHILPLSLSFDDSLSNKVLVLATANQEKGQRTPFQALDSMDDAWSYREFKSYVKDSKLLGNKKKDYLLTEEDISKIEVKQKFIERNLVDTRYSSRVVLNALQDFYREHQFDTTISVVRGQFTSQLRRKWGLEKSRETYHHHAVDALIIAASSQLRLWKKQNNPLISYKAGQFVDSETGEILSLSDDEYKELVFKAPYDHFVDTLRSKTFENSILFSYQVDSKYNRKISDATIYSTRKAKLDKDKSEETYVLGKIKDIYSQAGYDAFIKIYNKDKSKFLMYHKDSQTFEKVIEEILRTYPSKEFNDKNKEVPCNPFEKYRQENGPIRKYSKKGNGPEIKSLKYYDKNIPESFINITPSNSKNKVILRQLNPWRTDVYFNHQTEKYELLGLKYADLQFEKKTGTYSITIDKYNEIKEKEGVGEQSEFKFTLYKNDLLLIKDTKNNEKQIFRFLSRTMPNVKHYVELKPYDKAKFDGNQPLITIFGNVAKGGQCLKGLNKSNISIFKVKTDVLGNKHFIKKEGDEPKLKF

SEQ ID NO: 18737 - protein, 1123 aa, unidentified
  REGION 1..1123: note = Cas Enzyme sequence
MNDLVLGLDIGIASVGVGILKKETGEIVHSNSRLFPAATADNNVERRGFRGGRRLTRRKKHRSVRLHDLFEDFGLLTDFSKVSINLNPYQFRVQGLDNQLTNEELFIALKNIVKRRGISYLDDASEDGGTVSSDYGKAVEENRKLLAEQTPGQIQLNRFEKYGQVRGDFTVMENGEKRRLINVFSTSAYRIEAERILRKQQEFNKKITDGFIEDYLTILTGKRKYYHGPGNEKSRTDYGRFRADGTTLDNIFGVLIGKCTFYPDEYRASKASYTAQEFNLLNDLNNLTVPTETKKLNEEQKKIIVEYAKTAKTLGASTLLKYIAKLIGASVDQIHGYRIDSNKKPEMHIFETYRKMQSLETIRVEELHRKVLDELAHILTLNTEREGIEEAINANLKDTFSQDQVLELVQFRKNNSSLFSKGWHNFSLKLMMELIPELYETSEEQMTILTRLGKQKSKETSKRTKYIDEKELTEEIYNPVVAKSVRQAIKIINEATKKYGIFDNIVIEMARENNEEDAKKEYIKRQKANIDEKNAAMEKAAFQYNGKKELPDDVFHGHKELATKIRLWHQQGEKCLYTGKNIPIADLIQNQYKYEIDHILPLSLSFDDSLSNKVLVLATSNQEKGQRTPFQALDSMDDAWSYREFKTYVKDLKLLNNKKKDYLFTEEDISKIEVKQKFIERNLVDTRYSSRVVLNALQDFYKEHQFDTTISVVRGQFTSQLRRKWGLEKSRDTYHHHAVDALIIAASSQLRLWKKLNNSLISYKEEQFVDLETGEIIALSDDEYKELVFKAPYDHFVDTLKSKKFEDTILFSYQVDSKYNRKISDATIYATRKAKLDNDKSEETYVLGKIKDIYSQSGYDAFIKIYNKDKSRFLMYHKDPQTFEKVIEEILRTYPSKELNDKNKEVPCNPFEKYRQENGPIRKYSRKGNGPEIKSLKYYDKNIPESFINITPSNSKNKVILRQLNPWRTDVYFNHQTEKYELLGLKYADLQFEKKTGNYSITIDKYNEIKEKEGVSKQSEFKFTLYKNDLLLIKDTKNNEKQIFRFLSRTMPNQKNYVELKPYDKAKFDGNQELMTIFGNVAKGGQCMKGLNKSDISIFKVKTDVLGNKHFIKKEGEEPKLKF

SEQ ID NO: 18738 - protein, 1130 aa, unidentified
  REGION 1..1130: note = Cas Enzyme sequence
MMNGLVLGLDIGIASVGAGILKKDSGEIIHSNARLFPAATADNNVLRRSSRQARRSTRRKRHRAVRLHDLFEDYGLLTDFSKVSINLNPYKLRVEGMDIQLTTEELFIALKNIIKRRGISYLDDASEDGVTVSSDYGKAVEENRKLLSEQTPGQIQLERFEKYGQVRGDFTVEENGEKRRLINVFSTSTYRKEAERILRKQQEFNNKITDDFIDDYLTILTGKRKYYHGPGNKKSRTDYGRYTTKKDSEGKYITLDNIFGVLIGKCTFYPDEYRASKASYTAQEFNLLNDLNNLTVPTETKKLSEKQKKTIVEYAKTAKTLGASTLLKYIAKMVDASVDQIHGYRIDPNKKPEMHTFDVYRKMQSLETFNVNEMPREVLDEVAHILTLNTEREGIEEAINTKLKGTFNQDQVLELVQFRKNNSNLFSKGWHNFSLKLMKELIPELYETSEEQMTILTRLGKQKSKETSKRTKYIDEKELTEEIYNPVVAKSVRQAIKIINEATKKYGIFDNIVIEMARENNEEDAKKDYIKRQKANLDEKNAAMEKAAFQYNGKKELPDSIFHGHKELATKIRLWHQQGEKCLYTGKNIPISDLIQNQYKYEIDHILPLSLSFDDSLSNKVLVLATANQEKGQRTPFQALDSMDDAWSYREFKSYVKDSKLLGNKKEDYLLTEEDISKIEVKQKFIERNLVDTRYSSRVVLNALQDFYKNHHFDTTISVVRGQFTSQLRRKWGLEKSRETYHHHAVDALIIAASSQLRLWKKQNNPLISYKEGQFVDSETGEILSLSDDEYKELVFKAPYDHFVDTLRSKTFEDSILFSYQVDSKYNRKISDATIYSTRKAKLDKDKSEETYVLGKIKDIYSQAGYDAFIKIYNKDKSKFLMYHKDSQTFEKVIEEIIRTYPSKEFNEKNKEVPCNPFEKYRQENGPIRKYSKKGNGPEIKSLKYYDKNIPESFINITPSNSKNKVILRQLNPWRTDVYFNHQTEKYELLGLKYADLQFEKKTGTYSITIDKYNEIKEKEGVGEQSEFKFTLYKNDLLLIKDTKNNEKQIFRFLSRTMPNVKHYVELKPYDKAKFDGNQPLITIFGNVAKGGQCLKGLNKSNISIFKVKTDVLGNKHFIKKEGDEPKLKF

SEQ ID NO: 18739 - protein, 1121 aa, unidentified
  REGION 1..1121: note = Cas Enzyme sequence
MNGLVLGLDIGIASVGVGILNKDTGEIIHTSSRIFPAATADNNVERRNSRQGRRLNRRKKHRVVRFQDLFDDYGLLTDFPKVPINLNPYRLRVHGLNQQLTNEELFIALKNIVKRRGISYLDDASEDGGAVSSDYGKAVEENRKLLAEQTPGQIQLERFEKYGQVRGDFTVEEKGDKHRLINVFSTSAYRKEAERILRKQQEFNNQITDKFIEDYLKILTDKRKYYHGPGNEKSRTDYGRFRTDGTTLDNIFGILIGKCTFYPNEYRASKASYTAQEFNLLNDLNNLTVSTETKKLSEEQKKTIVEYAKSAKTLGASTLLKYIAKMIDASVDQIRGYRVDVNNKPEMHTFEVYRKMQSLETIPVGEFSREVLDELAHILTLNTEREGIEEAINTKLMDVFNQDQILELVQFRKNNSSLFSKGWHNFSLKLMMELIPELYETSEEQMAILTRLGKQKFKETSKRTKYIDEQEVTEEIYNPVVAKSVRQGIKIINEATKKYGIFDDVVIEMARENNEEDAKKDYIKRQKANHDEKNAAMEKAAFQYNGKKELPDSIFHGHKELATKIRLWHQQGEKCLYTGKNIPISDLIHNQYKYEIDHILPLSLSFDDSLSNKVLVLATANQEKGQRTPFQALDSMADAWSYREFKSYVKDSKLLGNKKKDYLLTEEDISKIEVKQKFIERNLVDTRYSSRVVLNALQDFYKAHKFDTTISVVRGQFTSQLRRKWGLEKSRETYHHHAVDALIIAASSQLRLWKKQNNPLISYKEGQFVDSETGEIISLSDDEYKELVFKAPYDYFVDILRSKKFEDSILFSYQVDSKFNRKISDATIYETRKAKLDKDKSEETYVLGKIKDIYSQAGYDTFIKIYNKDKSKFLMYHKDPQTFEKVIEEILRTYPSKEFNEKNKEVPCNPFEKYRQENGRIRKYSRKGNGPEIKSLKYYDKNIPESFINITPSNSKNKVILRQLNPWRTDVYFNHQTEKYELLGLKYADLQFEKKTGTYSITINKYNEIKEKEGVGKESEFKFTLYKNDLLLIKDTKNNEEQIFRFLSRTMPNQNHYVELKPYDKGNFEGKEKIKVFKMTSNGRCIKGLGKKYLSIYKVKTDILGNKHFIKKEGDEPKLKF

SEQ ID NO: 18740 - protein, 1139 aa, unidentified
  REGION 1..1139: note = Cas Enzyme sequence
MSDLVLGLDIGIGSVGVGILNKVTGEIIHKNSRIFPAAQAENNVERRTNRQGRRLTRRKKHRRVRLNHLFEESGLITDFTQVSINLNPYQLRVKGLTDELSNEELFIALKNMVKHRGISYLDDASDDGNSSVGDYAQIVKENSKQLETKTPGQIQLERYQKYGQLRGDFTIEEDGKKHRLINVFPTSAYRAEALRILQTQQEFNPQITDEFINSYLQILTGKRKYYHGPGNEKSRTDYGRYTTKKDSEDEYLTLDNIFGILIGKCTFYPEEYRAAKASYTAQEFNLLNDLNNLTVPTETKKLSEEQKNKIITYVKNEKAMGPAKLFKYIAKLLSCDVADIKGYRIDKSDKAEIHTFEAYRKMKTLETIDIEQMEREKLDKLAYVLTLNTEKEGIQEALEHEFADGTFSQKQVDELVQFRKANSSIFGKGWHNFSVKLMMELIPELYATSEEQMTILTRLGKQKTTSSSNKTKYIDEKRLTEEIYNPVVAKSVRQAIKIVNAAIKEYSDFDNIVIEMARETNEDDEKKAIQKIQKANKDEKDAAMLKAANQYNGKAELPHSVFHGHKQLATKIRLWHQQGERCLYTGKTISIHDLINNPNQFEIDHILPLSITFDDSLANKVLVYATANQEKGQRTPYQALDSMDDAWSFRELKAFVRESKTLSNKKKEYLLTEEDISKFDVRKKFIERNLVDTRYASRVVLNALQEHFRTRKIDTKVSVVRGQFTSQLRRHWGIDKIRDTYHHHAVDALIIAASSQLNLWKKQKNTLVSYSEDQLLDIETGELISDDEYKESVFKAPYQHFVDTLKSKDFEDSILFSYQVDSKFNRKISDATIYATRKAKLDKEKKEYTYTLGKIKDIYALGTKTPSKTGFYKFLDLYKKDKSQFLMYQKDRKTWDEVIEKILEQYRPFKEKDKNGKEVDFNPFEKYRIENGPIRKYSRKGNGPEIKSLKYYDNLLGRFVDITPSESKNPVALLSLNPWRTDVYYNTETRKYEFLGLKYADLCFEKGGSYGISKVKYNKIREKEGIGKNSEFKFTLYKNDLILIKDTETNRQQIFRFWSRTGKDNPKSFEKHKIELKPYEKARFEKGEELEVLGKVPPSSNQLQKNMQIENLSIYKVRTDVLGNQHIIKNEGDKPKLDF

SEQ ID NO: 18741 - protein, 1128 aa, unidentified
  REGION 1..1128: note = Cas Enzyme sequence
MSDLVLGLDIGIGSVGVGILNKVTGEIIHKNSRIFPAAQAENNVERRTNRQGRRLTRRKKHRRVRLNHLFEESGLITDFTKVSINLNPYQLRVKGLIDELSNEELFIALKNMVKHRGISYLDDASDDGNSSVGDYAQIVKENSKQLETKTPGQIQLERYQKYGQLRGDFTVEEDGKKHRLINVFPTSAYRAEALRILQTQQEFNPQITDEFIYRYLEILTGKRKYYHGPGNEKSRTDYGRYTTKKDSEDEYITLDNIFGILIGKCTFYPEEFRAAKASYTAQEFNLLNDLNNLTVPTETKKLSEEQKNQIINYVKNEKAIGPAKLFKYIAKLLSCDVADIKGYRIDKSDKAEIHTFEAYRKMKTLETLDVKKMAREELDKLAYVLTLNTEKEGIQEAIEHEFADGTFSQEQVDELVQFRKANSSIFGKSWHNFSVKLMMELIPELYATSEEQMTILKRLGKQKTTSSSNKTKYIDEKQLTEEIYNPVVAKSVRQAIKIVNAAIKEYGDFDNIVIEMARETNEDDEKKAIQKIQKANKDEKDTAMLKAANQYNGKAELPHSVFHGHKQLATKIRLWHQQGERCLYTGKTISIHDLINNPNQFEIDHILPLSITFDDSLANKVLVYATANQEKGQRTPYQALDSMDDAWSFRELKAFVRESKALSNKKKEYLLTEEDISKFDVRKKFIERNLVDTRYASRVVLNALQEHFRAHKTDTKVSVVRGQFTSQLRRHWGIEKTRDTYHHHAVDALIIAASSQLNLWKKQKNTLVSYSEYQLLDIETGELISDDEYKESVFKAPYQHFVDTLKSKEFEDSILFSYQVDSKFNRKISDATIYATRQAKVGKDKKDETYVLGKIKDIYSQTGYDAFIKIYQKDKSKFLMYRHDPQTFEKVIEPILENYPNKEMNEKGKEVPCNPFLKFKEEHGDYIRKYSKKGNGPEIKSLKYYDSKLGNHIDITPKNSNNKVVLQSVSPWRADVYFNKTTGKYEILGLKYADLQFEKGTGTYKISQEKYNAIKKKEGVDSDSEFKFTLYKNDLLLIKDTETREQQLFRFLSRTMPKQKHYVELKPYNKQKFEGNESLINVLGAVAKGGQCLKGMSKTNISIYKVRTDVLGNQHIIKNEGDKPKLDF

SEQ ID NO: 18742 - protein, 1121 aa, unidentified
  REGION 1..1121: note = Cas Enzyme sequence
MNGKILGLDIGVASVGVGIIDKESGEIIHASSRIFPAATADSNVERRGFRQGRRLGRRKKHRKVRLADLFRDAELVTDFSKVSINLNPYELRVKGLIEKLTNEELFIALKNIVKRRGISYLDDANEDGESSSSEYGKAVEENRKLLADKTPGQIQLERFEKYGQVRGDFTIEENGEKHRLLNVFSTSAYKKEAERILTKQQDYNQDITDEFIQAYLRILTGKRKYYHGPGNEKSRTDYGRFRTDGTTLDNIFGILIGKCTFYPEEYRAAKASYTAQEFNLLNDLNNLTVPTETKKLSEEQKRQIIEYAKGAKTLGAATLLKYIAKLIDASVDDIKGYRIDKSEKPEMHTFDIYRKMQTLETVDVEQLSREVLDKLAHILTLNTEREGIEEAIKVSFTKGEFEQNQIAELVSFRKSNSSLFGKGWHNFSIKLMMELIPELYETSEEQMTILTRLGKQKTKARSERTKYIDEKELTEEIYNPVVAKSVRQAIKIINLATKKYGIFDNIVIEMARENNEEDAKKDYVKRQKANEDEKNAAMEKAAHQYNGKKELPDSIFHGHKELATKIRLWHQQGEKCLYTGKNITIADLIENQYKYEIDHILPLSLSFDDSLANKVLVLATANQEKGQRTPFQALDGMDDSWSYREFKSYVKVSKALSNKKKDYLLNEEDINKIEVKQKFIERNLVDTRYSSRVVLNALQDFYKLNDFDTKISVVRGQFTSQLRRKWRIDKSRETYHHHAVDALIIAASSQLRLWKKWNNPLISYKDNQFVDSETGEIITLTDDEYKELVFRAPYDHFVDMLGSKKFEDSILFSYQVDSKYNRKISDATIYATRKAKLGKDKSEETYVLGKIKDIYSQTGYDAFIKLYKKDKSKFLMYCKDPLTFEKVIEEILKTYPDKEQNENGKEVACNPFEKYRQENGPIRKYSKKGKGPEIKSLKYYDNKLGNHIDITPANSENQVILQSLSPWRTDVYFNPETEKYELLGLKYADLQFEKGTGNYSITLDKYYEIKEKEGVSEQSEFKFTLYKNDLLLIKDTKTKEQQMFRFLSRTMPNQKHYVELKPYDKGNFEGKEKIKVFVTTSNGRCLKGLGKADLSIYKVQTDVLGNKRFIKKEGDAPKLEF

SEQ ID NO: 18743 - protein, 1123 aa, unidentified
  REGION 1..1123: note = Cas Enzyme sequence
MNDLVLGLDIGIASVGVGILKKETGEIVHSNSRLFPAATADNNVERRGFRGGRRLTRRKKHRSVRLHDLFEDFGLLTDFSKVSINLNPYQFRVQGLDNQLTNEELFIALKNIVKRRGISYLDDASEDGGTVSSDYGKAVEENRKLLAEQTPGQIQLNRFEKYGQVRGDFTVMENGEKRRLINVFSTSAYRIEAERILRKQQEFNKKITDGFIEDYLTILTGKRKYYHGPGNEKSRTDYGRFRADGTTLDNIFGVLIGKCTFYPDEYRASKASYTAQEFNLLNDLNNLTVPTETKKLNEEQKKIIVEYAKTAKTLGASTLLKYIAKLIGASVDQIHGYRIDSNKKPEMHIFETYRKMQSLETIRVEELHRKVLDELAHILTLNTEREGIEEAINANLKDTFSQDQVLELVQFRKNNSSLFSKGWHNFSLKLMMELIPELYETSEEQMTILTRLGKQKSKETSKRTKYIDEKELTEEIYNPVVAKSVRQAIKIINEATKKYGIFDNIVIEMARENNEEDAKKEYIKRQKANIDEKNAAMEKAAFQYNGKKELPDDVFHGHKELATKIRLWHQQGEKCLYTGKNIPIADLIQNQYKYEIDHILPLSLSFDDSLSNKVLVLATSNQEKGQRTPFQALDSMDDAWSYREFKTYVKDLKLLNNKKKDYLFTEEDISKIEVKQKFIERNLVDTRYSSRVVLNALQDFYKEHQFDTTISVVRGQFTSQLRRKWGLEKSRDTYHHHAVDALIIAASSQLRLWKKLNNSLISYKEEQFVDLETGEIIALSDDEYKELVFKAPYDHFVDTLKSKKFEDTILFSYQVDSKYNRKISDATIYATRKAKLDNDKSEETYVLGKIKDIYSQSGYDAFIKIYNKDKSRFLMYHKDPQTFEKVIEEILRTYPSKEFNDKNKEVPCNPFEKYRQENGPIRKYSKKGNGPEIKSLKYYDKNIPESFINITPSNSKNKVILRQLNPWRTDVYFNHQTEKYELLGLKYADLQFEKKTGNYSITIDKYNEIKEKEGVSKQSEFKFTLYKNDLLLIKDTKNNEKQIFRFLSRTMPNQKNYVELKPYDKAKFDGNQELMTIFGNVAKGGQCMKGLNKSDISIFKVKTDVLGNKHFIKKEGEEPKLKF

SEQ ID NO: 18744 - protein, 1130 aa, unidentified
  REGION 1..1130: note = Cas Enzyme sequence
MMNGLVLGLDIGIASVGAGILKKDTGEIIHANSRLFPAATADNNVLRRSSRQARRSTRRKRHRAVRLHDLFEDYALLTDFSKVSINLNPYKLRVEGMNIQLTTEELFIALKNIIKRRGISYLDDASEDGGTVSSDYGKAVEENRKLLSEQTPGQIQLERFEKYGQVRGDFTVVENGEKRRLINVFSTSAYSKEAERILRKQQEFNNKITDDFIDDYLTILTGKRKYYHGPGNKKSRTDYGRYTTKKDSEGKYITLDNIFGVLIGKCTFYPDEYRASKASYTSQEFNLLNDLNNLTVPTETKKLSEEQKKTIVEYAKSAKTLGASTLLKYIAKLIDASVDQIHGYRVDVNKKPEMHTFDVYRKMQSLETFNVNEMPREVLDELAHILTLNTEREGIEEAINTKLKGTFNQDQVLELVQFRKNNSSLFSKGWHNFSLKLMMELIPELYETSEEQMTILTRLGKQKSKETSKRTKYIDEKEITEEIYNPVVAKSVRQAIKIINEATKQYGIFDNIVIEMARENNEEEAKKDYIKRQKANLDEKNAAMEKAAFQYNGKKELPDSIFHGHKELATKIRLWHQQGEKCLYTGKNIPISDLIQNQYKYEIDHILPLSLSFDDSLSNKVLVLATANQEKGQRTPFQALDSMDDAWSYREFKSYVKDSKLLGDKKKDYLLTEEDISKIEVKQKFIERNIVDTRYSSRVVLNALQDFYKNHHFDTTISVVRGQFTSQLRRKWGLEKSRETYHHHAVDALIIAASSQLRLWKKQNNPLISYKAGQFVDSETGEILSLSDDEYKELVFKAPYDHFVDTLRSKTFEDSILFSYQVDSKYNRKISDATIYSTRKAKLDKDKSEETYVLGKIKDIYSQAGYDAFIKIYNKDKSKFLMYHKDSQTFEKVIEEILRTYPSKEFNEKNKEVPCNPFEKYRQENGPIRKYSKKGNGPEIKSLKYYDKNIPESFINITPSNSKNKVILRQLNPWRTDVYFNHQTEKYELLGLKYADLQFEKKTGTYSITIDKYNEIKEKEGVGEQSEFKFTLYKNDLLLIKDTKNNEKQIFRFLSRTMPNVKHYVELKPYDKAKFDGNQPLITIFGNVAKGGQCLKGLNKSNISIFKVKTDVLGNKHFIKKEGDEPKLKF

SEQ ID NO: 18745 - protein, 1128 aa, unidentified
  REGION 1..1128: note = Cas Enzyme sequence
MSDLVLGLDIGIGSVGVGILNKVTGEIIHKNSRIFPAAQAENNVERRTNRQGRRLTRRKKHRRVRLNHLFEESGLITDFTNVSINLNPYQLRVNGLTEELSNEELFIALKNMVKHRGISYLDDASDDGNSSVGDYAQIVKENSKQLETKTPGQIQLERYQKYGQLRGDFTVEEDGKKHRLINVFPTSAYRAEALRILQTQQEFNPQITDEFINSYLQILTGKRKYYHGPGNEKSRTDYGRYTTKKDSEDEYITLDNIFGILIGKCTFYPEEYRAAKASYTAQEFNLLNDLNNLTVPTETKKLSEEQKNQIITYVKNEKAMGPAKLFKYIAKLLSCDVADIKGYRIDKSDKAEIHTFEAYRKMKTLETIDIEQMEREKLDKLSYVLTLNTEKEGIQEALEHEFADGTFSQEQIDELVQFRKANSSIFGKGWHSFSVKLMMELIPELYVTSEEQMTILTRLGKQKTTSSSNKTKYIDEKQLTEEIYNPVVAKSVRQAIKIVNAAIKEYGDFDNIVIEMARETNEDDEKKAIQKIQKANKDEKDAAMFKAANQYNGKAELPHSVFHGHKQLATKIRLWHQQGERCLYTGKTISIHDLINNPNQFEIDHILPLSITFDDSLANKVLVYATVNQEKGQRTPYQALDSMDDAWSFRELKAFVRESKTLSNKKKEYLLTEEDISKFDVRKKFIERNLVDTRYASRVVLNALQEHFRTRKIDTKVSVVRGQFTSQLRRHWGIDKTRDTYHHHAVDALIIAASSQLNLWKKQKNTLVNYSENQLLDIETGELISDDEYKESVFKAPYQHFVDTLKSKEFEDSILFSYQVDSKFNRKISDATIYATRQAKVGKDKKDETYVLGKIKDIYSQTGYDAFIKIYQKDKSKFLMYRHDPQTFEKVIEPILENYPNKEMNEKGKEVPCNPFLKYKEEHGDYIRKYSKKGNGPEIKSLKYYDSKLGNHIDITPKDSSNKVVLQSVSPWRADVYFNKTTGKYEILGLKYADLQFQKGTGKYKISEEKYNDIKIKEGVDSDSEFKFTLYKNDLLLIKDTETKEQQLFRFLSRTKPNVKHYVELKPYDKQKFEGGEVLIKVLGNVANGGQCVKGLGKSNLSIYKVRTDVLGNQHIIKNEGDKPKLDF

SEQ ID NO: 18746 - protein, 1135 aa, unidentified
  REGION 1..1135: note = Cas Enzyme sequence
MNGLVLGLDIGIGSVGVGILKKDTGEIIHTNSRIFPAATADNNVERRNSRQGRRLNRRKKHRVVRFQDLFDDYGLLTDFSKVPINLNPYRLRVHGLNQQLTNEELFIALKNIVKRRGISYLDDASEDGGAVSSDYGSKAVEENRKLLAEQTPGQIQLERFEKYGQVRGDFTVEEKGDKHRLINVFSTSAYRKEAERILRKQQEFNNQITDEFIENYLKILTEKRKYYHGPGNEKSRTDYGRFRTDGTTLDNIFGILIGKCTFYPNEYRASKASYTAQEFNLLNDLNNLTVPTETKKLSEEQKKTIVEYVKSAKTLGASTLLKYIAKMLDASVDQIRGYRVDVNNKPEIHTFEAYRKMQSLETISVGELPRKVLDELAHILTLNTEREGIEEAINTRLMDVFSQEQVLELVQFRKNNSSLFSKGWHNFSLKLMLELIPELYETSEEQMTILTRLGKQRSKETSKRTKYIDEKEVTEEIYNPVVAKSVRQAIKIINEATKKYGIFDNIVIEMARENNEEGAKKDYIKRQKANQDEKNAAMEKAAFQYNGKKELPDSIFHGHKELATKIRLWHQQGEKCLYTGKNIPISDLIHNQYKYEIDHILPLSLSFDDSLSNKVLVLATANQEKGQRTPFQALDSMDDAWSYREFKSYVKDSKLLGNKKKDYLLTEEDISKIEVKQKFIERNLVDTRYSSRVVLNSLQDFYKNHDFDTTISVVRGQFTSQLRRKWGLEKSRETYHHHAVDALIIAASSQLRLWKKQNNPLISYKEGQFVDSETGEIFSLSDDEYKELVFKAPYDHFVDTLRSKAFEDSILFSYQVDSKYNRKISDATIYATRKVKLDKEKKEYTYTLGKIKDIYALGKKTPSKTGFYKFLDLYNTDKSQFVMYQKDRKTWDEVIEKIMEQYRPFKEYDKNGKEVDFNPFEKYRIENGPIRKYSRKGNGPVIKSMKYYDNLLGKFINITPSESKNPVALLSLNPWRTDVYYNPETRKYEFLGLKYADLCFGEGGSYGISEFKYNEIREKEGIGKNSEFKFTLYKNDLILIKDTETNCQQIFRFWSRTGKDNPKSFEKHKIELKPYEKAKFEKGEELEVLGRVPPSSDRLQKNMQIENLSIYKVKTDILGNKHFIKKEGDEPKLKF

SEQ ID NO: 18747 - protein, 1140 aa, unidentified
  REGION 1..1140: note = Cas Enzyme sequence
MNGLVLGLDIGIASVGVGILKKDSGEIIHTNSRLFSAATADSNIERRGHRGGKRLTRRKKHRSIRLHDLFEDFGLLTDFSKVSINLNPYQLRVQGLDNQLTNEELFIALKNIVKRRGISYLDDASEDGGTVSSDYGKAVEENRKLLAEQTPGQIQLDRFEKYGQVRGDFTVVENGEKRRLINVFTTSAYSKEAERILRKQQEFNKKITDEFIEDYLTILTGKRKYYHGPGNEKSRTDYGRYTTKKDPEGKYITLDNIFGILIGKCTFYPDEYRASKASYTAQEFNLLNDLNNLTVPTETKKLSEEQKKTIVEYAKTAKTLGASTLLKYIAKLIGASVDQIHGYRIDPNKKPEMHTFETYRKMQSLETIRVEELPRKVLDELAHILTLNTEREGIEEAINATLKDTFSQDQVLELVQFRKNNSSLFSKGWHNFSLKLMMELIPELYETSEEQMTILTRLGKQKSKETSKRTKYIDEKELTEEIYNPVVAKSVRQAIKIINEATKKYGIFDNIVIEMARENNEEDAKKEYIKRQKANLDEKNAAMEKAAFQYNGKKELPDNVFHGHKELATKIRLWHQQGEKCLYTGKNIPISDLIQNQYKYEIDHILPLSLSFDDSLSNKVLVLATANQEKGQRTPFQALDSMDDAWSYREFKSYVKDSKLLGNKKKEYLLTEEDISKIEVKQKFIERNLVDTRYSSRVVLNALQDFYKEHQFDTTISVVRGQFTSQLRRKWGLEKTRETYHHHAVDALIIAASSQLRLWKKQNNPLVSYKAEQFVDQETGEIISLSDDEYKELVFKAPYDHFVDTLKSKEFEDSILFSYQVDSKYNRKISDATIYATRKAKLDKENKEYTYTLGKIKDIYALGTKSPSKTGFYKFLDLYNKDKSQFLMFQKDRKTWDEVIEKIIEQYRPFKEYDENGKEVDFNPFEKYRIENGPIRKYSKKGNGPEIKSLKYYDNLLGKFVNITPSESKNPVALLSLNPWRTDVYYNTETSKYEFLGLKYADLCFEKGGSYGISEVKYNKIREKEGIGKESEFKFTLYKNDLVLIKDTETNCQQIFRFWSRTGKDNPKSFEKHKIELKPYEKARFEKGEELEVLGKVPPSSNQLQKNMQIENLSIYKVKTDVLGNKHFIKKEGEEPKLKF

SEQ ID NO: 18748 - protein, 1130 aa, unidentified
  REGION 1..1130: note = Cas Enzyme sequence
MMNGLVLGLDIGIASVGAGILKKDTGEIIHANSRLFPAATADNNVLRRSSRQARRSTRRKRHRAVRLHDLFEDYALLTDFSKVSINLNPYKLRVEGMNIQLTTEELFIALKNIIKRRGISYLDDASEDGGTVSSDYGKAVEENRKLLSEQTPGQIQLERFEKYGQVRGDFTVVENGEKRRLINVFSTSAYSKEAERILRKQQEFNNKITDDFIDDYLTILTGKRKYYHGPGNKKSRTDYGRYTTKKDSEGKYITLDNIFGVLIGKCTFYPDEYRASKASYTAQEFNLLNDLNNLTVPTETKKLSEEQKKTIVEYAKTAKTLGASTLLKYIAKMVDASVDQIHGYRIDPNKKPEMHTFDVYRKMQSLETFNVNEMPREVLDELAHILTLNTEREGIEEAISAKLKDTFSQDQVLELVQFRKNNSSLFSKGWHNFSLKLMLELMPELYATSEEQMTILTRLGKQKSKETSKRTKYIDEKEITEEIYNPVVAKSVRQAIKIINEATKKYGIFDNIVIEMARENNEEEAKKDYIKRQKANLDEKNAAMEKAAFQYNGKKELPDSIFHGHKELATKIRLWHQQGEKCLYTGKNIPISDLIQNQYKYEIDHILPLSLSFDDSLSNKVLVLATANQEKGQRTPFQALDSMDDAWSYREFKSYVKDSKLLGNKKKDYLLTEEDISKIEVKQRFIERNLVDTRYSSRVVLNALQDFYKNHHFDTTISVVRGQFTSQLRRKWGLEKSRETYHHHAVDALIIAASSQLRLWKKQNNPLISYKAGQFVDSETGEILSLSDDEYKELVFKAPYDHFVDTLRSKTFEDSILFSYQVDSKYNRKISDATIYSTRKAKLDKDKSEETYVLGKIKDIYSQAGYDAFIKIYNKDKSKFLMYHKDSQTFEKVIEEILRTYPSKEFNEKNKEVPCNPFEKYRQENGPIRKYSKKGNGPEIKSLKYYDKNIPESFINITPSNSKNKVILRQLNPWRTDVYFNHQTEKYELLGLKYADLQFEKKTGTYSITIDKYNEIKEKEGVGEQSEFKFTLYKNDLLLIKDTKNNEKQIFRFLSRTMPNVKHYVELKPYDKAKFDGNQPLITIFGNVAKGGQCLKGLNKSNISIFKVKTDVLGNKHFIKKEGDEPKLKF

SEQ ID NO: 18749 - protein, 1126 aa, unidentified
  REGION 1..1126: note = Cas Enzyme sequence
MNGLVLGLDIGIGSVGVGILNKDTGEIIHANSRIFPAATADNNVERRNSRQARRLNRRKKHRVVRFQDLFDDYGLLTDFSKVSINLNPYRLRVDGLNQQLTNEELFIALKNIVKRRGISYLDDASEDGGAVSSNYGKAVEENRKLLAEQTPGQIQLERFEKYGQVRGDFTVEEKGNKHRLINVFSTSAYRKEAERILRKQQEFNNQITDKFIEDYLKILTEKRKYYHGPGNEKSRTDYGRFRTDGTTLDNIFGILIGKCTFYPNEYRASKASFTAQEFNLLNDLNNLTVPTETKKLSEEQKKTIVEYAKSAKTLGASTLLKYIAKMIDASVDQIRGYRVDVNNKPEMHTFEVYRKMQSLETIPVGEFSREVLDELAHILTLNTEREGIEEAINTKLRDSFSQDQVLELVQFRKNNSSLFSKGWHNFSLKLMMELIPELYETSEEQMTILTRLGKLKFKETSKRTKYIDEKEVTEEIYNPVVAKSVRQAIKIINEATKKYGIFDNIVIEMARENNEEDAKKDYIKRQKANHDEKNAAMEKAAFQYNGKKELPDSIFHGHKELATKIRLWHQQGEKCLYTGKNIPISDLIHNQYKYEIDHILPLSLSFDDSLSNKVLVLATANQEKGQRTPFQALDSMDDAWSYREFKSYVKDSKLLGNKKKEYLLTEEDISKIEVKQKFIERNLVDTRYSSRVVLNALQDFYKAHKFDTTISVVRGQFTSQLRRKWRLEKSRETYHHHAVDALIIAASSQLRLWKKQANPLISYKEDQFVDSETGEIISLTDDQYKELVFKAPYAHFVDTLSSKKFEDSILFSYQVDSKYNRKISDATIYATRKVKLDKDKSEETYVLGKIKDIYSQAGYDAFIKIYNKDKSKFLMYHKDPQTFEKVIEEILRNYPSKEFNEKNKEVPCNPFEKYRQENGPIRKYSKKGNGPEIKSLKYYDILLGKHKNITPEGSRNTVALLSLNPWRTDVYYNMETKKYEFLGLKYADLSFEEGRAYGISTETYNKLREKEGIGKNSEFKFTLYKNDLILIKDTETNCQQIFRFWSRTGKDNPKSFEKHKIELKPYEKARFEKGEELEVLGKVPPSSNQLQKNMQIENLSIYKVKTDVLGNKHFIKKEGEKPKLKF

SEQ ID NO: 18750 - protein, 1121 aa, unidentified
  REGION 1..1121: note = Cas Enzyme sequence
MNGLVLGLDIGIASVGVGILNKDTGEIIHANSRLFPAATADNNVERRTSRQARRLNRRKKHRSVRLYDLFEEFGLLTDFSKVSINLNPYQLRVQGLDNQLTNEELFIALKNIVKRRGISYLDDASEDGGTVSSDYGKAVEENRKLLVEQTPGQIQLDRFEKYGQLRGDFTVVENGEKHRLINVFSTSAYRKEAERILRKQQEFNNKITDEFIEDYLTILTGKRKYYHGPGNEKSRTDYGRFRTDGTTLDNIFGILIGKCTFYPDEYRASKASYTAQEFNLLNDLNNLTVPTETKKLSEEQKKTIVEYAKTAKTLGASTLLKYIAKLIGASVDQIHGYRIDPDKKTEMHTFEVYRKMQSLEIIKVEELPRNVIDELAHILTLNTEREGIEEAINAKLKDTFSQDQVLELVQFRKNNSSLFSKGWHNFSIKLMMELIPELYETSEEQMTILTRLGKQKSKETSKRTKYIDEKELTEEIYNPVVAKSVRQAIKIINEATKKYGIFDNIVIEMARENNEEDAKKEYIKRQKANLDEKNAAMEKAAFQYNGKKELPDNVFHGHKELATKIRLWHQQGEKCLYTGKNIPISDLIQNQYKYEIDHILPLSLSFDDSLSNKVLVLATANQEKGQRTPFQALDSMDDSWSYREFKSYVKDSKLLGNKKKEYLLTEEDISKIEVKQKFIERNLVDTRYSSRVVLNALQDFYKKHQFDTTISVVRGQFTSQLRRKWGLEKSRETYHHHAVDALIIAASSQLRLWKKQNNPLISYTEGQFVDSETGEIISLSDDEYKELVFKAPYDHFVDTLKSKKFEDSILFSYQVDSKFNRKISDATIYATRKAKLDKDKSEETYVLGKIKDIYSQAGYDAFIKIYNKDKSRFLMYHKDPQTFEKVIEEILRTYPSKEFNDKNKEVPCNPFEKYRQENGPIRKYSRKGNGPEIKSLKYYDNKLGNHIDITPDGSMNQVVLQSLKPWRTDVFFNHQTEKYELMGLKYSDLNFEKGSGKYSISIEKYNSINRNEGVSEESEFKFTLYKNDLILIKDALTKESQIFRYGSRNDTSKHYVELKPYDMSKFEGDEKLIKVLGTVAKGGRCIKGLNKKDISIYKIKTDVLGNKHFIKKEGEEPKLKF

SEQ ID NO: 18751 - protein, 1121 aa, unidentified
  REGION 1..1121: note = Cas Enzyme sequence
MNGLVLGLDIGIASVGVGILEKNSGKIIHANSRLFPAATADDNVERRKNRQARRLNRRKKHRGVRFQDLFEDYGLLTDFSKVSINLNPYRLRVDGLNQQLTNEELFIALKNIVKRRGISYLDDASEDGGTVSSDYGKAVEENRKLLAEQTPGQIQLDRFERYGQIRGDFTVLENGEKCRLINVFSTSAYKKEAERILRKQQEFNSKITDEFIEDYLKILTGKRKYYHGPGNEKSRTDYGRFRKDGTTLDNIFGILIGKCTFYPNEYRASKASYTAQEFNLLNDLNNLSVPTETKKLSEEQKKTIIEYAKSAKTLGASTLLKYIAKMIDASVDQIHGYRVDVNNKPEMHTFEVYRKMQSLETISVGELSRNVLDELAHILTLNTEREGIEEAINTKLMGVFSQDQVLELVQFRKNNSSLFSKGWHNFSLKLMMELIPELYETSEEQMTILTRLGKQKNKETSKRTKYIDEKEVTEEIYNPVVAKSVRQAIKIINEATKKYGIFDNIVIEMARENNEEDAKKDYIKRQKANQDEKNAAMEKAAFQYNGKKELPDNIFHGHKELATKIRLWHQQGEKCLYTGKNIPISDLIHNQYKYEIDHILPLSLSFDDSLSNKVLVLATANQEKGQRTPFQALDSMDDAWFYREFKSYVKDSKLLSNKKKDYLLTEEDISKIEVKQKFIERNLVDTRYSSRVVLNALQDFYKSHQFDTTISVVRGQFTSQLRRKWGLEKSRETYHHHAVDALIIAASSQLRLWKKQNNPSISYKEGQFVDSETGEIISLSDDEYKELVFKAPYDHFVDTLRSKTFEDSILFSYQVDSKYNRKISDATIYATRKAKLDKDKSEETYVLGKIKDIYSQAGYDAFIKIYNKDKSKFLMYHKDPQTFEKVIEEILRTYPSKELNDKNKEIPCNPFEKYRQENGPIRKYSKKGNGPEIKSLKYYDKNIPESFINITPSNSNNKVLLRQLYPWRTDVYFNPQTDKYELLGLKYADLQFEKATGKYSITIDKYNEIKEKEGVSKESEFKFTLYKNDLLLIKDTKNNEEQIFRFLSRTMPNQNHYVELKPYDKGNFEGKEKIKVLKMTSNGRCIKGLGKKYLSIYKVKTDILGNKHFIKKEGDEPKLKF

SEQ ID NO: 18752 - protein, 1139 aa, unidentified
  REGION 1..1139: note = Cas Enzyme sequence
MSDLVLGLDIGIGSVGVGILNKVTGEIIHKNSRIFPAAQAENNLERRTNRQGRRLTRRKKHRRVRLNHLFEESGLITDFTKVSINLNPYQLRVKGLTAELSNEELFIALKNMVKHRGISYLDDASDDGNSSVGDYAQIVKENSKQLETKTPGQIQLERYQKYGQLRGDFTVEEDGRKHRLINVFPTSAYHAEALRILQTQQEFNPQITDEFINSYLEILTGKRKYYHGPGNEKSRTDYGKYTTKKDAQGQYITLNNIFGILIGKCTFYPEEFRAAKASYTAQEFNLLNDLNNLTVPTETKKLSEEQKHQIITYVKNEKAMGPAKLFKYIAKLLACDIADIKGYRIDKSDKAEIHTFEAYRKMKTLETIDIEQIEREKLDKLAYVLTLNTEREGIQEALDHEFADGTFSQEQVDELVQFRKANSSIFGKGWHSFSVKLMMELIPELYATSEEQMTILTRLGKQKTTSSSNKTKYIDEKQLTEEIYNPVVAKSVRQAIKIVNAAIKKYGDFDNIVIEMARETNEDDEKKAIQKIQKANKAEKDAAMRKAANQYNGKAELPHSVFHGHKQLATKIRLWHQQGERCLYTGKTISIHDLINNPNQFEIDHILPLSITFDDSLANKVLVYATANQEKGQRTPYQALDSMDDAWSFRELKTFVRESKALSNKKKEYLLTEEDISKFDVRKKFIERNLVDTRYASRVVLNALQEHFKAHKIDTKVSVVRGQFTSQLRRHWGIEKTRDTYHHHAVDALIIAASSQLNLWKKQKNTLVSYSEDQLLDIETGELISDDEYKESVFKAPYQHFVDTLKSKEFEDSILFSYQVDSKFNRKISDATIYATRKAKLDKEKKEYTYTLGKIKDIYALGTKTPSKTGFYKFLDLYKKDKSQFLMYQKDRRTWDEVIEKILEQYRPFKEKDKNGKEVDFNPFEKYRIENGPIRKYSRKGNGPEIKSLKYYDNLLGRFVDITPSESKNPVALLSLNPWRTDVYYNTETRKYEFLGLKYADLCFEKGGSYGISKVKYNKIREKEGIGKNSEFKFTLYKNDLILIKDTETNRQQIFRFWSRTGKDNPKSFEKHKLELKPYEKTRFEKGEELKVLGKVPPSSNRLQKNMQIENLSIYKVRTDVLGNKHIIKNEGDKPKLDF

SEQ ID NO: 18753 - protein, 1139 aa, unidentified; identical to SEQ ID NO: 18740
  REGION 1..1139: note = Cas Enzyme sequence

SEQ ID NO: 18754 - protein, 1120 aa, unidentified
  REGION 1..1120: note = Cas Enzyme sequence
MSDLVLGLDIGIGSVGVGILNKVTGEIIHKNSRIFPAAQAENNLVRRTNRQGRRLTRRKKHRRVRLNRLFEESGLITDFTKISINLNPYQLRVKGLTDELSNEELFIALKNMVKHRGISYLDDASDDGNSSVGDYAQIVKENSKQLETKTPGQIQLERYQTYGQLRGDFTVEKDGKKHRLINVFPTSAYRSEALRILQTQQEFNPQITDEFINRYLEILTGKRKYYHGPGNEKSRTDYGRYRTSGETLDNIFGILIGKCTFYPDEFRAAKASYTAQEFNLLNDLNNLTVPTETKKLSKEQKNQIINYVKNEKAMGPAKLFKYIAKLLSCDVADIKGYRIDKSGKAEIHTFEAYRKMKTLETLDIEQMDRETLDKLAYVLTLNTEREGIQEALEHEFADGSFSQKQVDELVQFRKANSSIFGKGWHNFSVKLMMELIPELYETSEEQMTILTRLGKQKTTSSSNKTKYIDEKLLTEEIYNPVVAKSIRQAIKIVNAAIKEYGDFDNIVIEMARETNEDDEKKAIQKIQKANKDEKDAAMLKAANQYNGKAELPHSVFHGHKQLATKIRLWHQQGERCLYTGKTISIHDLINNPNQFEVDHILPLSITFDDSLANKVLVYATANQEKGQRTPYQALDSMDDAWSFRELKAFVRESKTLSNKKKEYLLTEEDISKFDVRKKFIERNLVDTRYASRVVLNALQEHFRAHKIDTKVSVVRGQFTSQLRRHWGIEKTRDTYHHHAVDALIIAASSQLNLWKKQKNTLVSYSEDQLLDIETGELISDDEYKESVFKAPYQHFVDTLKSKEFEDSILFSYQVDSKFNRKISDATIYATRQAKVGKDKADETYVLGKIKDIYTQDGYDAFMKIYKKDKSKFLMYRHDPQTFEKVIEPILENYPNKQINEKGKEVPCNPFLKYKEEHGYIRKYSKKGNGPEIKSLKYYDSKLGNHIDITPKDSNNKVVLQSLKPWRTDVYFNKNTGKYEILGLKYSDMQFEKGTGKYSISKEQYENIKVREGVDENSEFKFTLYKNDLLLLKDSENGEQILLRFTSRNDTSKHYVELKPYNRQKFEGSEYLIKSLGTVVKGGRCIKGLAKSNISIYKVRTDVLGNQHIIKNEGDKPKLDF

SEQ ID NO: 18755 - protein, 1139 aa, unidentified; identical to SEQ ID NO: 18752
  REGION 1..1139: note = Cas Enzyme sequence

SEQ ID NO: 18756 - protein, 1128 aa, unidentified
  REGION 1..1128: note = Cas Enzyme sequence
MSDLVLGLDIGIGSVGVGILNKVTGEIIHKNSRIFPAAQAENNLVRRTNRQGRRLTRRKKHRRVRLNHLFEESGLITDFTKVSINLNPYQLRVKGLTAELSNEELFIALKNMVKHRGISYLDDASDDENSSVGDYAQIVKENSKQLETKTPGQIQLERYQKYGQLRGDFTVEEDGRKHRLINVFPTSAYHAEALRILQTQQEFNPQITDEFINSYLEILTGKRKYYHGPGNEKSRTDYGKYTTKKDVQGQYITLNNIFGILIGKCTFYPEEFRAAKASYTAQEFNLLNDLNNLTVPTETKKLSEEQKYQIITYVKNEKAMGPAKLFKYIAKLLACDIADIKGYRIDKSDKAEIHTFEAYRKMKTLETIDIEQIEREKLDKLAYVLTLNTEREGIQEALDHEFADGTFSQEQVDELVQFRKANSSIFGKGWHSFSVKLMMELIPELYATSEEQMTILTRLGKQKTTSSSNKTKYIDEKQLTEEIYNPVVAKSVRQAIKIVNAAIKKYGDFDNIVIEMARETNEDDEKKAIQKIQKANKAEKDAAMRKAANQYNGKAELPHSVFHGHKQLATKIRLWHQQGERCLYTGKTISIHDLINNPNQFEIDHILPLSITFDDSLANKVLVYATANQEKGQRTPYQALDSMDDAWSFRELKTFVRESKALSNKKKEYLLTEEDISKFDVRKKFIERNLVDTRYASRVVLNALQEHFRAHKTDTKVSVVRGQFTSQLRRHWGIEKTRDTYHHHAVDALIIAASSQLNLWKKQKNTLVSYSEDQLLDIETGELISDDEYKESVFKAPYQHFVDTLKSKEFEDSIFFSYQVDSKFNRKISDATIYATRQAKVGKDKKDETYVLGKIKDIYSQTGYDAFIKIYQKDKSKFLMYRHDPQTFEKVIEPILENYPNKEMNEKGKEVPCNPFLKYKEEHDDYIRKYSKKGNGPEIKSLKYYDSNLGNHIDITPKNSKNKVVLQSLKPWRTDVYFNKNTGKYEILGLKYSDLQFEKGTGTYKISQEKYNDIKKKEGVDSDSEFKFTLYKNDLLLVKDTETKEQQIFRFLSRTMPNVKYYVELKPYSKDKFEKNESLIEILGSADKSGRCIKGLGKSNISIYKVRTDVLGNQHIIKNEGDKPKLDF

SEQ ID NO: 18757 - protein, 1128 aa, unidentified
  REGION 1..1128: note = Cas Enzyme sequence
MNGLVLGLDIGIASVGVGILKKDTGEIIHANSRLFPAATADNNVERRGFRGGRRLTRRKKHRSVRLHDLFEDFGLLTDFSKVSINLNPYQIRVQGLDKRLTNEELFIALKNIIKRRGISYLDDASEDGGTVSSDYGKAVEENRKLLAQQTPGQIQLDRFEKYGQVRGDFTVVENGEKRRLINVFSTSAYRKEAERILRKQQEFNNKITEGFIEDYLTILTGKRKYYHGPGNEKSRTDYGRYTTKKDSQGEYITLDNIFGILIGKCTFYPDEYRASKASYTAQEFNLLNDLNNLTVPTETKKLSEEQKKTIIEYAKTAKTLGAATLLKYIAKMIGASVDQIHGYRIDPNKKPEIHTFEAYRKMQSLETIRVEELPRKVIDELAHILTLNTEREGIEEAINSKLKDIFSQDQVLELVQFRKNNSSLFSKGWHNFSLKLMMELIPELYETSEEQMTILTRLGKQKSKETSKRTKYIDEKELTEEIYNPVVAKSVRQAIKIINEATKRYGIFDNIVIEMARENNEDDAKKEYIKRQKANLDEKNAAMEKAAFQYNGKKELPDNVFHGHKELATKIRLWHQQGEKCLYTGKNIPISDLIQNRYKYEIDHILPLSLSFDDSLSNKVLVLATANQEKGQRTPFQALDSMDDAWSYREFKSYVKDSKLLSNKKKEYLLTEEDISKIEVKQKFIERNLVDTRYSSRVVLNALQDFYKEHQFDTTISVVRGQFTSQLRRKWGLEKSRETYHHHAVDALIIAASSQLRLWKKQNNPLISYKNGQFVDQETGEIISLSDDEYKELVFKAPYDHFVDTLKSKKFEDSILFSYQVDSKYNRKISDATIYATRKAKLDKDKSEETYVLGKIKDIYSQAGYDAFIKIYNKDKSRFLMYHKDPQTFEKVIEEILRTYPSREFNDKNKEVPCNPFEKYRQENGPIRKYSRKGNGPEIKSLKYYDNKLGNYIDITPNKSNNKVVLQSINPWRTDVYYNNKSKKYEFLGLKYSDLYFEKGTGKYKISKNKYDVIKKLEGVDEKSEFKFTLCKNDLILIKDVDTGQEQLFRFLSRNNKGKHQVQLKPIDKSDFEKGEKLIDIFDTVPNSTTQCVKGLNKPNISIYKVKTDILGNKHFIKKEGEEPKLKF

SEQ ID NO: 18758 - protein, 1055 aa, unidentified
  REGION 1..1055: note = Cas Enzyme sequence
MSDRPTILGLDLGAASIGWALLSARAEGDSWRPDGLVAAGVRIFQAGMEGDMDAGREESRAKGRRDARLARRQTERRARRLRTVFNALRNAGLLPTYPDLDASSSAGRHETILRFDQEIRESGRLDRLAETIGVHGAADKLPYVLRAAALDHPLEPHELGRALYHLAQRRGFQSNRRSPRRDDEEGVVLSGISQLRDDMARTSSRTIGEHLSRIDPHQQRIRARYTARAMLIDEFEAIWASQQRFHPSILTPELKKRIYHRIFHQRPLKSQSDKIGRCELEPKRRRAPWALLAAQRFRMLQSVNNLRVRNEYGVEYELTPEQRQVLIAELDRKKEVTFDRIRRLLKMPDVTFNLERGGEKRLRGNETNAILAKVFGDRWWEFDLDTRNAIVEDLVSIQKAETLERRGREVWGLDAEKAREFANTRLPDGHCRFSRRALAKLLPHLEEGLTTQLAVERAYPNHRLVGRAYELLPPVQQVLPDLSNPAVIRTLTELRKIVNAIIKRYGRPAEIHIELARDLRRSRDERQRLQSENRKQEAIRKAAAEEIRAFLNAEPSARDVERLLLAKECEFTCPYTGRKFSMAALFGPEPQVDVEHIIPFHMSLDNSFANKTLCFAEENRNVKRGRTPFEAYGNTPRWNDILERVRNFKSRLAGEKLYRFQLHGEELERWLSDFASRQLNDTRYASRLALRYLSLLYGGTADGVDPEGKRRITVVTGQTTAHIRNWLQLGSILNDAGEKTRDDHRHHAVDAIAIALTSQRTVQMLSIASRNQLLRKGRLYGDPEPPWPTFLEDVRKTISRVVVSPRVERRVRGALHAETYYSPRTEEGAKSPEGRYVHYTKPLADLSRSEVEKIVDPAVRRLVIEALGGGEPKDVFKDEGRLPRFVRRNGTTVPIRKVRIRAKVSVTPIGEGDRQRFVQTSGNHHLEVFEVTDAKGRTRWEGRVVSMLEAYDRVRKGLPVVNREYVPGSRFLFSLVGNPGGDVIELDEPDGTRGLYIVESIWMEGLHARVRIRPLNEANHRSGSPRIQPFVSVLGQRRCRKVCVDPLGNVTYAND

SEQ ID NO: 18759 - protein, 1071 aa, unidentified
  REGION 1..1071: note = Cas Enzyme sequence
LNGNLIDDDPRVKEIVMSDRPTILGLDLGAASIGWALLSARAEGDSWRPDGLVAAGVRIFQAGMEGDMDAGREESRAKGRRDARLARRQTERRARRLRTVFNALRNAGLLPTYPDLDASSSAGRHETILRFDQEIRESGRLDRLAETIGVHGAADKLPYVLRAAALDHPLEPHELGRALYHLAQRRGFQSNRRSPRRDDEEGVVLSGISQLRDDMARTSSRTIGEHLSRIDPHQQRIRARYTARAMLIDEFEAIWASQQRFHPSILTPELKKRIYHRIFHQRPLKSQSDKIGRCELEPKRRRAPWALLAAQRFRMLQSVNNLRVRNEYGVEYELTPEQRQVLIAELDRKKEVTFDRIRRLLKMPDVTFNLERGGEKRLRGNETNAILAKVFGDRWWEFDLDTRNAIVEDLVSIQKAETLERRGREVWGLDAEKAREFANTRLPDGHCRFSRRALAKLLPHLEEGLTTQLAVERAYPNHRLVGRAYELLPPVQQVLPDLSNPAVIRTLTELRKIVNAIIKRYGRPAEIHIELARDLRRSRDERQRLQSENRKQEAIRKAAAEEIRAFLNAEPSARDVERLLLAKECEFTCPYTGRKFSMAALFGPEPQVDVEHIIPFHMSLDNSFANKTLCFAEENRNVKRGRTPFEAYGNTPRWNDILERVRNFKSRLAGEKLYRFQLHGEELERWLSDFASRQLNDTRYASRLALRYLSLLYGGTADGVDPEGKRRITVVTGQTTAHIRNWLQLGSILNDAGEKTRDDHRHHAVDAIAIALTSQRTVQMLSIASRNQLLRKGRLYGDPEPPWPTFLEDVRKTISRVVVSPRVERRVRGALHAETYYSPRTEEGAKSPEGRYVHYTKPLADLSRSEVEKIVDPAVRRLVIEALGGGEPKDVFKDEGRLPRFVRRNGTTVPIRKVRIRAKVSVTPIGEGDRQRFVQTSGNHHLEVFEVTDAKGRTRWEGRVVSMLEAYDRVRKGLPVVNREYVPGSRFLFSLVGNPGGDVIELDEPDGTRGLYIVESIWMEGLHARVRIRPLNEANHRSGSPRIQPFVSVLGQRRCRKVCVDPLGNVTYAND

SEQ ID NO: 18760 - protein, 1424 aa, unidentified
  REGION 1..1424: note = Cas Enzyme sequence
MTQKVLGLDLGTNSIGSSVRNLDLSDDLKGQLEFFSSDIFRSSVNKESNGREYSLAAQRSAHSRSRGLNEARRRKLWATLDLLIKYGFCPMSPDSLMRWRTYDKQRGFFREYPIDDKDFNAWILLDFDGDGKPDYSSPYQLRRELVTRQFDFDQPIERYKLGRALYHIAQHRGFKSSKGETLLQQETNSKQSLTDETTDVAGEMKASEEKLSKGLSTYMKENKLLTVGAAFAQLEDEGVRVRNNNDYRAIRSQFQREIETIFKFQQGLSVENEFYGCLVSEKKNIGTIFYKRPLRSQRGNVGKCTLERTKPRCALGHPLFEKFRAWTLINNIKVRMPEEEQAEQLPMKLRFELYNDCFLAFVRAEFKFEDIRKYLEKRLGIHFSYNDKTINYKDSTSVAGCPITARFRKLLGEDWESFHVDGQKQRQAHGKNNTSFHTVSYSTNDIWHFCYDAEEPEAVLSFAQDNLKWEKKKAEELIRIWSAIPQGYAMLSQKAIRNINKMLILGMKYSDAVLLAKVPEIVEITDSEILSVTEDYHRVEAQVRYEKQINNIVNALIAKYKSASEEYRFADHNYEYQLDKSDEEEIVRQIESCLGTRKWGLMDADEQTDILQKVRDKYQNFFRSHERKFVESPKLGDCFEEYLVKRFPMVKGEQWKKLYHPSQIAIYRPVSAGMDRSALRLGNPDIGAIKNPTVLRVLNTLRKRVNQLLDDGVISPDETRVVVETARELNDANRKWALDTYNRIRHDENEKIKKILEEFYPKRDGISTDDIDKARYVIDQREVDYFTESKTYNRDIKKYKFWLEQGGQCMYTGRTINLSNLFDPNAFDIEHTIPESLSFDSSDMNQTLCDAHYNRFIKKNHIPADMPNYDKAVIIDGKEYPAITSQLQRWIDRVERLNRNVEYWKGQARRAQNKDRKDQCIREMHLWGMELEYWEKKLERFTVTEVTDGFKNSQLVDTRVITRHAVLYLKSIFPHVDVQRGDVTAKFRKILGIQSVDEKKDRSLHSHHAIDATTLTVIPSSAKRERMLELFAKIEEVNKMLFFSGNEDRTGLKQELDGLKNQLNKEVKACRIGHNVSEIGTFINDNIIVNHHIKNQALTPVRRRLRKKGHIVGGVDSPRWQTGDALRGEIHKASYYGAITQYAKDKEGKVLMKEGRPQINPTIKFVIRRELKYKKSSTDSGFASWDDLGKAIVDKELFALMKGQFPAETSFKDACEQGIYMIKKGKNGMPDIKLHHIRHVRCEAPQSGLKIKEQTYKSEKECKRYFYAAVGDLYAMCCYTNGKIREFRIYSLYDVSCHRKSDIEDIPEFITDKKGNRLMLDYKLRTGDMILLYKDNPAELYDLDNVKLSRRLYKINRFESQSNLVLMTHHLSTSKERGRSLGKTVDYQNLPESIRSSVKSLNFLIMGENRDFVIKNGKIIFNHR

SEQ ID NO: 18761 - protein, 1190 aa, unidentified
  REGION 1..1190: note = Cas Enzyme sequence
MGKKVLGLDLGVGSIGWCLITLDKDEKPQSILGMGSRIVPLSADDATEFTQGKAITKNKMRTVARTIRKGMDRYQLRREALKKVLREHAMLPDEALIKLPLLELWELRARAATPGEQLSLTELGRVLLHINQKRGYKHAKADEAAEAETNKGKETGYVAQVKGRYQILKEKGQTIGQHFAGELRANQQTAPRGVYYTYRIKEQVYPREAYIEEYDRIMAAQRVFYPELLTDALIGRIRDRIIFYQRPLKSCKQLVSFCEFEKKEKVIRVKHTNKEGVQELVEKTITIGPKVAPKSSPIFQVCKVWESIHNIRLYHLDGTERKLEQEEKQKLFDYLQRNDKLSLTVLRKELKIKPKDKLWCDKLLVNGIGGNTTATILRKALKGYEQYEGLLRFNLTTRDSHEVDEDGVIRPIIDESYQNEPLYKLWHILYSIEDRAEMRSALIGQLGIKAEDLDNGLMDALYKIDFVKQGYGNKSAKFICKLLPHLQEGKMYSEAAEAAGMRHSDSMTAQERDERNLLEEIPLLQKNALRQPVVEKVLNQMINLVNALKREHGEIDEVRVELARELKMSREEREKATKNNSSREKENKAIAERITEYGLTPTKSRIQKYRLWQESAESCIYCGKRVDVVQFLRGEETEVEHIIPKSILFDDSLSNKACACRSCNQEKGNRFAMEYIQAKGWEQDYIKRVDSLFHDKKISYSKRQRLLMLPKDLPEDFIERHLRLSQYIAREAQGILRKGIRLVSASEGGVTAKLRQLWGYDNILRDLNLERYRSMGETEVVTVEHRDGQRTDERIKDWSKRKDHRHHAVDALIVACTRQSYIQRLNRVNAEADRQEMDAFIKEQQEQKPSKKEKLSLLEHWLIRQPHFTTKEVMKHVEEILISFRPGKRTVTRGRNVYKRSGKTDVQRGVLIPRGALSEETIYGTIQLHRKDRSGTELVRSYVKRIPLSKVNPSNVKNIVDSQIREVVQAALLSLSGRKGVLPTELYLDDSRRRVVRSVRCLVRSSTLIPIRFNADGEAVGFTKPGGNHHVALYRDGVGNIRESVVPFFRAVERARYGIPMIISDPSKAREQARANPNLPESVLLSLPEEDWQLEEILQGDEMFLLGMTDEAIDRAMETKDYTTLGRHLYRVQNLAAGDYVFRYHLETTLDGKDNVGDIPSSYRIASQKRYQELNPRKVKIDLLGRISLA

SEQ ID NO: 18762 - protein, 1186 aa, unidentified
  REGION 1..1186: note = Cas Enzyme sequence
MGKKVLGLDLGVGSIGWCLITLDKDEKPQSILGMGSRIVPLSADDATEFTQGKAITKNKMRTVARTIRKGMDRYQLRREALKKVLREHAMLPDEALIKLPLLELWELRARAATPGEQLSLTELGRVLLHINQKRGYKHAKADEAAEAETESKAKKEKESYVAQVKGRYQALKEKGQTIGQHFAGELRANQQTAPRGTYYTYRIKKQVYPREAYIEEYDRIMAAQRVFYPELLTDALIGRIRDRIIFYQRPLKSCKQLVSFCEFEKKEKVIRVKHTNKEGVEELVEKTITIGPKVAPKSSPIFQVCKVWESIHNIRLYHPDGTERVLEQEEKQKLFDYLQENDKLSLTVLRKELKIKPKDKLWCDKLLVNGIAGNTTAAILRKVLKGYEQYEGLLRFNLTTRDSHEVDEDGVIRPIIDESYQNEPLYKLWHILYSIEDREEMRSALIGQLGIKAEDLDSGLMDALYKIDFVKQGYGNKSAKFICKLLPHLQEGKMYSEAAEAAGVRHSDSMTAQERDERSLLEEIPLLQKNALRQPVVEKILNQMINLVNALKREHGEIDEVRVELARELKMSREEREQVLSNNRKRKGKNETIAKRIAAEDITPTKARIQKYSLWEESGGRCIYCGNPVGVVQFLRGEEIEVEHIIPRSILFDDSMSNKVCACRSCNQEKGNRFAMVYIQTKGWEQDYISRIETLFKGKKISDSKRQRLLMLPENLPEDFIERHLRLTQYISREAQGILRKGIRLVSASEGGVTAKLRQLWGYDNILRDLNLERYRSMGETEVVTVEHRDGERTDERIKDWSKRKDHRHHAVDALIVACTRQSYIQRLNRVNAEADRQEMDAFIKEQQEQKPSKKEKLSLLEHWLIRQPHFTTGEVTKHVEGILVSLRPGKRTISRGRNIYKRSGKTDVQRGVLIPRGALSEETIYGVISVDGVDKVVCKYPLQSLKPKDVGYIVDEVLREKVRERISQYGEKQAFAEPLYLDEAKTQEVRSVRCFTGKDQSKLVPLRYNIEGEAVGFVAPGNNHHLALYKDDDGNVVESIVTFWQAVERARYGLPIVVVNPREVMEKALAIPELPESVLRALPASNLRLMEVLRMNDMFLIGMKDGEIQAAIEGEDYPTLSRHLYRVQKLATHDYVFRYHLETTLDGKDNVGEIPKSYRAQSLKAYVKLNPRKVKIDLLGRISLV

SEQ ID NO: 18763 - protein, 1058 aa, unidentified
  REGION 1..1058: note = Cas Enzyme sequence
MTNISTNPYSLGLDLGSNSIGWALIKLDENENPCGIEKVGVRVFKAGMEGLIEQGKEKSRCKNRREARLSRRQIERRSRRYKKLAGLLQKIGLLPEGDIRNSAERQRIFEDLDNELRKIYIDKNLPEKEKHLINQKFIYYLRSLAVEQELEPYALGRVLYHLGQRRGYLSNRKGQKEDDSEKGKVVKGIAEIRQEMIRLGAETLGRYFAKIDPTKQRIRGRWTARDMYEHEFYAIWNFQSKFYPDIFNKENKRRVFESIFFQRPLKSQKDKIGYCIFENVARGAIRNRRRAPWFILKAQYFRILQNVNNLTVRTNRKDVRSLTQDERRMLIDYLNQHREVTFNNVRKLLNLSDEYKFNFEKNKKGEAKLIGNRTAGSIYKIIGDKWDQMTPELKDKLVHDIYSIVDNRHLKKRLIKYWKFTEEEAEKLSNMPIEDGYCNLSRQAIDKLIPGLEEGKSFSTVAKEIYGVNKNTCGDVDLLPPLNEAPISIYNPVVKRVVSEMRKIVNELVKLYGKPRFIRIETARELKKNKKERQAIYESNEKRHNEREKIKEQLRSQGLSNPSEKDVDKYLLAEECGWVCPYTGKAISFRLLFFEPEFDVEHIIPYSRCLDNSMRNKTLCHVAENRSFKNNLTPYEAYGSMEEKYNEILSRVEKFNSQDKDEKLRRFKMNNEELEEFLDNFTSSQLNDTRYAARVAVDYCSLLYGDDWRKHIFTVSGGITHALRTMWKLNNILGNSEKNRIDNRQHAIDAIVIAMVSPRMVRSISEQSSKISVEEKRNKHWWNYIEPPWETLYNEAFDKVTNIIVSRRIDNKVSGRLHEDTLYSFPEKRGENEYVSRVRKPLSSITSNEVDDIVDPVVKELVIKKIEELGGEPNKIFKDPKNLPMLPNKNGDPVPIKKVRIFKKYRFLTIGQNERRRCVSVDENHHMEIFEIKDKKGKIKWDANVVTMFEAYRRRKCGEPIISKILVRDGEVVEDAKFLFSLQKGDIVYMKDSNGKYDYFYVTTIYECSGGYKGLILVPHFVSKKDKDYPNISKSVNKLFKEDAKKCVVDVLGCCTLR

SEQ ID NO: 18764 - protein, 1112 aa, unidentified
  REGION 1..1112: note = Cas Enzyme sequence
MNKKNILGLDLGTTSIGWALINTEDAEILGMGVRTFPEGINRDTKGAEISKNEDRRNARQTRRLFFRRRLRKNKVIRILRDLGLAPTDTNAFEEWKRSCPYTARYKSATEKADLYEIGRALFHIAQRRGFRSSRKGGTKEDSTIMKGNPQNLKTGIEETWHKVEQFGTLGKAMYDLLPKPGQPFELKERIRNRYTDRKMYINEFQTIWKIQQIHYPEILTPQIEELLGNKEKGILFSQRELRSQKFLIGKCYLEKNKTRCPVSSLVFERVRALQFINNIRYGVQQNKLNEEQRKSALQFFLKNNSAKKFDQLVRTLKLTNEQFNYDLETKLPLAETTASLMNLFTEKVWNVKTPKEQNDIWHIFFWAKDNWWLEKYATEKWDFSKEQIKKLGTVKIKTDYGSLSNKALTNILPFLEEGFLYHHAVVLGGVKNAFGEQWNNLTENEKSFLIHAILKKESDRKKEGQNIGDHQLIEETKLLLTQLYNLSEKQLTKLYHHSEQNYNDILKEFLPEPPQIRNPIAQKALCEVRKLMNEIIRTFGKPDIVKLELATELKKSKFEREEMRFQNYKNKNENDKAIKILLENGLADSRENRHRYLLWKELKTNEHGTPVCPYSGLSISLADLFDGNKFQIEHIIPRSRSLDDSFANKTLCEANLNREKGDKTPFEFFGSDLDNWKMMKKRAFKILPFNKARRFCEERQFTADDFIERQLNDTRIISKAAREFLLSVFRNVEVYPGRLTADLRHLWGLNNIINEKDDTKNRNDHRHHAIDALVIACTEVKFLQRLTKIYQKNNAIRAKEFPQPWEGFHENVKNIASNILVSCAQNRNLVTKASKIVRLNGKSIRVKSNAPRKQMHEETVYGRHIANDGNYYYHCNKNIDALTESMIEDIVDTNLKILIKNHLGYSPQQKVKNIPKNAFFDFDKTTQKKIPKLFLKNKRGNMVPIYSVRVKKVFNKAIQLKTGINQWVNPGANFITAIYKNNNILSGEVITFVEAVRRKIAGQEVAPKNSEKGNLILTLMINDMVLIGVNKNDLMNGEVDMQKISNNLYKVRKMSDTVIFTHHLISNINPDKQRTEIYPDGRRKVISISPSKMTDVVKVKIDLLGGISLIDL

SEQ ID NO: 18765 - protein, 1050 aa, unidentified
  REGION 1..1050: note = Cas Enzyme sequence
VFVALIFGFDIGTTSIGFAAIEFDANNQSGSIVRMGTRIFPEARDPDGTPLNQIRRTKRMMRRQLRRRRDRRRLLNETLAEAGLLPSFTSGDWASVMSVDPIELRNKGLNEPLTPIELGRALYHLAKRRHYQGRDLEDDGTGPELDSNDGEAADEKAARSSRETTVAALKASGQTLGQHISLLHQRDPKSRKRGVHALRHHIKDEFERLWSAQVPHHPALRDPNLKAHVSDVIFSQRPVFWRLNTLGKCRFEPEAELAAKGGWLSAQRRMLEKLNNLQITGGNARPLDDEERAAILATLQTQQSMTWGGVRGALKPIFKAKGLGTDTVRFNLELGGEPKLLGNPVEQKLAAVFGKDWDNHPHKAAIREATHSRLWAADYGKIGKQRVVIKRTQERAADRRKAAESFAADFGATAEQVNRLESLSFPTGWDAFSVSAIEKLLPELEAGRKMGELLNGPDYAKWRQTTFPRMEVPTGEIFDRLPSPKDKDEAARISQLRNPTVVRTQNELRKVVNNLIDYCGRKPDLIRVELARDLGKGKKEREEIQSAIRKQEKRRKEAAKDLQANGIVEPAPRDIEKWLLWKECQGKDPYTGDQIGFSELFLEGQFEVEHIWPRSRSLDDSFRNKTLCRKDVNQTKGNRTPFECFQNKPDQWDHVKLRLQGMIATRSGEGMSPGKVKRFLAESMPDDFASRQLNDTGYAGRQAISQLKRLWPDVGPTAPVNVQPVNGRVTAHLRKLWGLNHILGDTGEKNRADHRHHAIDALTVACTHPGVTNQLSRYWQIKDDPRQGGGESPHIAPPWPSIRADTERAVAEIVVSHKVRKKVSGPLHKETVYGDTGEDTQTKTGTYREFVRRKQVEVLTKGEYDDIRDPHIRKVMQDWLAEHGGDPKKINWKSYPCVSPKGPEIKRVRLLVRQQIRLMAPVSTGYADLGSNHHIAIYQRPDGKAEFEVVSLFEASRRLARREPIVQRERDGARFVMSLAAGDAVRFPPEHPKAGIKVVQGVWASGVVVLLDQQDSVGNSVWRPTASTLPGAACKKISVDPIGRIRPAND

SEQ ID NO: 18766 - protein, 999 aa, unidentified
  REGION 1..999: note = Cas Enzyme sequence
GTPLNQTRRTKRMMRRQLRRRRDRRRTLNEALHAAGLLPAYHSPSWQALISADPIALRIKGISEPLTPHELGRALYHLSKRRHFQGRDLETSETDEALDQTATADEKAARSGRDVTIAALKASGHTLAQYLNEFKPEDRKRGIHALRHYVRDEFERLWSTQAQHHPALANETLKSHIFDVVFAQRPVFWRLNTLGKCRLDPDGELAAKGGWLSAQRRMLEKLNNLEIAGGNARPLDDEERTAILTVLQAQQSMTWGGVRTALKPLFKARGLGTDTVRFNLELGGDPKLLGNPIEQKLLAVFGTHWNNHPHKDAIRAATHSRLWAADYGKIGQQRVVIKRAEERVSDRRRAAETFASDYGASADQVKALETLSFPTGWDAFSVSALEKLLPELERGTKMGTLLNSPDYVEWRQTHFPNREAPTGEIVDRLPSAKDEEEARRIAKLRNPTVVRSQNELRKVVNNLIDFCGRKPDLIRVELARDLGKGKREREEIQSAIRKQEKRRKDAAKDLQSKGIAEPSGRDIEKWLLWKECQDKDPYTGDQIGFSELFLEGLYEVEHIWPRSRSLDDSFRNKTLCRKDVNQTKGNQTPFECFQTQPDQWDAIKDRLQGMISSKGGVGMSPGKVKRFLAESMPDDFASRQLNDTGYAARQAIEQLKRLWPDVGPTSPVYVQSVNGKVTAHLRRLWGLNHILGDTGEKNRADHRHHAIDALTVACAHPGVTHFLSRYWQMKEAPRAFGGEGPSIPPPWPTIRQDAERAIAEVIVSHRVRKKVSGPLHKETVFGDTGEDTQTKTGTYREFVRRKSVTVLSPGEYDDIRDDAVRQVMKAWLADHGGDPKKIDWSTYPRLTPDGPQIKRVRILVRQQMKLMAPVSTGYADLGSNHHIAIYQRPDGKAEFEVVSLFEASQRLARREPVVRRQRQGAKFVMSLAQGDQIRVPKGDKHGNWTVKKLSGNGQVFLKEHNAATPAKVGLWGPNPNTFLSDGFFKISVDPIGRVRRAND

SEQ ID NO: 18767 - protein, 1059 aa, unidentified
  REGION 1..1059: note = Cas Enzyme sequence
MRYRLALDLGTNSIGWAVVLLDEQNPPQPVRLIRLGSRIYSDGRNPKDGSSLAAERRGPRQMRRRRDRYLKRRDRFMLALIECGLMPPFEAARKSLVPSNPYFLRRDGLDKALQPYELGRALFHLNQRRGFKSNRKTDRSAGKESGKIKLAIAAFREAMGDARTVGEALARRLDAGKSVRARLIGKGKEEHYELYVDRQWIEDEFDALWVSQRRFHPELLTDSAWGRLKGILTHQRPLRPVVAGKCFLEPDERRAPAALPSAQLFRLYQEVNHLRVETLVDRRERPLRRDERDSLVKTLAESPKKGFEILRKTLFGANREAFRFTLESENRKELKGCDTACKLARKEAFGAQWHRLSLEEQDELVLLLLDSENEAALQKALMERYGLGEAQARHVVGINLEEGFFRFSLKAIRKVLPPLRALWNDAENAPLTYDKAIIAAGYAAHTIQLPDVLLSALPYYGESLWRYTQDAPTARNPDERKWGRIANPSVHIGLNQLRKLVNALIEKYGPPSQVVVELARELKAGLEEKKRIRQAQAENTERNRKIRARLEEIGQRDNAENRLRLKLFDELEKPGSRCIYSGKQISLGRLFSNDCQIDHILPFSKTLDDGFNNKLLVHRDANKYKSNRTPFEAFGKSLDGYDWEQIVDRASRLPKDKRKRFELDAYESWLRHEADFLARQLTDTAYLARVAKQYLASICSGKQVYVSPGRLTSMLRGKWGLDRILAPYDENGELRSIKNRNDHRHHAIDAAVIGVTDRSLLQRVATLAGRAREVDTERLLANMPWPWDSYRLEVEEAIRRCVVSHKPDHGPEAALHNDTAYGIDEGPREDGKYLVHHRVALTALKPGDESRIRCETPLHEAICVALGQKEPKAREASLDALSARYGQRKVRYVEPMSVVTIRPRGKDGQSLPDSFPYKAYKGDSNYCYELFVNERGRWDGELITTFRANQKAYRKFSENKLRFRRETAAGRPLLMRLCVNDMVALEEGGVRRLMRVAQLSEGKIVLAEHFEGGPLRDRDRSAGDPFKYMTKSPGVLRELKARRVFVTLLGQVLDPGFRS

SEQ ID NO: 18768 - protein, 975 aa, unidentified
  REGION 1..975: note = Cas Enzyme sequence
VIYHICKHRGFHFPRKSEAESSEGGRVKQGLERTRELLRANSYRSLAEMMLEEYPVHQRNKRGDYGQSLPRELLADELKLLFSRQREFGNPHAGEDFEDEVLDPRNGLLWQQKPALTGEAMLNLLGKCTFERDQHRAAKHTWSAERFIWLGKLNNLRISIDGDTQALSEAMRDTVVDLPYRRVKVRYKDIKDVLVKNGLVAETMRFAGVRYPNQQADKPAKNPEETTLVEMKGWHTLRKALEKQALDDEWKHLSVDHDKLDRIVSILTICKSDEEIRVALSGVGLAGQAIEALLPVSFTAFVRLSLKALSKILLPMERGERYDEACESAGYQHSQPLPEQGKTRLLPSFYKGRDSNGKLLFDENLDLPRNPVVMRALNQARKVVNELIRQYGPPERVHIELARDLSRPLDERRKIEKEQKAYAERNQYLRDQYESEIGSTPKSREFEKWRLYHEQNGKCAYSLEPLDLAKVVDDPGYAEVDHALPYSRSYDDSKLNKVLVLKRENQAKGNRTPYEYLDGAGSSERWQKFEVVVKANPQYRQAKRDRLLRKHFGAEQAAEFKARNLNDTRYICRFFKNFVERHLQLAGDDRRCVVLNGQLTAFLRARWGLIKVRDESDRHHALDAAVVAACSHAMVKRLSDYSRTRELREVTSGFVDVDTGEVIDLVALRRLEAKFPQPWSHFREELEARLHIVDANALRDRVARLGTYDETAVLASRPLFVARAVKRRNGGAAHKETIYSQPEAFKPTSSATKKIALSALKAGDFAQLVDPQRNEKLYAALRKRFDEYGGKADRAFPPGYEFRKPDKQGNPTGPVVRTVTLRIDKITGVPVRGGIAENDSMLRVDVFAKAGKFFLVPVYVRDRATKVLPNRAIVQGRNEGDWTSIDGSFDWCFSLYPNDLLKVTLKDKVWFGYYAGCDRSTGALSLWAHDRNAQVGTDGLIRGIGVKTAVTLERFHVDVLGRIYRAKPEPRRELA

SEQ ID NO: 18769 - protein, 1073 aa, unidentified
  REGION 1..1073: note = Cas Enzyme sequence
MEKRNNGLVLGLDIGVTSVGYGIVNRETGEAVDFGVRLFSEWDPANNQNRRAKRSGRRLRSRRKNRLQDMKKFLVDQGMIPSDYAFCLDPYSLRVKGLSEKLTDEELATVLYNLAKLRGSSLETVEDTEEAKNDDVLSSKNNLRINDALIKSGKYVCQIQQERLTEKGKLRGHINNFRTKDYVTELKQILSNQGKSKDFNDYVENLIIRRRDFSDGPGSQKSPTPYGRWLTKDQEEPIDLIEKMRGKCSYYPDQLRCAKMAYKADLFNLLNDLNNLSVKGEKLEREQKEQVIEYVNEKGSIKPKQLAKLLGLSDIDDISGFRIDKSDKPILTEFKGYTKVKKVLENSGLYHDHELVDQIIDVLTRDKVVERRANEIRKLSNKFSEEEIEALANLTQISGYHSMSSKAINEFNKEMLISPLNQMQIITNRGNQNDRFNKLKGMKEIHADDTAILSPVAKRAQREAMKVVNRLRELYGEFDSIVVETTRAKNSQEQKTKIKESQAFFEKEKKRAQQIVDENKYNLTVNAKLIQKLRLYTEQNCKTAYALMPIDLDLLISDPTAFEVDHIIPISISYDDSFSNKVLVTRWENQIKGNLTPLQAHKNHKFGEYSDLASYIANVNDLRKMNGLRYEKKKNLLLSDEDLTKFDTQKKFIARNIVDTAYAERVVLNTLQDYFRANEISTVVNTVKGNLTHMFRNKIHLDKERSDIDTGDAHHAIDALIIASLKVFRRFGEILDKRPETIIDEETGEVLEIIEDKKFFDPRYIEIVHKLSLIEKDVTKFSYKIDTKPNRQVADETIYSTRNINGEDLVVKKYKNIYEEKFVTLANDILENNVEKYLMYRNSPETFKYISDIILHYAKEYRDDEKLMKNGLFVKNPLNRYYEEHHEYLHKPSKHNNGPAIISMKYTDGRLGNKIDISKNYSLDTEKKKVVLQQISPYRTDFYYSPTEGYRFVTVRYSNVYYSSIQGLYVIDKDWYEFQKKVKKIDDSFEFCFSMHRNEIIRIKKEDEDMMWRFTATNNDKTNQIEVKPIGYKINKQLMPAIGKKILLLEKYATDICGNLYKVTNQELKLEFK

SEQ ID NO: 18770 - protein, 1073 aa, unidentified
  REGION 1..1073: note = Cas Enzyme sequence
MEKRNNGLVLGLDIGVTSVGYGIVNRETGEAVDFGVRLFSEWDPANNQNRRAKRSGRRLRSRRKNRLQDMKKFLVDQGMISSDYAFHLDPYALRVKGLSEKLTDEELATVLYNLAKLRGSSLETVEDTEEVKNDNVLSSKNNLKINDALIKSGKYICQIQQERLSEEGKLRGHINNFRTKDYVAELKQILSNQGKSKDFNDYVENLIIRRRDFSDGPGSQQSPTPYGRWLTKDQEEPIDLIEKMRGKCSYYPDQLRCAKMAYKADLFNLLNDLNNLSVKGEKLEREQKEQVIEYVNEKGSIKPKQLAKLLGFSDIDDISGFRIDKSDKPILTEFKGYTKVKKVLENSGLYHDHELVDQIIDVLTRDKVVERRANEIRKLSNKFSEEEIEALANLTQISGYHSMSAKAINEFNKEMLISPLNQMQIITNRGNQNDRFNKLKGMKEIHADETAILSPVAKRAQREAMKVVNRLRELYGEFDSIVVETTRAKNSQEQKKKITESQAFFEKEKKRAQQIVDENKYNLTVNAKLIQKLRLYKEQNCKTAYALKPIDLDLLISDPTAFEVDHIIPISISYDDSFSNKVLVTRWENQIKGNLTPLQAHKNHRFGEYSDLASYIANVNDLRKMNGLRYEKKKNLLLSDEDLTKFDTQKKFIARNIVDTAYAERVVLNTLQDYFRANEISTVVNTIKGNLTHMFRNKIHLDKERSDIDTGDAHHAIDALIIASLKVFRRFGEILDKHPETIIDEETGEVLEIIEDKKFFDPRYIEIVHKLSLIEKDVTKFSYKIDTKPNRQVADETIYSTRNINGEDLVVKKYKNIYEEKFVTLANDILENNIEKYLMYRNSPETFKYISDIVLHYAKEYHEDEKLMKNGLFVKNPLNRYYEEHHEYLHKPSKYNNGPAIISMKYTDGRLGNKIDISKNYSVDTEKKKVVLQQISAYRTDFYYSSTEGYKFVTVRYSSVYYSSAQGLYVIDKDWYESQKKVKKIDDSFEFCFSMHRNEIIRIKKEGEDMMWRFTATNDDLRNKIEVKPIGYKINKQLMPAIGKKILLLEKYATDVCGNLYKVTNQELKLEFK

SEQ ID NO: 18771 - protein, 1168 aa, unidentified
  REGION 1..1168: note = Cas Enzyme sequence
MKGCVLGIDVGVASVGAALIEVDVVNGVLHYRGIIDGVSHIFPAADGAAERRLQRSIRKRYQRQTHRLKDLRGYLSNLFAVPPGFDDVLPDAGQAYIAACKAAGEPAILSANSRFRLRALALEQKLTPGDLARTILHVAKNRGMRLTRVLESGKDDKGEKQARAEASGMAQEAEQTRSLMVESKATTPGSFLWQREQDATKGNQRPALRNRKGRDGGFLFTRQQIEAEFDTLLAKQAEFYPDILTADVMETLRVRVFWEKDAPEPEIGPCLYFPDRERRLPEASDLFQRKRIYEQVNSLLVKFSNESKERLTPDQRDRLIAELMTGKDLGGSEIKKILELDKGRKLSLDAGYGKRKDAVKIKGHRLAHEFAKVPELQAVYADLTPERRESLVELLRKERDREIVVRSLCDDFGLSPVAAGDAVEEVILPAGYAATGPTATRLLFETLRDEVMEDGPNAGRVMFPYDAEQWLDQKQGFQKAGAQVVAASRLPYYGKVFPHLVRGRMKPEDRGYPAATNEEKFGRIPNPVVHVALNRIRKVVNALLARHEKTHGLPLRVHVELAREMSMSEEEREAYARQTTKQHKQNSEDDREIVRNGGIAGRKARRMLRLAREQGWKCPYSLKQIEVNRLFQDFDLDHILPRSQTLDDSLGNLVVAWRDANRVKGQQHPHKAFGDGKDYKRDDGVLISHEQMIENIRNTKGMAHKAWRFGPDAMERYADDNDFTERFLNDTRYIAKWVAQYLQCIIRPDSSGKTKPVVALNGRVVGDLRYGWGLKDMVEQIALDQEPDGYKADAKQGTGKKNRDDHRHHLLDAIVAALTPPRLVQILKIEAKRQAEANNGRIGQLTPPHPWEHFAQDIRLFLAESRASHKPDRNINAGLHEATCLGVVARLGDGSYLVRNRKRLVPGMVVDPKKLEDAICLPERYINALAKGLKDGSAHVFWPSRDPVGDLKRIATDLKDVHQAIMALYDQQPETETVVRDAGEPDASTQTRVIKPEERLGRAIARYVDQTGRRTVRVYGMSQAVIVAENDNGVPSRSYRAGNNAWLDVYRGADGKTVYEIVRNIDAMKPGFTPQWQEDPENTALLRLYQGDTVELTDKEGQRRICVFRENSDGDWSFQPVNLALNVRDTPLRSRLRFSFNRLLQADPRLIVVDAAGQVVWRSPKRNW

SEQ ID NO: 18772 - protein, 1168 aa, unidentified
  REGION 1..1168: note = Cas Enzyme sequence
MKGCVLGIDVGVASVGAALIEVDVVNGVLHYRGIIDGVSHIFPAADGAAERRLQRSIRKRYQRQTHRLKDLRGYLSNLFAVPPGFDDVLPDAGQAYIAACKAAGEPAILSANSRFRLRALALEQKLTPGDLARTILHVAKNRGMRLTRVLESGKDDKGEKQARAEASGMAQEAEQTRSLMVESKATTPGSFLWQREQDATKGNQRPALRNRKGRDGGFLFTRQQIEAEFDTLLAKQAEFYPDILTADVMETLRVRVFWEKDAPEPEIGPCLYFPDRERRLPEASDLFQRKRIYEQVNSLLVKFSNESKERLTPDQRDRLIAELMTGKDLGGSEIKKILELDKGRKLSLDAGYGKRKDAVKIKGHRLAHEFAKVPELQAVYADLTPERRESLVELLRKERDREIVVRSLCDDFGLSPVAAGDAVEEVILPAGYAATGPTATRLLFETLRDEVMEDGPNAGRVMFPYDAEQWLDQKQGFQKAGAQVVAASRLPYYGMVFPHLVRGRMKPEDRGYPAATNEEKFGRIPNPVVHVALNRIRKVVNALLACHEKTHGLPLRVHVELAREMSMSEEEREAYARQTTKQYKQNSEDDREIVRNGGIAGRKARRMLRLAREQGWKCPYSLKQIEVNRLFQDFDLDHILPRSQTLDDSLGNLVVAWRDANRVKGQQHPHKAFGDGKDYKRDDGVLISHEQMIENIRNTKGMAHKAWRFGPDAMERYADDNDFTERFLNDTRYIAKWVAQYLQCIIRPDSSGKTKPVVALNGRVVGDLRYGWGLKDMVEQIALDQEPDGYKADAKQGTGKKNRDDHRHHLLDAIVAALTPPRLVQILKIEAKRQAEANNGRIGQLTPPHPWEHFAQDIRLFLAESRASHKPDRNINAGLHEATCLGVVARLGDGSYLVRNRKRLVPGMVVDPKKLEDAICLPERYINALAKGLKDGSAHVFWPSRDPVGDLKRIATDLKDVHQAIMALYDQQPEAETVVRDAGEPDASTQTRVIKPEERLGRAIARYVDQTGRRTVRVYGMSQAVIVAENDNGVPSRSYRAGNNAWLDVYRGADGKTVYEIVRNIDAMKPGFTPQWQEDPENTALLRLYQGDTVELTDKEGQRRICVFRENSDGDWSFQPVNLALNVRDTLLRSRLRFSFNRLLQADPRLIVVDAAGQVVWRSPKRNW

SEQ ID NO: 18773 - protein, 1177 aa, unidentified
  REGION 1..1177: note = Cas Enzyme sequence
MSRNVILGIDVGVASLGACIVEVDDAVRPVAFLDGVSFIYPTPDGAAERRGHRAMRRGYRRKRNRLQDLRAYLVETLKIAADFDGKPDGIKDPAFTDIAAGNDTLRDDKGHRLISPNSRTRLRALGLSEALSATDLARAILHIAKNRGMRLTRVIGTSEEDEKARKEASVMVEQARATRREMAAKNAQTPGMMLWLREQAAPAPHQRHPLHRRVGTSLALQFVRSQLEDELDALLAFQQQFHPALDAEMCRTLHEKVFFEQEPPRPEIGRCLYNPETEERLPLACDLFQQKRIYEEVNNLRIEYADASREKLTFDQRDTLVARLMAGEDLGVAQIKKLIGANERGLRLSLEGQAGRNTGPARKLLGHAIRRTLKEADARFAKTDAQASRMVALYDALDDEHRPLFEKLLRDEDDRDRMVTALMRDYGVAGLEAENVADGIALPHGYAAAGLTATVEILERLKAEIIDSNSAADRAGLVPATAREIACKRLPYYGEVFPHLVRGRMNPETRGYPAATIEEKFGRIPNPVVHVALNSLRKVVNALVKKGEKQGWVFKRVQIEMAREMKKTQEDRDKDSRRIAREQAKNAEYDAITLAHQKPASRKNRRKLKLWEAQNRMCPYTGLSIDVADLFSGKFDIDHTLPRSKTLDDSLYNLLVIHENVNKKKGNKSPYEAFSGGLDVEGVPQRSYEQIVENVRRIPGIRHKEKLFRPDAMDRFEDQDAFAQRYKTDTSYIAKTAKQYLQCVFPHLRPTGGVEAINGFITDDLRKRWGVMDLVQQVAHQQDPDLVEAPPTKEERADGTKRGKNRDDHRHHLLDAAVTACTPRDVVQKLQIISASRAKHDMAERYRVPLPWADFRDDLYELIDQARTTHRPNRELNGKLHMATNLGVVARFADGRYLVRQRKRFDSGEFSSLEDLKKKLVVDSALIARLEKDMTAGQAVLFWAAREPLADLQRHHEMLGDIAGNIERLFALQPTEATYEDIDRKTGTVEIRTRKVKEDERLAAAFAAYRDECLTRGLSPRRTVRLYGLDEAVMIAGGDVGKLPSRTFKPGSNAWLDIFRDGAGKPGFEVVRTIDAMRPGYVPHWQQYDSNDLLLRLFKGDTVRLRSKDGKTRLCVLATNSPGDWEFQPLNLSSHISRHPARKNFRFGFKALCDADPQLVVRDVLGRIVYETSRLNW

SEQ ID NO: 18774 - protein, 1080 aa, unidentified
  REGION 1..1080: note = Cas Enzyme sequence
  REGION 503..506: note = misc_feature - Xaa can be any naturally occurring amino acid
MEHAQLNFSYALGLDIGMASVGAAILADDHIHALHVRTFDKAETAKEGESLNLIRREARLTRRRIRRRAFRLLRLRRLLKREGLIASFEPADFADVTSPWASPWNWRAEGLERKLEPTEWAAVLYHLVKHRGFQSNRKSEVAEDEKAGQMLSGVSANQVRMKAGGWRTMGEMAARDEEFATAKRNKGGAYTHTFARADLEDELRELFAAQRQHANPHSSPEFEAAVHELLMARKPTLSGENLLKMVGKCTFEPSEYRAPKASHTAERFVWLTRLNNTRITGLGVTRALTDDERQALINLPFTQTKLTYKQARKAANLNEHERFIGLAYRADKDPESAVLFEAKAFHKLSKAYKDAGLKTEWARDAVNPERLDTLAFAQTAYKDDREAREYLAQQGIESAIIEAVLHVSFSDFVRLSLKALRKIIPHMAAGMRYDEAVLAAGYQHHSDLNQAKTKTRRIPRINKEDFPNPVVYRALNQARKLVNAIIDEYGAPAAVHIELARDXXXXKPWDERKQIERDQKTFRDNKEKAAEKFRELFGQSPKKDQLDKLRLYDEQDGKCAYSLTPLDLRRLDENGYVEIDHALPYSRSFDNGMNNKALVLTHINRDKGNQTPYEYLGGAHDDPRWHAFEIAVRSNKKIRQAKRDRLLRKDFSETEATGFRERNLTDTRYIARAFKTLVETHLQLSDDSTAKRCVVVSGQLTAFLRARWGLLKVRADGDLHHALDAAVVAAASHSMVKRLSDHSRHNELAEVRSQFVDPVTGEVADINALRQLEAHFPSPWPHFRHELMAWLNPNPALQLEHLPDYPKQYLRFAHPIRVSRAPLRRGLGQAHQETIRSAKWLDEGLSSVKTPLENLKLKDIERIVGWDDPRNAKLIAAIRERLETHGDDGKKAFKEPFYKPSKPGKIAPIVRSVNLTDTQKSGLPVRGGIANNGSMLRVDIFTDGKKFYAVPLYVADSVKPLDALPNRAVVAAKPEDEWTVMDEDKGYRFLFSLHPNDWVRVQQKGKPMIEGYFGGAHRGTGAITIWAHDRNQNVGKDGAVEGIGIKTALSIEKFHVDMLGRLYLAKAETRQALRRINKGR

SEQ ID NO: 18775 - protein, 1637 aa, unidentified
  REGION 1..1637: note = Cas Enzyme sequence
MSGNSAIPFEKKKLYRGLTREQVNSLGPLVFGFDIGPASVGWAVVAPQSECIVATGSHVFPQAEDERGRTNNQARRGARVARNRYATRKWRLKLLRDVFAGLGMLPLPYLDSSGRLIDPMCSRPQQRNSSDTTSPFALRARAWTETAILPTDDWARLLYSIVASRGYSYQQEVDEKAKNSEGESNSAEAKDREQYGAAVTSSKSFYEQHKETYGTLGNLIFHAVEDSKKPGEERKFSGNPFARSHKNRDGEYRFLAKRDWLVDEVRALFKRRDEQQNDPEPLLVPDTSRAAGEALKRICEPDGRTDAPITLCDFVVYLIYAQKPAILAANLEQTIGECELERSRIIDGKPFKGELRAPKNCFSNERRTWLQELNHLRIKQEGRDDPRLSERERELIVNLPYEREKVRLSDIRMQLADAGFPQNYRDASFNRATYRLRPKAASTKISLLADGVVSKKLSDFVKTSPKEARKTYTELLLTGGATFSDVRKALNVPESHRFSTAETNECVIAPDDETNAKLCIVGEPGAYEFQGGKHLDLLMDEKPLTKKSAGKYWGRLFGSAVSGLVVTLAEIRKTMIGGDKVTKPWVFRIRTENSSTLANEQETTATFPLEYEDPQTAEDEVLITMHGWHALRKNISAVDAVYWESLCDGYKVAANETDEVLAKTRSDKANLLDGIGTALTQFQSANEIRGELQRLAIPAPVADSLIKIAFSGYRNLSLKAIYKLLPSLESGENYTQAVESVYGKLTPDRTPKRFLDPLEQFEFKRHRFYLNAAETRDTGHRDKRYRDLANPVVARSFNRARAVLNALVANFGSPAYIAVETSRDLARSKKLRDKIAKEQEDNREKNHRAEVKAKQLILSKSGREAAPSKEHILKVRLCQEQDDKCVYTGVPINVEDVAARAADYQIDHIWPQSRTMDNSQTNKVLVHIGANQNKLNQTPYEWFHSGHGPKRSWEEFKTFVHQFNGLSPQKKERLLATAIDEKEFYARNLVDTRYVTRLFAKMLRDGLLFKDENTGAHVADAVHVITSDDAGADRIEHFHKARVRMPQGGLTATLRKGWKIPKDRDAGDLHHALDACVIAVTTPSLIQKVNNFHRLRETCEDRDGVTYLKNRDGSSRVIADAQRYFPAPWGTIKGGEFRAQLLARLSHDGHSFFTPAGEARQFEYPKYPDFLRQVIAPITVTRLIAKKSSGGEAHSMNPTALRLQSIRLTELTARLLEVRRYGSWFEEGNRILFAALATHLQRHQGDALAAFPNGAYTTDSGDTVFVVRVPLVCLEADELKALGIAANASAMKALTVTYEKISLDKLKLGAVETWVARGQELRQKSSGETGSNGKAAFTTTTTSSPTASNGPSPMDEFCMRNLELLRAIRDRLIDVENLGTKAQQKMALAKGIRKPETTDISKRHSRLQSDATFEPPMVRGIRVPSTKGNSGAIVRGGLVDLGDALCVDVYRPNGKFEFVPRYLMTNNISVRDSLDTDAALGNRHTRLHKGVRIRIEHQRLASIFRIIANGTDEHGNQFFDVEPMFAQGIFEGYFAYYEPTNTRPVLALHDRSKFAWPADGYPPERTRQRLFAVNITKSRKNVVEKSKEIWQTANDRDAQALDRHFTINKEVKIKVDDAKTLDVVDIDILGQSRVVLP

SEQ ID NO: 18776 - protein, 1125 aa, unidentified
  REGION 1..1125: note = Cas Enzyme sequence
MSGNPSSDQPPFQRKKLKRGLTQEQIDSLGPLTFGFDIGIASVGWAVLSETRIVDLGVRCFDAAEDPKTGESLGERWRTQKVARRRLHRRVDRLKALRRLFVQEGLLAKPDATLLAAPPTETRQVNLQTPWALRSRGLDERLEPIDWARVLYHLVKRRGFLSTRKAERVERSATTANAKEKQGLLAGVAATARMLQVDGERRYRTLGELAFKSEAFYMAKRNKAGAYSRSFDRNLLLDEIKTLFDAQRKLGNTHTSDGFHGQVCQLLMYQRPAVTGEAMLKLMARCTLEPSEYRAPRNSYSAERFIWLGKLANLRIVQNGERRELTPGERALAVAMPYENKSGKITYKQLRNHLGLGTSPQIGFAGLSYGSKRNKKGEAVDPEEATLIQLRGWPALREALLDANLKESWEKLSVNPAQMDRAAYALSVYQTDDELRPALSALDFSPTEVEALLTIDFKGFIALSSKALERILPHMELGLRYDEACDRAGYNHAQPQAASRSHGRLPKFSYEDIRNPVVFRALNQARNVLNALIDVYGSPARVHVELARSLSKSFEERRDIQRDQETYKKSREEAEKMFREHFAGRSPNPRNQDLLKYRLYREQDGKCAYSLAAIDLERIVEPGYCEVDHALPYSRSFDDSMSNKVLVLTKENRDKGNRTPYEYLGGANDSAAWRAFEACVVGNKQYRKAKRDRLLRRNFDDMSAEGFRNRNLNDTGWVVRLFANRVRDNLRFAPGRDGQVAEQPVLTPSGGFTSFLRTRWGLHKDRESSDLHHAQDACVIAAATPALIKRVSDYNRKRETLEILPGGAIVDVTTGEIKKDAKAHFPEPWSHFRDEVLARLSNDPSKAVSLVSSAYGADVLAHMQPVLVSRAVKRRAGGAVHQDTVRSVKPHLGPQTSSKRTRLTDLNIAKLDQIVGAQDLRNAGLMHVLRSRLEAFGGDGKKAFSPSQPPVHKPRRDGTDGPVIRTVQLKDVQKGGVPVRGGVADQASMWRVDVFEKSGKFYLVPIYQSDRIRGNPLPNKAATANTDRERWTTIDETFRYCFSLQANDFIHLITKKASTQGYFSGLNVHTAAINVTVHDRAAAVAKAGVFEGLGVKTGVASFEKYLVDTLGQRFSCRSEIRRDLA

SEQ ID NO: 18777 - protein, 1125 aa, unidentified; identical to SEQ ID NO: 18776
  REGION 1..1125: note = Cas Enzyme sequence

SEQ ID NO: 18778 - protein, 1131 aa, unidentified
  REGION 1..1131: note = Cas Enzyme sequence
MNTQTPINGASERVTSGPYSLGLDIGIASVGWALLGQEHIIDLGVRAFEKGETAKDGDPLNLQRRTARLMRRRLHRRAWRLKQLARLLKRHGLIDSPKHFLRQPGYTDSTWHLRVQGLDRLLTAEEWARVLYHLCKHRGFHWSNRAEEHKAATDNKSEGGRVKAGLASTQQRMQTKGYRTAAEMVLAEFPEAQRNKQGQYDKALSRVLLGNELALLFQAQRNCGNLHASEALETALRGTDTQRGGLFWQQKPALAGKDLLKMLGHCTFEKQEYRAPKASFTAEMHVWLTRLNNLRVVVNGESRALTEPERQAVLWLPHQSAEKFTYKHLKRELIRLGHWPDSARFGGLSYPSTERPEATKAKDPEDQILLKLPGWHELKRTFKAHQITAEWDALSTSAIQGEPNALDDIAWILSVYKDDAEVETELRKLKLPDAVVQALLTLRFDKFSNLSLKALRRIVPLMQTGLRYDEAVAQVPEYGHHSQPAKANQRQLPYLPSFYLPQRKYQHKTDRVGSMVFNPDLDVPRNPVVLRALNQARKVVNAIVRKYGAPSAVHIEMARDLSRPLDERRDVEKLQQEYRDRNRQERERFEEEFHRKPKSQEFEKWMLYREQQGKCAYSLVGLDLDRVINDPNYVQIDHALPYSRSYDDSKNNKVLALTRENQNKGNRTPYEYLDGASHSEQWQRFVAWVETNKAYRQAKRSRLLRKNFDDKEAESFKERNLNDTRYICRFFKSHVEEHLQLATDSPNKRCVVVNGQLTAFLRAKWGLIKLREESDRHHALDAAVVAACSHGMVKALADHSRRKELAYLREGIPDPQTGEITTPSAHRQLANNFPEPWPHFRHELEHRLKTDDAATLREEMARLGTYSPGALNALRPLFVSRAPQRRTLGAVHKDTIYGQPEYLKQNGTVSQKVPLTSLSLKDLDKLIDPHRNVKLYAAIRQRLEAHGGKGEKAFAADNPLHKPDKHGNPTGPLVKAVTLTDKLTGIPIRGGVAKNESMLRVDVFTKVGKFHLVPVYVHHRVSGLPNRAIVAFKDEAEWTLMDDSFEFLFSLHPNDLVRVTLKDSCQTGYFSGCDRSTGAISLWAHDRHKDIGKDGLIRGIGVKTAISLEKFNVDVLGHIYPARAEQRHGLA

SEQ ID NO: 18779 - protein, 1090 aa, unidentified
  REGION 1..1090: note = Cas Enzyme sequence
MRYAIGLDVGIESVGYSVLELNSYDTPRRIESLGVRIFDRAEHPKDGSSLAAPRREARGARRRLRRHRHRLERIRGLIISSEILTKDGLESLYDGELSDIYELRTRALDELVSAEDFSRILIHLAQRRGYKSNRKSEVSNEESAGKILTAVSANKKLCEEKGYRTIGEMFYRDERFSEYKRNKNDDYSTTIDRQSVEDEARMIFKSQRVKGAKFADEKIETAYLDILLGQRSFAEGPASGPYSGNQIQRMRGMCTFEADEFRAAKASYSFQLFNLWQHINHIRLIRGGETIALNDDERKLIFELAHEVTELNYAKIRKHLKISDEYNFAGIRYEQGKSAEAEKKSKIKDLEVFHKIKKCVTAVSSNGFEELTHEQLDAIGEALSKNMSDDDILKALEEAKICRPISEALLELPNLSKFGHLSVKACRKIIPFLEKGCTYDKACEGAGYNFNSVKKELKVYLPPVSKNDTEITSPVVKRAISQTIKVINAIIRDMSGVSPVYINIELARELSKNYNDRNKIRKSQDENAKKNEELMEQLKEYGGTPGGHDIIKMKLWNEQDGRCMYSGETIEIGRLTEPGYVDVDHIVPYSICFDDRLVNKVLVLSKENRQKGNRLPLQYLQGKKRDDFIVLVNQSHLKSEKKRRLLMEKISDESEWKQRNLQDTQFISSYLRRYIDENLMFAPFYDNRKRHVMAVNGAITSYVRKRWGINKVREDGDLHHAADAVVIGCISQGMVNRISNYTYYKETKDNGDYVINEETGELETRFPTPWKHFTDELNIRLTQNKKSLQKMLFDVNYDSYSDVDIEEIRPLFVSRMPNHKVTGSAHEATVKSGRLEEVGYTVSKVSLTKLKLDKNGEIQGYYNPDSDKLLYEALKKRLLEFDGNGEKAFGNIAFYKPKSDGTQGPLVKKVKVEDVSSNMVKVQQGSGVASNDSMVRCDVFYVENDGYYFVPIYVADTVKAELPNLAPIAGKDSNGQKKKKVMKAEDFMFSLYRNDLIRIYSKSTITVNKVNQKSTLPEKMTVPGEEGLFLYFSGMDVSVAFLSGITHDNTYKHRSIGKTTLCIEKYDVDVLGNVRKIEKEERKDFLNRKR

SEQ ID NO: 18780 - protein, 1200 aa, unidentified
  REGION 1..1200: note = Cas Enzyme sequence
MQSKHNFGKLTFGFDIGIASVGWAVLNEKRIVDLGVRCFDKAETAKEGESLNLARRNARLLRRRLRRRAWRLTKLARLLKLEGLINDINVLKQPPSKGAATPNLWQLRVDGLNRKLSSEEWARVIYHLCKHRGFHWVSKAEKLKADGDAVGETGKVKKGLAATNALIREKGYRSAAEMVLAEFPDAQRNKQGEYSKALERELLDGEFKKLFEVQRSLDNPHTSQALEEKLLDRKTGLFWAQKPSLSGEALLKMLGKCTFEKSEFRAPKASFTAERHVWLTRLNNLRLVVDGTMRPLTEDERRLVIDLPYNQAGYLKYKQLKSVLIKQAGLPETTRFTGLSYPSTSQLESGKLKDPEDNVVVKVPAFQELRKTLKDGLETEWQGLINAAMAGDASLLDQMAWVLSIYKEDDEVERELNKLNLPSKAKMVDALLGVRFDKFSNLSLKALYKIVPVMEQGKRYDEACLEAGYHHSQLDKADDIKQEYLPPFYSARDNTGKLIFNESLDIPRNPVVLRALNQVRKVCNALIKKYGSPYQVNIEMARDLSKPFDERRKIQTEQEAFRDRNQAMRKTFNETFNTTGELKGRDFEKWQLYEEQQGKCAYSLQPLDVHRLFDLGYVEIDHALPYSRSFDDSKNNRVLVLANENRNKGNQTPYEYLDGKSNSPRWHEFTVWVNSNKAYRQAKRNRLLKKEFGEKDAQEFRDRNLNDTRYICRFFKNYVEQYLQLHEESEAKRCVVLSGQMTSFLRNRWGLSKVRSDSDRHHALDAVVVAAATHGMVKRLSDYARRKELAKVSQGFVDVTTGEVPDIAMFNQLNEHFPSPWENFRHELEARLKQDDIEQLRNHCEKLDSYTADDLAQIKPLFVSRAPQRRNSGAAHKETIYGKPKAQQVLLVADKEAQKQSGADKVTRVATIKEKSELAIQTLGVMDKDTSGNYKFTFDKLDALVDLHRNQWMINALRIWLKDRDVRDKRAKEIENSLGKGKSKRDLSEEEKQELLYLRGLPRKPTKADPENGPFTGPIIRSVKVNMGKTSGITIRNGIAENASGSMLRIDVFKKDGKFHLIPVYVHHQVSKELPQYAIVANKNEDEWTLIDHTYDFCFSVYPNDLVKITQRSGETIFGYYRSCHSGTAALSIALHDRYAYGEKTTSLSLFKKNPNKALPNDKLGLIESVGVKIAANFEKFNVDVLGNIYPVQKETRGLA

SEQ ID NO: 18781 - protein, 1074 aa, unidentified
  REGION 1..1074: note = Cas Enzyme sequence
VNTSDKKRSRQYVLGLDIGIASTGWAVLNSADGSTVDGIIDLGVRTFERGETAKEGESLNLARRLARGTRRRLRRRAHRMLRLKRLLLREEMIKHEHLDECGNIKFSADPWCLRSEGLDRLLTPFEWAEVIYHIIKHRGYLSTRKADKNDTDDDTGKVLVALKAMNERLQNGGWRTIGEMAYKDDVEFGHSIRNKQGDYRHCFDRKMLMKELQLLAVKQREYGNPHTNDAFVDQITTLLMQQRPALSGKNLLKMLGKCTFEKHEYRAPRASYSAERFVWLSKLNNLRLLNSDRSRRALSAAERRAIIDMPYERSTVKYAQVRKVLDLPDDVLFVGLRYRDDKNAENEKLIELKGWHKLKKTLTNAGLNTEWQGIATRPDELDKLAYALSVFKDDKEITDYLRAEGFDDAIIDALLPISFSKFSHLSLLALRKLVPHLEAGMRYDEACAAAGYNHSLPVHIDQSDLLPPINPEDVRNPVVLRSLSQARKLVNAIVREYGQPLRVHIELARDLSKPKSERNRIEREQKKWRDHKEGLVKEYVENLGTEPSGKDLLKYRLYKEQNGKCAYSLQPLMLDRLTEAGYADIDHILPYSRTFDDSLNNKVLVLGKENRNKGNKTPWEYFGSSDEQHWLLYEAWVKSNPGFKQAKRNRLLKRSLTAEDQQDFRERHINDTRYIARYLKNFVEQNLQLSAGAQRVRVVSGSLTSFLRVRYGLIKHREESDLHHAMDAVVVAAATNSMIKRLSDHARFDELNRVKVAGFVDPETNEVLDNSTLRKLEQQFPAPWPHFRLELEARLKPDPQRALQGIEGWRHRDVSGVRPVTVSRAPRRGVTGPGHAETIRSAKRLDEQISYTRVPLSKLTLPMLEKIHGRERDKPLYEALKTRLAEHNGKADKAFAEPFYKPAASGKQAPRVTAIKIEATQKSGLPIRNGVADATSMVRVDVYRKNNKFFLVPVYAWQIETGEIPKQAVIQGRAKNEWELMDENAEYIYHFQYDDLIEVDTGKAVRFGYYNGLNISTGAIDIETHDLNAQVGKNGVFESVGVKTAKTLKKYQIDVLGRYWPIAKENPPWAGAAS

SEQ ID NO: 18782 - protein, 1100 aa, unidentified
  REGION 1..1100: note = Cas Enzyme sequence
MNDGLIVATALTPIGYRSTIQGVKGKVNTSDKKRSRQYVLGLDIGIASTGWAVLNSADGSTVDGIIDLGVRTFERGETAKEGESLNLARRLARGTRRRLRRRAHRMLRLKRLLLREEMIKNEHLDECGNIKFSAAPWCLRSEGLDRLLSPFEWAEVIYHIIKHRGYLSTRKADKNDTDDETGKVLVALKAMNERLQNGGWRTIGEMAYKDDVEFGHSIRNKQGDYRHCFDRKMLMKELQLLAVKQREYGNPHTNDAFVDQITTLLMQQRPALSGKNLLKMLGKCTFEKHEYRAPRASYSAERFVWLSKLNNLRLLNSDRSRRALSTAERRAIIDMPYERSTVKYAQVRKVLDLPDDVLFVGLRYRDDKNAENEKLIELKAWHKLKKTLTNAGLNTEWQGIATRPDELDKLAYALSVFKDDKEITDYLRAEGFDDAIIDALLPISFSKFSHLSLLALRKLVPHLEAGMRYDEACAAAGYNHSLPVHIDQSDLLPPINPEDVRNPVVLRSLSQARKVVNAIIREYGQPLRVHIELARDLSKPKSERNRIEREQKKWRDHKEGLVKEYVENLGTEPSGKDLLKYRLYKEQNGKCAYSLQPLMLDRLTEAGYADIDHILPYSRTFDDSLNNKVLVLGKENRNKGNKTPWEYFGSSDEQHWLLYEAWVKSNPGFKQAKRNRLLKRSLTAEDEQDFRERHLNDTRYIARYLKNFVEQNLQLSAGAHRVRVVSGSLTSFLRVRYGLIKHRKESDLHHAMDAVVVAAATNSMIKRLSDYARFDELEHVKVAGFVDPETGEVLDISTLRKLEQQFPEPWPHFRHELEARLKPDPQRALQGIEGWRHRDVSWIRPITVSRAPRRGVTGPGHAETIRSAKRLDEQISYTRVPLSKLTLQMLEKMHGRERDKPLYEALKTRLAEHGGKADKAFVEPFYKPAASGKQAPRVTAIKIETTQKSGLPIRNGVADATSMVRVDVYRINNKYWMVPVYAWQIEKGLIPRDAVIAYKPRCQWELMDENAEYLYHLQYDDLIEVDTGRAIRFGYFNGLNISTGAIDIEAHDLNAQVGKNGVFESVGVKTAKSLKKYQIDVLGRYWPIEKEVPPWAGAAL

SEQ ID NO: 18783 - protein, 1074 aa, unidentified
  REGION 1..1074: note = Cas Enzyme sequence
VNTSDKEISRQYVLGLDIGIASTGWAVLNSDDGSTVDGIIDLGVRTFERGETAKEGESLNLARRLARGTRRRLRRRAHRMLRLKRLLLREGMIKHDQLDTSGNIKFSADPWRLRSDGLDRLLTPFEWAEVIYHIIKHRGYLSTRKADKNTSDDDTGKVLVALKAMNERLQNGGWRTIGEMAYKDEVEFGHSIRNKQGDYRHCFDRKMLKKELQLLAVKQREYGNPHTDDAFVGQITTLLMQQRPALSGKNLLKMLGKCTFEKHEYRAPRSSYSAERFVWLTKLNNLRLLNSDRTRRALTAAERRTIIDMPYVRSTVKYAQVRKILDLPDDVLFVGLRYRDDKNAENEKLIELKSWHKLKKMLTDAGLKTEWQGIATRPDELDKLAYALSVFKDDKEITEYLRAEGFDDAIIDALLPVSFSKFSHLSLLALRKLMPHLQAGMRYDEACTAAGYDHSLPVNIDQSELLPPINPEDVRNPVVLRSLTQARKVINAIVREYGQPLRVHIELARDLSRPKSERNRIERDQKKWRDHKEGLVKEYVENLGTEPSGKDLLKYRLYKEQNGKCAYSLQPLILDRLTEAGYADIDHILPYSRTFDDSLNNKVLVLGKENRNKGNKTPWEYFGSSNEPHWLLYEAWVKSNPGFKQAKRNRLLKRSLTAEDQQDFRERHLNDTRYIARYLKNFVEQNLQLSAGAQRVRVVSGSLTSFLRARYGLIKHREESDLHHAMDAVVVAAVTNSMIKRLSDYARFDELEHVKIAGFIDPETREVLDISTLRKLEQQFPNPWPHFRQELEARLKPDPQRALQGIEGWQHRDVSWIRPITVSRAPRRGVTGPGHAETIRSAKRLDEQISYTRVPLSKLTLPMLEKMHGRERDKPLYEALKARLEEHGGKAEKAFAEPFYKPAAPGKQAPRVTAIKIEATQKSGLPIRNGVADATSMVRVDVYRKNSKYWMVPVYAWQIERDIIPRHAVNAYKRENEWELMDETAKYLYHFQFDDLIQVDTGKSKIAGYFNGFDRSTGAIHIEVHDRNLNQGKNGLFRGIGVKSAKSLQKFQIDVLGRYWPIDKEVPPWAGAAS

SEQ ID NO: 18784 - protein, 1125 aa, unidentified
  REGION 1..1125: note = Cas Enzyme sequence
IMESRYTLGLDIGIASVGWCLLGENRIIDLGVRAFDKAETAKEGDPLNLTRRMARLARHRLAQRAWRLKKLTRELKRHGLIDDTRFFQPTNPVTTSPWQLRVQGLDRKLETDEWARVIYHLCKHRGFHWVSRADKKKSEGDAKGEGGRVTAALNDTSKRIDGYRSAAEMVIHEFLKPAQTDNGLPLLDKIGQPIPSGAARNKRGEYTKALSRVLLGDELKQLFAEQCRLGNPLASESLETAILGNGDRKSGLFWMQKPPLSGAALLKMLGKCTFEKGEFRAPKASFTAERHVWLTRLNNLRIVVDGETRPLDAEERAIALPLPYKQAKELTYKQLHSALVKSGRLPETFEFAGLRPTKDGKDPKSERLVKLPAWQELRATLKAAGLETEWESLAGAAGRGQPQILDEIARVLSIYKDDDEARAELNKLALPNREAMVEALLDIRFDKFHALSLMALYKIVPRMEAGLRYDEAVAAIPEYGHHSQLHKPGEGASRTLPPLYAGRDPDGRMRFAEDEDIPRNPVVLRALNQARKVVNAIVRRYGSPMAVNIEMARDLSRPLDERNKIRKEQEDYRARNEKDKAFFAEEFGQAPKGGEFEKFRLYREQLGKCAYSQEGIVIERLLEAGYVEIDHALPYSRSFDDSKNNKVLVLAKENRDKGNRTPYEYLGGEENSFRWQQFVAFVESTKSYRLAKRSRLLRKDFGAKEAEDFKERNLNDTRYICKFFKNYVERHLKLADGSEAQRCVVLSGQMTAFLRARWGINKIRSESDRHHALDAAVVAACTHGMVKRLADYSRTKELAQVHTGFVDTTTGEIVDPAIFRQLKQHFPEPWPHFRHELEARLKIDNPALLREEMTHLGTYDTTALDEIRPLFVSRAPQRRNGGAAHKDTIYGQPEKLRENGSVTQKVPLTSLTLKDLDKLIDPHRNARLYAAIRERLEAHGGKGDKAFPPDNPLRKPARAGKPTGPVVRTVTMLIDKLSGIPVRGGIAKNDSMLRVDVFTKAGKFHLVPVYVHHKVAGLPNRAIVAFKDEAEWTLIDDSFAWCFSLYPNDLVQITLKSESHLGYYAGVDRSTGGVSLWAHDRNHSVGKEGLIRGIGVKTALSVEKLHVDTLGNIHPAKSEPRRGLA

SEQ ID NO: 18785 - protein, 1103 aa, unidentified
  REGION 1..1103: note = Cas Enzyme sequence
VVGNNKNLTFGFDIGIASVGWAVLAPDRIVALGVRAFDKAETAKEGESLNLARRSARLMRRRLYRRAWRQTKVARLLKREGLIANTDYFHDQQPALISPWQLRVEGLDRLLTPEEWARAIYHLCKHRGFHWISRAEEKKAGEDAKGEGGKVKQGLASTGRMMREKGYRTAAEMVLSEFPDAQRNKQGNYDKALSRVLLAEEFDILFQRQHALGNPHTGEALRTAILGNGDRKSGLFWLQKPALSGDNLLKMLGHCTFERTEYRAPKASFTAERHVWLTRLNNLRIAVDGVTRPLNEQERRIALPLPYNQAGDLTHKQLRAALVKAGVLDDAFRFAKFPYAQSADGKAKDPESAVLVKLPAWQELRKLLKDKGLETEWQGMAGAAQAGDPELLDRIAWVLSAYKDDAEVEHELGKLTLPGGKAMIDALGEVRFDKFSNLSLKALRKIVPHMEAGLRYDEASEAAGYHHSQLFKMGEGEERYLPPFYSGRDKNGRMVFNDDMDIPRNPVVLRALNQARKVMNALIREYGSPASVHIEMARELSKPFDERRDIKKEQDEYQKRNQEDKTRFAEHFGQMPKGQEFEKWRLYREQQGKSVYPSMTDEQGICAYSLTPIDLNRLLEPGYVEIDHALPYSRSFDDSKNNKVLVLAKQNRDKGNATPYEYLDGANDSERWRRFVAYVEGNKAYRLAKRTRLLRKNFGAEEAEGFRERNLTDTRYICKFFKSYVERYLKLADESESKRCVVLSGQLTAFLRARWGLIKIRSDSDRHHALDAVVVAACSHSMVKRLSDYSRRKELEAVRDGFIDLATGEIVNHAMHRQLKEHFPDPWPDFRNELEARLYKDDPAQLRIAVEGLGTYSPDTLDALKPLFVSRAVQRRQGGALHQDTIRSARLLDQGQSHVSVQLQKLKTSDLDNIVGASDPRNSTLIELLRMRLAEHNGDGKKAFAEPIYKPSAPGKKAPQIRTVKLASTQKSGMHVRGGVADLGDMLHVAVYRHVRKHLIEPVYAADKEIRVASSCIPDDAEFLFYLTKNDYVRITLGDICHEGYFVMYESDGRMTLRAHDQPKPDKEYFRKGVASATQIEKYHVDILGNLYSAAPEKRRDLA

SEQ ID NO: 18786 - protein, 1142 aa, unidentified
  REGION 1..1142: note = Cas Enzyme sequence
VLRWRYSTEHLAHTKNKRPDRQACRAGFSTPPEGGYFIAATALTPESYNDVILIKKDGGMQKENRPYTLGLDIGMASVGAALLLPETQRILSLYVRTFDKAETAKEGESLNKIRRDARLIRRRIRRRAHRLVRLARLMKRYGLIESATPESFALPDVSPWGLRAEGLDRLLEPKEWASVLYHLVKHRGFQSNRKSEAKADEKAGQMLSGVSRNQALLKETGYRTMGELAAKHETFMDAKRNKGGAYTHTFARADLEAELALLFERQNAFGCRIASADFYAAVHELLLARQPTLSGANLLKMIGKCTFEKSEFRAPKASYRAERFVWLGKLNNLKIVGGGDARPLSDAELRIIIDLPFTQAKLTFKQVRKALDLEAHQRFNLLSYRFDPKGKDKDPEESTLFEAKHFHTLRKAYEAAGLKTEWQRDAINPDRLDALAYALTCYKDDTEAHDWMAAQGIESQIIQAVLGDSFDQFIQLSQKALKAILPHMEAGQRYDEAVKSAGYNHSQPDAATVKQKSLPAPDKDIIRNPVVYRALNQARKLVNAITAEYGPPAAVHIELARDLSKPYDERKKIEREQKEFQVEKEKAFADFEDRFNFRPKGQDLQKWRLFREQLDQCPYCQQALEVDRLFEPGYAQVDHALPYSRSFDDSMNNKVAVHTKCNQDKGNRTLYEAFDGASDSEHWQHFEAWVQSNKAIRQAKRNRLLRVNFGAEEAEEFRDRNLNDTRYICKEFKRMIETHLAWHPDSTADNRCVVLSGQLTSLLRARWGLIKVRAEGDLHHALDAAVIAATSRSLIKRMSDYSRREELEQVRNRYIDPETGEVLDISALRQIETDFPKPWPHFREELLARLAANPSQQLERLANYDEATRESIHPVRVSRAPTRRGLGGAHQETIRSIGKAGKLLAGGQSAIKTPLASLTLKDIDNIVEQRDTALIEAIRERLTAFGGDGKKAFAPNQPPLRKPSGEGKTAPIIRSVKLLTTQKSGIPIRGGIANNGAMLRVDIFTKAGKFHAVPVYASDAVKAELPNRAVIQAKPEEEWTLMDETYKFLFSLHPNDWVTIRLKNEVREGYYSGLNRATGNIDLWLHDRNQTQGKKGMLEGNGIKTALAVEKYHVDFLGGLHRVHHEERQPINRKTGVKHELA

SEQ ID NO: 18787 - protein, 1516 aa, unidentified
  REGION 1..1516: note = Cas Enzyme sequence
VEGNNKNLTFGFDIGIASVGWAVLSESRVIDLGVRCFDAAEDKDGKPNNQTRRGARVSRNRYRMRSWRLKRLVRLFRDAGMISSDEIKLLIGDQHPKKYKIRSPWELRSLGLSKQLTPYEWAQTIYHIVKHRGFKFYSKIEDPTAVNGPDNQPVGSTATQEQKEFGALKDGLEFTTGLRRKYPQFKTIGNIAWHLANAPQDRDGIYRGPDGEALDIKDCEDFQESFRNKNKSYRHAFHRDDLRDELTVLFDTQKAKGNSFTNYPMPDRANLLDNVQIGSQERTVERNFRDQVFALFELQHPPIYTAQMDALIGRCELEENKLRAPKHCFSNERRTWLETLNHLRIKPSGGKERELSDAERTALIDLPYTLSKVTFKQARDVLREKTGFPMHWREASFTKVSYASKRKNDGSWINVVSADGSRTVLGKYGDEKTRKDANKMLKIQLEAGAISYAELRSLYQVNDGDTFEEQKRDEQVILPSLESQYAIPFDALDNKQAFIKILPAKATKSTTLAKFSKKAMNVLATLRTKKPGATLSDLRLAMEQTETHEIGWQFEFSKKTSIGIQPDHEQSTQIPIEYEDAQAAEAETLIEMKGWHAMRRELESAHSAWWNELQAAWCNASATGEVAKTAATSAANMLDAVAEVLTKAQTDADIRTGLTAIELTSDQAVSLLSTKKIFKDYRNLSLTAIRKILPFLEQKKGYSEACSLAGYKQQTHQRTRHLPPLETYLYERIRHGKKTGYSERRYKDLNNPVVARAFNQARVVLNALIDKHGSPAYVHIELARDIARPLKGRWSGGKYIEGRLDIKRRQDESRNKRKAIRENFSENYKINAPTEQQMLKERLYHEQQSKCAYTLQKLDPNRVVDDENYAQIDHIWPRSITFDNSLDNLVLVHAHANQDKGNRIPFDYINSHPRFGANESLRAEHWRQVQAHILSCKGMADGKIKRLLATELDSEEFLARNLVDTRYTTRLFARMVRDRLLFEGQFEDRTEDIDPSESGKKRLEKFHKTRVRTPQGGVTAFLRRAWLGNIKDREASDKHHAIDACIVAACTPSLIKKVNDWFAHQERAPNQFSRNADGTYTDRRTGETKISKQEARERGLYLIPPDGFRDEFKSKYEQLVVSRAVQKKRNNELHDANPIGHRHYPVKLTDLTQEIFDRIRLPPDLPITRINLIDSVREHFLSCNGDANTAFRHGFKTKNAEGKDKVIHTLPLPLVALPDTFIAKEKQYLPHGSTENFLDTAIKNVPLTSLTLKKLDEKELGTAFYNRNKRMVESIKEQIRKFDGDAEKAFVAPFYPFGPSRPPIKSIRLPAPRGSGIHVRGGASNLGDALYTEMYRYNGTYWFRPRYKISEEASFGLPVMPRGAQHVCNFRKNDFVRIKHPNMAHCYRETRRYRNTNGDTIIEVSAISLDGVFEGYWNYFEPSNDRPVVQLHDASTFFLLEDGKTLKSQSLLLIAKSKAKKAKTKGIDELEYFEFGDVQQDRPLKFSQVRDIKRKVGDAAFIEKVKIDVLGVIDGR

SEQ ID NO: 18788 - protein, 1103 aa, unidentified
  REGION 1..1103: note = Cas Enzyme sequence
MEIRYTLGLDIGIASVGWCLLGENRIIDLGVRAFDKAETAKEGDPLNLTRRQARLARHRLAQRAWRLKKLTRELKRQSLIDDKRFFQPANPVSISPWQLRIKGLDRKLERDEWARVIYHLCKHRGFHWVSRAEEKQAAGDTKSEGGKVKQGLAGTKRLMEEQGYRSIAEMVLAEFPEAQRNKRGEYTKALSRVLLGDELKQLFAGQRRLGNPFANESLETTLLGNGDRKSGLFWVQKPPLSGAALLKMLGKCTFEKGEFRAPKASFTAERHVWLTRLNNLRIVCAGETRPLNAQERALALPLPYRQPKELSYKQLHDALTKSGLLPETFEFAGLRPGKDGKDPKSEKLIKLPAWQELRSTLKAAGLETEWEGLAGEACRGQPQILDEIARVLSVYKDDDEARAELNKLPLPNREAMVEALLDIRFDKFHALSLKALYGIVPQMEAGLRYDEACVEAGYHHSQLHEPGEGTSRTLPPLYAGRDPDGRMRFAEDEDIPRNPVVLRALNQARKVVNAIVRRYGSPMAVNIEMARDLSRPLDERNKIRKEQEEYRARNDKDKAFFAEEFGQAPKGGEFEKFRLYREQLGKCAYSQEAIDLARLLEPGYVEIDHALPYSRSFDDSKNNKVLVLAKENRDKGNRTPYEYLGGAENSPRWLQFVAFVESTKSYRLAKRSRLLRKDFGAKEAEDFKERNLNDTRYICKFFKNYVERHLKLADGSDAKRCVVLSGQMTAFLRARWGINKIRSESDRHHALDAAVVAACTHGMVKRLADYSRTKELAQVHTGFVDTTTGEIVDPAMFRQLKQHFPEPWQHFHHELEARLKIDNPALLREEMTHLGTYDTAALDGIHPLFVSRAPQRRNGGAAHKDTIYGQPEKRREKGSVTQKVPLTSLTLKDLDKLIDPHRNARLYDAIRERLETHGGKGDKAFPTDTPLRKPDRDGEPTGPVVRTVTMLIDKLSGIPVRGGIAKNDTMLRVDVFTKAGKFHLVPVYVHHKVAGLPNRAIVAYKDEGEWTLIDGSFDWCFSLYPNDLIKIKLKNASYLGYYGSCNRSTGAINIWTHDRNTNCGKDGMIESIGVKTALSLEKLHVDTLGNIHPAKPEPRRGLA

SEQ ID NO: 18789 - protein, 919 aa, unidentified
  REGION 1..919: note = Cas Enzyme sequence
KELALLFEKQQEFGNPHASSALQTAILGNGDKKSGLFWQQKPALAGADLLKMLGTCTFEKSEYRAPKASFTAERHVWLTRLNNLRIVTDGVTRQLTEQERQLCLPLPYQQAGDLTYKQLGTALTKAGLLEAGSFKFTGLAYPTEARKAEGKAKAPESATLIKIPAWQELRQTLSKAGLDDEWKKLSGDALSGQPEIFDQIAWVLSVYKDDDEVRTELAKLPLPNRDALIDALLNIRFDKFHALSLKALRAIVPPMEKGLRYDEACVEAGYHHSQLHKVGEGKHKYLPPLYAGRDKDGRMRFAEDADIPRNPVVLRSLNQARKVLNAIIRRYGSPAAVHIEMARDLSRPLDERNKIKKEQDEYQARNQRDREQFIELFGHLPKGLEFEKWRLYREQNGQCVYSQKPLAPSGNVAEIFLEGSTEIDHALPYSRSFDDSKNNKVLVLTRENRDKGNRTPYEYLGGAENSERWQRYVAFVEANKAYRLAKRTRLLRKDFGTKEAEEFRERNLNDTRYICRFFKNYVEQHLKLAEGSEAKRCVVVSGQLTNFLRARWGLLKVRSDSDRHHALDAAVVAACSHSMVQRLSNYSRTRELEQVRDGFIDIETGEIVNPAMNRQLHEHFPDPWPCFRYELEARLKIDSPELLREEMARLGSYSEEELAALKPLFVSRAPQRRNGGAAHKDTIYGHPEKFKEKGSVSQKVPLSSLTLKDLDLLADPHRNTKLYGAIRERLEAHGGKGDKAFPASNPLRKPDKNGNPTGPIVRTVTKVIDKLSGIPVRGGIAKNDTMLRVDVFTKAGKFHLVPVYVHHRVTGLPNRAIVAFKDEEEWTLIDESFEWCFSLYQNDLVQIHLKKESFLGYYTGTDRSTGAVSLRAHDRNQAVGKDGLMRGIGVKTAVNVEKFHVDTLGNIYPAPPEKRRGLA

SEQ ID NO: 18790 - protein, 1128 aa, unidentified
  REGION 1..1128: note = Cas Enzyme sequence
VGILAEEGKNMQSKNQPYTLGLDIGIASVGWCVLGEEHILDLGVRAFDKAETAKEGDPLNLTRRMARLMRRRLFRRAWRLKKLTRLLKRHGVIENGKLFEPDRPAPISPWQLRVEGLNRLLNKEEWARVLYHLCKHRGFHWISRAEAKKAEEDKSEGGKVKQGLAATQRLMNKKGYRSAAEMVLAEFPEAQRNKQGEYSKALSRLLLADELALLFQQQRTLGNPHASEALQAEILGNGDRKSGLFWAQKPTLSGADLLKMLGKCTLERGEYRAPKASFTAERHVWLTRLNNLRIVVDGITRPLNAQERAIALPLPYQQAKELTYEKLGKALVKAGLHETGSFKFAGLSYPSEKQKAEDKAKDPESANLVKMPGWQELRATLKKAGLETEWEGMAGAAISGQPELLDQIAWILSVYKEDVEVEAELQNLPLPNKAKMVEALLDIRFDKFHALSLKALRQIVPHMENGLRYDEACQQAGYHHSHLHKAEDADQKFLPPFYNGRDRDGRMVFRDDEDIPRNPVVLRALNQARKVVNALIRKFGAPMSVHIEMARDLSRPLDERRSIEKEQKEYRERNDKDKAEFCRQFNIVGTPRGGDFEKWRLYREQQGKCAYSQEPIALERLLESGYVEIDHALPWSRSFDDSKNNKVLALTKENRDKGNRTPYEYLKAIDGCENGARWRQFVAFVETTKAYRQAKRNRLLRKDFGNKEAEEFRERNLNDTRYICRFFKNYVERHLKLAEDSEAKRCVVLSGQMTAFLRMRWGLLKMRSDNDRHHALDAAVVAACSHCMVQRLSNYARTKELAQVRQGFVDPETGEIDNPAMYAQLHEHFPDPWPHFHRELDARLKIDDPALLRAEIERLGSYTAADLDELRPLFVSRAPQRRNGGAAHKDTIYGQPQGLKEQGGVTQKVSLASLTLKDLDKLIDPHRNEKLYAAIRERLEAHGGKSDKAFPPTNPLRKPDRDGNPTGPMVRTVTTVIDKLSGIPVRGGIAKNDTMLRVDVFTKAGKFYLVPVYVHHKVKGLPNRAVVAFKDEDEWTLIDDSFSWCFSLHPNDLVRVKLKNESHLGYFSGCDRSTGAINLWAHDRDARIGKDGLIRGIGVKTALSVEKFDVDVLGNLHPAKSEKRRGLA

SEQ ID NO: 18791 - protein, 1118 aa, unidentified
  REGION 1..1118: note = Cas Enzyme sequence
MRIKHDFGPLTFGFDIGMASVGWAVLNATQIVDLGVRCFDKAETAKEGESLNLARRMARLTRNRLRQRAWRLTKLVRVLKKAGLIEGKETLYAPRPDLDNPWVLRVNGLDRKLTVDEWARVIYHLCKHRGFFWQSRAEEKKAEGDAKGEGGKVKQGLARTRALLADKGYRSAGEMVLNEFPDAQRNKRGDYNKALSRVLLGDEFRLLFNRQRELGNAYATADLEKELIGTAEHRSGLFWLQKPALSGEKLLAMLGKCTFEKNEYRAPKASFTAERHVWLTRLTNVRLIDDGRTRSLNEIEWRTALTLPYESPEKFTYKHLRKVLVKLGASESFRFAGLAYPSARQRDEGKAKDPEIETLVKLPAWHELKAAFKKAELESEWQQISTAAIEGDPKTLDEIAWILSVYKEDDEVVRELSKLNLPNAEKMIDVLLDIRFDKFHSLSLKALRNILPHMERGLRYDEACIKANYHHSQLFKLGEGNQKYLPSLYKGRDKKKRMIFNEEIGDIPRNPVVLRALNQARKVLNALVHTYGSPTAVHIEMARELSKPFDERRDIKKDQDEYRALNQKDKSTFASEYNIVGSPRGGDFEKWKLYREQMGKCAYSLATIDINRLLEEGYVEIDHALPYSRSFDDSKNNKVLALTRENRNKGNKTPYEYLDGSSNSERWRQFVGFVESNKAYRIAKRSRLLRKDFGLEESKEFRERNLNDTRYICKFFKNQVEQFLKLHDKSEQKRCVVLSGQLTSFLRARWSLIKVRDESDRHHALDAVVIAACSHSMVKRMSDYSRRRELRQVSEGFVDVTTGEIPNPVMYDKLKEHFPDPWPHFRDEVQVRLKIDDTKLLREELARFGSYAPEVINQINGVFVSRAPQRRSGGAAHKETVYGQPEQLKKAGSVTEKAALSSITMKDLERAIDPHRNEKLYAAIRARLEAFNGKADKAFAIDNPLHKPDKSGEPTGPVVRTITLVIDKLSGVPVRNGIAKNDTMLRVDVFTKAGKFHLVPVYVHHRATGLPNRAVVAFKDEDEWTQIDASFAWCFSLYPNDLVRVVQKGKEAIVGYYGSCHRGTGNINMWSHDRSNATGKSGAIDGLGVKTAVSLEKFHVDVLGNIFPAQLEPRRGLA

SEQ ID NO: 18792 - protein, 1074 aa, unidentified
  REGION 1..1074: note = Cas Enzyme sequence
MQTRNLPYTLGLDIGMASVGAALLLPDQQRVLALHVRTFDKAETAKEGESLNKIRRDSRLTRRRIRRRAHRLLRLARLMKRVGLIADTRPEGFAIPGTSPWLLRAEGLDRLLAPKEWACVLYHLVKHRGFQSNRKSEAKADEKVGQMLSGVVLNQTLLKETSYRTVGELAARHEAFSDSKRNKGGSYNHTFARSDLDSELRVLFERQRALGNCCADQAFQDGVRDLLIAQRPTLSGSNLLKMVGRCTFEKSEFRAPKAGYRAERFVWLSKLNNLKIVGGSDPRPLTDGERSIIIDLPFTQAKVTFKQVRRALDLNAHERFNLLSYRADLTGKDKDPEDAPFFEAKSFHTLRKAYEGAGLKKEWQRDALDADRLDHLAYALTCYKDDAESRNWLMTQAIEAPIIEAVLAESFDRFIHLSTKALKAILPYMEVGQRYDEAAKSAGYNHGQPDADIGKHSALPAPDRQTIGNPVVYRALNQARKLVNAIVTEYGPPAAVHIELARDLSKPHDERREIEKGQKEFQVLKQRLTTAFEETFCRTPGGQDLLKYRLFREQLDQCPYCQKALAVDRLFEIGYSQIDHALPYSRSFDDGMNNKVVVHVACNQDKGNRTPYEFLDGATNSERWQRFVAWVQTTKGIRQAKRNRLLRVNFGAGEASEFRDRNLNDTRYICREFKRMIETNMRWHPDSSADNRCVVLSGQLTSLLRARWGLVKVRDEGDLHHAMDAAVIAAAGRSLVQRMANYSRRKELDAVRNRYVDPETGEIIDIASVRRVELDFPKPWPHFREELLGRLSPQPRLRLLGVPGYDDQAREGPRPIRVSRAPTRRGLGAAHQETIRSIRGNSLSAVKTPLRDLKMKDLKDIVGFERDTALIDAIRSRLEAFGGDGKKAFDDKQPPLRKPSKDPAKAPVIRSVKLLDTQKSGIPIRGGIANNGAMLRADVFSKGRRFHVVPVYAADAARADLPNRAVVAFKPEEEWTIMDESYKFLFSLYPNDWVTIRLSNEVREGYYSGIDRSTGGVDLWVHDRNRSRGEKGLLRGNGIKTALAVEKYHVDFLGKLHRVHKEDRQPVNIPRAKG

SEQ ID NO: 18793 - protein, 1119 aa, unidentified
  REGION 1..1119: note = Cas Enzyme sequence
MNDKKNLGPLTFGFDIGIASVGWAVLSPTRIVDLGVRCFDKAETAKEGESLNLARRSARLMRRRLRRRAWRLIKLARLLKHEGLIADTKTFIQPSASHASPWQLRKDGLDRALSPEEWARVLYHLCKHRGFHWVSRAEARKADGDTKGEGGKVKQGLASTTKLMNDKSYRTAAEMVLAEFPSAQRNKRGEYTKALSRELLDNELKQLFERQREYGNPHADTNLEAKIRGSGDHKSGLFWEQKPALSGNDLLKMLGKCTFEKQEYRAPKASFTAERHVWLTRLNNLRIIVDGRTRPLADAERTMALSLPYEQVGDFTYKQLRAALVKAGLMPDSFKFASLAYPSEFQKAEGKAKDPESAALTKLAAWQELRATLKKADLESEWQQISCAALEGQPETLDEIARVLSVFKDDDEVLNELQKLGLPGGAKTENALLDIRFDKFHALSLKALRKIVPYMERGLRYDEACERAEYHHSQLHKVGEGNRKYLPPLYKSRDKDGRMVFNDELGDIPRNPVVLRSLNQARKVLNALIARYGSPSSVHIEMARELSKPFDERMKVGKEQEAYRERNEKDKQTFVAEFGIVGAAKGGEFEKWKLYREQQGKCAYSIQGIDLNRLLEPGYVEIDHALPYSRSFDDSKSNKVLVLAAENRNKGNRTPYEYLDGEHNSERWRQFVGFVESNKLYRQAKRSRLLRKDFGKEQADEFRERNLNDTRYVCRFFKNQVEQFLKLAEGSESKRCVVLSGQLTAFLRARWGLIKVRDESDRHHALDAVVVAACTHGMVKRMSDYARRKELDQVAEGFVDVETGEIINAAMFQQLHEHFPDPWPHFRDEVQMRLKIDDPAQLRSDLLRLGNYAEEDVHAVRPLFVSRAPQRRNSGAAHKETIYGQPEHLKAQGGVTEKVALTALTMKDLDRLIDPYRNEKLYAAIRKRLEEFGGKADKAFAASNPLHKPDKEGNPTGPIVRTVTLVIDKLSGVPVRGGIAKNDTMLRVDVFTKAGKFHLVPVYVHHKVTGLPNRAIVAFKDEDEWTAIDDSFEFLFSLYPNDLVTITQKGKAPVRGYYASCHRGTGAFSLWAHDRASSVGKGGQIEGIGIKTALAVQKYNVDVLGTTYAAPLEQRRGLA

SEQ ID NO: 18794 - protein, 1119 aa, unidentified
  REGION 1..1119: note = Cas Enzyme sequence
MNDKKNLGPLTFGFDIGIASVGWAVLSPTRIVDLGVRCFDKAETAKEGESLNLARRSARLMRRRLRRRAWRLIKLARLLKHEGLIADTKTFIQPSASHASPWQLRKDGLDRALSPEEWARVLYHLCKHRGFHWVSRAEARKADGDTKGEGGKVKQGLASTTKLMNDKSYRTAAEMVLAEFPSAQRNKRGEYTKALSRELLDNELKQLFERQREYGNPHADTNLEAKIRGSGDHKSGLFWEQKPALSGNDLLKMLGKCTFEKQEYRAPKASFTAERHVWLTRLNNLRIIVDGRTSPLADAERTMALSLPYEQVGDFTYKQLRAALVKAGLMPDSFKFASLAYPSEFQKAEGKAKDPESAALTKLAAWQELRATLKKADLESEWQQISCAALEGQPETLDEIARVLSVFKDDDEVLNELQKLGLPGGAKTENALLDIRFDKFHALSLKALRKIVPYMERGLRYDEACERAEYHHSQLHKVGEGNRKYLPPLYKSRDKDGRMVFNDELGDIPRNPVVLRSLNQARKVLNALIARYGSPSSVHIEMARELSKPFDERMKVGKEQEAYRERNEKDKQTFVAEFGIVGAAKGGEFEKWKLYREQQGKCAYSIQGIDLNRLLEPGYVEIDHALPYSRSFDDSKSNKVLVLAAENRNKGNRTPYEYLDGEHNSERWRQFVGFVESNKLYRQAKRSRLLRKDFGKEQADEFRERNLNDTRYVCRFFKNQVEQFLKLAEGSESKRCVVLSGQLTAFLRARWGLIKVRDESDRHHALDAVVVAACTHGMVKRMSDYARRKELDQVAEGFVDVETGEIINAAMFQQLHEHFPDPWPHFRDEVQMRLKIDDPAQLRSDLLRLGNYAEEDVHAVRPLFVSRAPQRRNSGAAHKETIYGQPERLKAQGGVTEKVALTALTMKDLDRLIDPYRNEKLYAAIRKRLEEFGGKADKAFAASNPLHKPDKEGNPTGPIVRTVTLVIDKLSGVPVRGGIAKNDTMLRVDVFTKAGKFHLVPVYVHHKVTGLPNRAIVAFKDEDEWTAIDDSFEFLFSLYPNDLVTITQKGKAPVRGYYASCHRGTGAFSLWAHDRASSVGKGGQIEGIGIKTALAVQKYNVDVLGTTYAAPLEQRRGLA

SEQ ID NO: 18795 - protein, 1119 aa, unidentified
  REGION 1..1119: note = Cas Enzyme sequence
MNDKKNLGPLTFGFDIGIASVGWAVLSPTRIVDLGVRCFDKAETAKEGESLNLARRSARLMRRRLRRRAWRLIKLARLLKHEGLIADTKTFIQPSASHASPWQLRKDGLDRALSPEEWARVLYHLCKHRGFHWVSRAEARKADGDTKGEGGKVKQGLASTTKLMNDKSYRTAAEMVLAEFPSAQRNKRGEYTKALSRELLDNELKQLFERQREYGNPHADTNLEAKIRGSGDHKSGLFWEQKPALSGNDLLKMLGKCTFEKQEYRAPKASFTAERHVWLTRLNNLRIIVDGRTRPLADAERTMALSLPYEQVGDFTYKQLRAALVKAGLMPDSFKFASLAYPSEFQKAEGKAKDPESAALTKLAAWQELRATLKKADLESEWQQISCAALEGQPETLDEIARVLSVFKDDDEVLNELQKLGLPGGAKTENALLDIRFDKFHALSLKALRKIVPYMERGLRYDEACERAEYHHSQLHKVGEGNRKYLPPLYKSRDKDGRMVFNDELGDIPRNPVVLRSLNQARKVLNALIARYGSPSSVHIEMARELSKPFDERMKVGKEQEAYRERNEKDKQTFVAEFGIVGAAKGGEFEKWKLYREQQGKCAYSIQGIDLNRLLEPGYVEIDHALPYSRSFDDSKSNKVLVLAAENRNKGNRTPYEYLDGEHNSERWRQFVGFVESNKLYRQAKRSRLLRKDFGKEQADEFRERNLNDTRYVCRFFKNQVEQFLKLAEGSESKRCVVLSGQLTAFLRARWGLIKVRDESDRHHALDAVVVAACTHGMVKRMSDYARRKELDQVAEGFVDVETGEIINAAMFQQLHEHFPDPWPHFRDEVQMRLKIDDPAQLRSDLLRLGNYAEEDVHAVRPLFVSRAPQRRNSGAAHKETIYGQPERLKAKGGVTEKVALTAVTMKDLDRLIDPYRNEKLYAAIRKRLEEFGGKADKAFAASNPLHKPDKDGNPTGPIVRTVTLVIDKLSGVPVRGGIAKNDTMLRVDVFTKAGKFHLVPVYVHHKVTGLPNRAIVAFKDEDEWTAIDDSFEFLFSLYPNDLVTITQKGKAPVRGYYASCHRGTGAFSLWAHDRASSVGKGGQIEGIGIKTALAVQKYNVDVLGTTYAAPLEQRRGLA

SEQ ID NO: 18796 - protein, 1119 aa, unidentified
  REGION 1..1119: note = Cas Enzyme sequence
MNDKKNFGPLTFGFDIGIASVGWAVLSPTRIVDLGVRCFDKAETAKEGESLNLARRSARLMRRRLRRRAWRLTKLARLLKREGLVADTKVFLLPSATQVSPWQIRKEGLDRGLSPEEWARVMYHLCKHRGFHWVSRAEARKADGDTKGEGGKVKQGLAGTAKLMKEKGYRTAAEMVLAEFPSAQRNKRGEYTKALSRELLDNELKQLYERQREYGNPHADSNLEAKIRGSDDHKSGLFWEQKPALSGNDLLKMLGKCTFEKQEYRAPKASFTAERHVWLTRLNNLRIIVDGRTRPLADAERRMALSLPYEQVGDFTYKQLRAALVKAGLMPDSFKFASLAYPSEFQKAEGKAKDPESAALTKLAAWQELRATLKKADLESEWQQISCAALEGQPETLDEIARVLSVFKDDDEVLNELQKLGLPGGAKTENALLDIRFDKFHALSLKALRKIVPYMERGLRYDEACERAEYHHSQLHKVGEGNRKYLPPLYKSRDKDGRMVFNDELGDIPRNPVVLRSLNQARKVLNALIARYGSPSSVHIEMARELSKPFDERMKVGKEQEAYRERNEKDKQTFVAEFGIVGAAKGGEFEKWKLYREQQGKCAYSIQGIDLNRLLEPGYVEIDHALPYSRSFDDSKNNKVLVLAAENRNKGNRTPYEYLDGEHHSERWRQFVGFVESNKAYRQAKRSRLLRKDFGKEQAEEFRERNLNDTRYICRFFKNQVEQFLKLADGSESKRCVVLSGQLTAFLRARWGLLKVRDESDRHHALDAVVVAACTHRMVKRMSDYARRKELDQVAEGFVDIETGEIINPAMFQQLHEHFPDPWPHFRYEVQMRLKIDDPEQLRSDLLRLGNYAEEDVRAVRPLFVSRAPQRRNSGAAHKETIYGQPERLKAKGGVTEKVALTAVTMKDLDRLIDPYRNEKLYAAIRKRLEEFGGKADKAFAASNPLHKPDKEGNPTGPIVRTVTLVIDKLSGVPVRGGIAKNDTMLRVDVFTKAGKFHLVPVYVHHKVTGLPNRAIVAFKDEDEWTAIDDSFEFLFSLYPNDLVTITQKGKAPVRGYYASCHRGTGAFSLWAHDRASSVGKGGQIEGIGIKTALAVQKYNVDVLGTTYAAPLEQRRGLA

SEQ ID NO: 18797 - protein, 906 aa, unidentified
  REGION 1..906: note = Cas Enzyme sequence
YGNPHADTNLEAKIRGSGDHKSGLFWEQKPALSGNDLLKMLGKCTFEKQEYRAPKASFTAERHVWLTRLNNLRIIVDGRTRPLADAERTMALSLPYEQVGDFTYKQLRAALVKAGLMPDSFKFASLAYPSEFQKAEGKAKDPESAALTKLAAWQELRATLKKADLESEWQQISCAALEGQPETLDEIARVLSVFKDDDEVLNELQKLGLPGGAKTENALLDIRFDKFHALSLKALRKIVPYMERGLRYDEACERAEYHHSQLHKVGEGNRKYLPPLYKSRDKDGRMVFNDELGDIPRNPVVLRSLNQARKVLNALIARYGSPSSVHIEMARELSKPFDERMKVGKEQEAYRERNEKDKQTFVAEFGIVGAAKGGEFEKWKLYREQQGKCAYSIQGIDLNRLLEPGYVEIDHALPYSRSFDDSKSNKVLVLAAENRNKGNRTPYEYLDGEHNSERWRQFVGFVESNKLYRQAKRSRLLRKDFGKEQADEFRERNLNDTRYVCRFFKNQVEQFLKLAEGSESKRCVVLSGQLTAFLRARWGLIKVRDESDRHHALDAVVVAACTHGMVKRMSDYARRKELDQVAEGFVDVETGEIINAAMFQQLHEHFPDPWPHFRDEVQMRLKIDDPAQLRSDLLRLGNYAEEDVHAVRPLFVSRAPQRRNSGAAHKETIYGQPEHLKAQGGVTEKVALTALTMKDLDRLIDPYRNEKLYAAIRKRLEEFGGKADKAFAASNPLHKPDKEGNPTGPIVRTVTLVIDKLSGVPVRGGIAKNDTMLRVDVFTKAGKFHLVPVYVHHKVTGLPNRAIVAFKDEDEWTAIDDSFEFLFSLYPNDLVTITQKGKAPVRGYYASCHRGTGAFSLWAHDRASSVGKGGQIEGIGIKTALAVQKYNVDVLGTTYAAPLEQRRGLA

SEQ ID NO: 18798 - protein, 1102 aa, unidentified
  REGION 1..1102: note = Cas Enzyme sequence
MNDKKNLGPLTFGFDIGIASVGWAVLSPTRIVDLGVRCFDKAETAKEGESLNLARRSARLMRRRLRRRAWRLIKLARLLKHEGLIADTKTFIQPSASHASPWQLRKDGLDRALSPEEWARVLYHLCKHRGFHWVSRAEARKADGDTKGEGGKVKQGLASTTKLMNDKSYRTAAEMVLAEFPSAQRNKRGEYTKALSRELLDNELKQLFERQREYGNPHADTNLEAKIRGSGDHKSGLFWEQKPALSGNDLLKMLGKCTFEKQEYRAPKASFTAERHVWLTRLNNLRIIVDGRTRPLADAERTMALSLPYEQVGDFTYKQLRAALVKAGLMPDSFKFASLAYPSEFQKAEGKAKDPESAALTKLAAWQELRATLKKADLESEWQQISCAALEGQPETLDEIARVLSVFKDDDEVLNELQKLGLPGGAKTENALLDIRFDKFHALSLKALRKIVPYMERGLRYDEACERAEYHHSQLHKVGEGNRKYLPPLYKSRDKDGRMVFNDELGDIPRNPVVLRSLNQARKVLNALIARYGSPSSVHIEMARELSKPFDERMKVGKEQEAYRERNEKDKQTFVAEFGIVGAAKGGEFEKWKLYREQQGKCAYSIQGIDLNRLLEPGYVEIDHALPRSRSFDDSKSNKVLVLAAENRNKGNRTPYEYLDGEHNSERWRQFVGFVESNKLYRQAKRSRLLRKDFGKEQADEFRERNLNDTRYVCRFFKNQVEQFLKLAEGSESKRCVVLSGQLTAFLRARWGLIKVRDESDRHHALDAVVVAACTHGMVKRMSDYARRKELDQVAEGFVDVETGEIINAAMFQQLREHFPDPWPHFRDEVQMRLKIDDPAQLRSDLLRLGNYAEEDTQSVRPLFVSRAVAKRGVGEIHSATLHRIKPSSPKSAFVKVPLEKLTPAKLEAMVGRNDPRNFPLYSLLKARLAAHGDDPKKAFGPQQPRIEKPVASGKTSPVVRSIRIEETQNTGLIVRGGIADLGDMKSVGVYQREKGYVLIPEYTANSQQRRSPLDLPEGTVWRFSLTKNDLLEIQIDDETTRGYFVMYESDGRLTLRAHDQPQPDKKYFRKSVAAAKRISKLYVDALGRVYLPQSGAVSGLA

SEQ ID NO: 18799 - protein, 1097 aa, unidentified
  REGION 1..1097: note = Cas Enzyme sequence
MSTTYTIGLDIGIASVGWCAFGETHILDLGVRAFDKAETAKEGESLNLARRSARLMRRRLFRRAWRLKKLARLLKSEGLIADAKQFKPERPFSTSLWQLRVDGLDRRLNDEEWARVIYHLCKHRGFHWISRAEARQADGDSKSEGGKVKQGLAGTAKLMADKGYRSAAEMVLSEFPEAQRNKQGEYRKALSRELLAKELALLFAKQREFGNSHSQCALETAILGNGDQKSGLLWQQKPALAGADLLKMLGTCTFEKTEYRAPKASFTAERHVWLTRLNNLRIVTDGITRPLTEQERQLALPLPYRQAGEFTYKQLGGALTKAGLLEPGSFKFIGLGYPTEAQKAEGKGKANDPESATLVKIPAWHELRQTLTKAGLTDEWEKISGTALCGQPELFDKIAWVLSVYKDDDEVRAELAKLLLPNPEALTDALLNIRFDKFHALSLKSLRALLPHMEKGLRYDEACVQAGYHHSQLHKVGEGEHKYLPPLYDGRDKNGRMIFAEDADIPRNPVVLRSLNQARKVVNAIIRRYGSPTAVHIEMARDLSRPFDERNKIKKDQDEYQSRNQRDREQFIELFGHSPKGLEFEKWRLYREQNGQCAYSQNPLAASGNVADIFLDGSTEIDHALPYSRSFDDSKNNKVLVLTRENRDKGNRTPYEYLGGVENSERWQRYVAFVEANKAYRLAKRTRLLRKDFSAKEAEEFRARNLNDTRYICKFFKNYVEQHLKLAEGSEAKRCVVLSGQLTNFLRTRWGLLKVRADSDRHHALDAAVVAACSHSMVQRLSNYSRTRELEQVRDGFVDIETGVIVNPAMHQQLCEHFPDPWPYFRHELEARLKIDSPELLREEMARLGSYSEDELAALKPLFVSRAVQRRGSGAIHEETIRSSKRLANSQSHVRIAIQKLKLASLQNIVGAHDPRNASLMDLLKKRLIEFGDDGKKAFAEQVLKPSRNNDGPPVKTVKLISTQKGGMKVRGGVAELGDMLHVDVFQDGKRFLIEPAYIANNSARVTPSCLPETAEFLFSLTKNDLVAITLGDTTYQGYVVMYESDGRLTLRSHDQPKPDKDYFRKSVASAKRIQKFHVDVLGNTYPALPEQRRGLA

SEQ ID NO: 18800 - protein, 940 aa, unidentified
  REGION 1..940: note = Cas Enzyme sequence
FPDAQRNKQGDYGKALSRILLADELALLFRQQRELGNPHATVQLETAILGSGDRKSGLFWEQKPPLAGSDLLKMLGKCTFEKEEYRAPKASFTAERHVWLTRLNNLRIVVDGVTRCLNETERRTALPLPYKQVGDFTYKQLRAALVKTGLLPDSIKFAGLSYPTAAQQAEGKAKDPESEKLVRLPAWQEMRKTLKDKGLETEWESMAGAATGGNPDVLDSIAWVLSVFKDDEEVAAELRRLTLPGGEKMIDALLDIRFDKFHALSLKALRKIVPYMETGLRYDEACAAAGYHHSQLSKPGEGKHKALPPLYAGRDKDGRMVFNENLDVPRNPVVLRALNQARKVLNALVRKYGSPSAVHIEMARDLSRPLDERNKIKKAQDEYRDKNEKAKSNFAAEHGIAAKGREFERFLLYNEQQCKCAYSLKPLDLNRVLHDIGYAEVDHVLPYSRSYDDGKNNKVLVLAEENRNKGNRTPYEYLDGANDSPRWRAFMAYVESNKAYRLAKRSRLLRKDFAGKAAEEFRERNLNDTRYICRFFKNYVEDYLKLAEGSEAKRCVVLSGQMTAFLRARWGLVKLRGESDRHHALDAAVVAACSHGMVKRLSDYARRKELEKVREGFVDVETGEIVNPAMFQQLHEHFPDPWPHFRNELDARLHLDDPAELRARITALATYPQETLESLRPLFVSRAPQRRNSGAAHKDTIYAQPKRLKAEGSVTQKVPLASLTLNDLGKLIDPHRNEKLYAAIRARLEAHGGKGEKAFPPSDPLRKPDRDGNATGPVVRAVTMVIDKLFGIPVRGGIAKNDSMLRVDVFRHKKDGKHHLVPIYVHHTVAKELPNQAVVAFKDEKDWTLIDDDFDFCYSLHPNDLVRITLKKETHLGYYASCNRSTGAINLWAHDRNRRVGKEGFIEGIGVKTAVAVEKYHVDTLGNIYPAPPEKRGGLA

SEQ ID NO: 18801 - protein, 1118 aa, unidentified
  REGION 1..1118: note = Cas Enzyme sequence
MQAENRPYSLGLDIGIASVGWCVLGENRIIDLGVRAFDKAETAKEGDSLNLVRRTARLMRHRLRHRAWRLTKLSRLLKRHGLIDDTSYFQPQHPFPHSIWTLRAEGLDRLLVTEEWARVIYHLCKHRGFHWVSRAEKKKAEADGKSEGGKVKEALDGTAKLMRERGYRSPAEMVLAEFPEAQRNKQGDYSKALARTLLGDELALLFSRQREFGNHYAGATLEVALLGIGDHKSGLFWAQKPALGGTDLLKMLGKCTFEKDEYRAPKASFTAERHVWLTRLNNLRIVLDGSTRPLNEQERQLALPLPYQQAGDFTYKQLRSALVKAGRLPESFRFAGLLYPSEKQKAEDKAKDPESAVLVKLPALQEMRLTLKTAGLETEWQGMAGAAMGGRPELLDQLAWVLSVFKDDDEVIGELRKLTLPGGEKMIDALLEIRFDRFHALSLKALRKIVPLMEAGLRYDEAVAKIPEYGHHSQLREPGEGQHKYLPPLYAGRDKKGRMVFSEDMDIPRNPVVLRALNQSRKVVNAVIRKYGAPREVHIEMARDLSRPLDERREITKEQDEYRKRNEKDKVEFAQQFGIIGAPKGGDFEKWRLYREQQGKCAYSIEPIDIERLLEAGYVEIDHALPYSRSFDDSKNNKVLVLAKENRDKGNRTPYEYLNGTSDSARWINFVAFVESTKAYRLAKRSRLLRKDFGEKEAEDFRERNLNDTRYICRFFKNYVERTLQLAEDSEAKRCVVVSGQLTAFLRARWGLIKVRGDSDRHHALDAAVVAACSHGMVKRLSDYARRKELEKVREGFVDAETGEIVSPAMFQQLRQHFPEPWPHFREELEARLKIDDLSLLRTQLQGLGTYSAETLDALRPLFVSRAPQRRNSGAAHKDTIYGQPERLKAQGGVTQKVPLASLSLKDLDQLIDPHRNEKLYAAIRARLEEHGGKGDKAFPPANPLRKPDRDGNPTGPIVRTVTMVIDKLSGIAVRGGIAKNDSMLRVDVFTKAGKFHLIPLYVHHSVAKVLPDRAIVAFKDEAEWTLIDDSFEFCFSLHPNDLVKITLKTGVSLGYYAGCDRSTGSVSLWAHDRNQSVGKDGLIRGIGAKTALAIERFNVDVLGDIYPANQERRHGLA

SEQ ID NO: 18802 - protein, 1115 aa, unidentified
  REGION 1..1115: note = Cas Enzyme sequence
LGLDIGIASVGWCVLGTERIIDLGVRAFDKAETAKEGDSLNLVRRTARLMRRRLRRRAWRLTKLARLLKHEGLIDDARLFQRGQAFHESPWRLRVSALDRRLEREEWARVIYHICKHRGFHWTSRAEERKAEADSKGEGGKVKQGLAGTAKLMEDKNYRSAAEMVLAEFPEAQRNKQGEYGKALDRKLLGKELALLFERQRQLGNPHTGAALELAILGNGDRKTGLFWAQKPALAGAHLLKMLGKCTFEKDEYRAPKASFTAERHVWLTKLNNLRIVVDGVIRPLNDEERRIALPLPYSYDSDLTYKRLRAALVKAGRLLDSFKFAGLAYPTAPTQSDVKPKDPETEKLVKLPAWQEIRSTLKKAGLETEWQGMAGAAMDGRPELLDQIAWVLSVFKDGDEVAAELRTLGLPGGERMIEALGEISFDKFHALSLKALRKIVPHMEAGLRYDEAVAAIPEYGHHSQLHKIGDGQHKYLPPFYARREKDGRMVFSEDMDVPRNPVVLRALNQARKVVNAIVRRHGAPHAVHIEMARDLSRPFDERNKIRKEQEEFRGRNEQDKAQFAEAFNIVGAPKGGDYEKWRLYREQQCKCAYSIEPIDLNRLLEPGYVEVDHALPYSRSFDDSKNNKVLVLARENRDKGNLTPFEYFKRLDGMENGPRWQKFVAFVESNKAYRLAKRSRLLRKDFSTKAADEFRERNLNDTRYVCRFFKNYVERYLKLAEGNEAKRCVVVSGQLTSFLRARWGLIKVRADNDRHHALDAAVVAACSHSMVKRLSDYARRKELEKVREGFVDVETGEIVNPAMYQQLRQHFPDPRPHFRQELEARLKIDDPVLLRAEMEALGTYPAEALETLRPLFVSRAPQRRNGGAAHKDTIYSQPERLRAHGSVTQKVPLASLTLRDLDNLIDPHRNEKLYAAIRARLEAHGGKGDKAFPPDNPLRKPDRHGNPTGPVVRTVTVVIDKLSGIPVRGGIAKNDSMLRVDVFSKGGRFHLVPVYVADLARAKNGKLPNRAIIQGKDEEQWTIIDDSFRFEFSLFPNDLVRVQLKDAVRLGYFAGCDRSTGCIHLWAHDRSSEFGKDGLIRGIGVKTALAVEKFHVDTLGNIYPAKPEPRRGLA

SEQ ID NO: 18803 - protein, 1069 aa, unidentified
  REGION 1..1069: note = Cas Enzyme sequence
MASVGAALLGEDRIIALHVRCFDKAESPDGESLNALRRMARGTRRRLRRRKYRLLKLVRLFKREGLIPVADPAAFQLRETSPWDLRVKGLDRKLTSVEWAAALYHLCKHRGFQSTRKTEAAGDKEATAMLEAIRQNQAGLTKYRTPGEMAVKDPTFAEAKRNKAGAYLRTFQRADLVRELELLFERQRALGNPHTSDALREEVHRWLMARRPALSGQALAKMVGKCTLEPTQPRAPKHAYRSERFVWLSMLNNLRLLNQGRSRGLTEAEREAIRELPFTQAKLTYAQVRKKLALDPDDRFNRVDYGSRDGKDPEASTLYEPKGFHRLRKAFEEAGEGTRWESVRQDTDLLDTLAEILTYEKTDDDIRKRLAPLALPEALVEALLGVSFDQFIQLSIRAIGKLIPHLEAGLRYDEAAAAAGYHHSVRQNEEARSRFLPAPDRVEIRNPVVYRALNQARKLVNAIVREYGPPAAVHIELARDLSRPFDERQKIVREQRKFQKQKETAVLEFARELGVQPRRDGLQRFQLYREQHGQCAYSGKPVELHRLMEDGYVEVDHVLPFSRSFDDSKANRVLVLTAENRKKGNRTPYEYLDGASDSPRWREFVARVKANKQLRPAKRDRLLRKHFGKDEASEFKERNLNDTRYICRAFKTLVERHLAFHPASEGSERCVVVTGQFTSLLRARWGLVKVRENGDLHHALDAAVVAACSRAFVQRVARHSKAGELQYIRVDDRLVDPETGEVIDGADLLPEDRFPRPWPHFREELLGRLDRNPRLALTGRPGYPPEMLETVQPVRVSRSPKRLGLGQAHQETIRSKGKNDRLIAEGRSAIKKPLTSLDAKALKQMVGYDDPRNRTLVAALEARLAAAGGDPTKAFAEPFRKPSKDGKQAPVVRTVNVWDTQKSGLEIRGGVANNGDMLRLDVFEKGGKFFAVPVYVHAAAQGSLPDRAAVQAKPESEWPVMDETYRFLFCLHANDWVRIEKKDGVKIEGYYSGFDRASACINVTVHDRYPNPEAPDGSGKPLYADLPVGGTWRGVGIKTAVKFERFEVDLLGRVFPARVGGARPPLAGR

SEQ ID NO: 18804 - protein, 1112 aa, unidentified
  REGION 1..1112: note = Cas Enzyme sequence
MGKIITENKMISKPLVFGLDIGIASVGWAVLAPDHIINLGVRAFDKAETAKEGDPLNLTRRTVRLMRRRLRRRAWRLLKLARLLKREGLIDSPDFFHAQHHTPTSPWQLRVAGLDRLLTPEEWARVIYHLCKHRGFHWVSRAEAKKADENAKDDSGQVKKGLAETTRRMHEKRYRTAAEMVLAEFPDAQRNKQGNYDKSLSRALLAEELETLFQRQRALGNPHTNADFETQLLDRKTGLFWSQKPSLSGDNLLKMLGRCTFEKNEYRAPKASFTAERHVWLTRLNNLRIVVDGATRPLNEAERQIVLPLPYQQSSDFTHKQLRTALTKAGLWHEHVRFAKFPYAQSPDGKAKDPESEVLIKLPAWQTLHKQLKNKGLETEWQGMAGAAQSGNSDRLDQIAWVLTVYKDDTEIDRELGKLNLPGGQAMIDALGEISFDKFSNLSLKALRQIVPHMETGLRYDEACTAAGYQLFKVGEGQARFLPPFYTGRDDKGCMVFNDKMDIPRNPVVLRALNQARKVVNALIREYGSPHAVHIEMARDLSRPLNERRDIEKEQKEYRVRNDKDRALFTEHFGQAPKGQEFEKWRLYREQQGKCAYSIAPLALERLLEPGYVEIDHALPYSRSFDDSKNNKVLVLAKENRDKGNRTPYEYLGGAEESERWRLFVAYVEGNKAYRLAKRTRLLRKHFDAEDAQGFRDRNLNDTRYICKFFKNYVERYLKLAEGSESKRCVVLSGQLTAFLRARWGLAKVRSDSDRHHALDAFVVAACSHGMVKRLSDYARRKELETVRDGFVDMETGEIVNPALYHQIKAHFPDPWMGFRHELEARLFTDDPAQLRAAVENLGTYSEADLNALKPLFVSRAPQRRNGGAAHKDTIYAQPQWLKAQGGVTQKVPLTSLTLKDLDNLIDPHRNEKLYAAIRTRLETHGGKGDKAFPASNPLRKPDKAGNPTGPIVRTVTLVIDKLSGIPVRGGIAKNDTMLRVDVFTKAGKFHLVPVYVHHKVKGLPDRAIVKGKDEAEWTLIDDSFAFCFSLHANDFVRVTQKGKPPIVGYYSSCHRGTGNINLWAHDRNQQVGKGGAIEGIGVKTALSIEKFHVDVLGNCYPAPPEKRCELA

SEQ ID NO: 18805 - protein, 1111 aa, unidentified
  REGION 1..1111: note = Cas Enzyme sequence
MGDKTSRALTFGFDIGIASVGWCVLGEDRIVDLGVRCFDKAETAKEGDPLNLTRRNARLMRRRLRRRAWRLTKLARVLKRSGLNNDPHQPSTVSPWKLRVDGLDRRLSEDEWARVIYHLCKHRGFHWISRAEEKKAEGDKQEGGMVKKGLLDTQRRMAEKNYRSAAEMVLSEFPEAQRNKQGDYGKALSRVLLADELALLFLRQRELGNPHAGADLEALILGNGDRKSGLFWEQRPPLAGADLLKMLGKCTFERSEYRAPKSSFTAERHVWLTRLNNLRIVVDGKTRSLTEDERRIAHPLPYGYANAKLDYRQLRAALTKKANLDKFNFAGIAEDKEKDALVRLPGWEALSRTLKNAGLETEWESLAGAATGGDPTLLDEIARVLSVFKDGAEVEAELRKLNLPGGDRMIEALSEISFDKFHALSLKALRRIVPHMEAGLRYDEACQAAGYHHSQLHEAGAGEHKYLPPFYVRRDKDGRMVFDEKMDVPKNPVVLRALNQARKVLNALVRTYGSPSAVHIEMARDLSRPLDERNKVKKAQDEYRERNEKDKADFAAEYGIAAKSREFEKFQLYREQQGKCAYSLKPLDLHRVLHDIGYAEVDHALPYSRSYDDGKNNKVLALTEENRNKGNRTPYEYLTAIGGESGERWRNFVAFVESNKSYRLAKRQRLLRKDFTGKVADEFRERNLNDTRYVCKFFKNYVEHHLMLAPKVGSDGTTDAMTNKRCVVLNGQTTAFLRARWGLIKIRGDSDRHHALDAAVVAACSHGMVKRLSDYSRRRELEDAKSGFIDAESGEVMDRDALLRLEAHFPRPWPHFPRELESRLGTNDPEELHAQLKVFGTYPPDTLASVRPLFVSRAPQRRNGGAAHKDTIYAQPKRLKAQGGVTQKVPLANLKLADLDKLIDPHRNEKLYAAIRARLESHGGKGDKAFPPDNPLRKPDRDGNPTGPVVRTVTMVIDKLSGIPVRGGIAKNDTMLRVDVFRHKKDGKFHLVPVYVHHAVANELPNRAIVAFKDEDEWTLIEDANFDFCFALHPNDLVKVVVKQEKLCGYFSGCDRSTGNIGLWAHDRDIRAGKDGLIRTGVKMATSIEKFHVDVLGNVYPAPPEQRRGLA

SEQ ID NO: 18806 - protein, 1112 aa, unidentified
  REGION 1..1112: note = Cas Enzyme sequence
MLDKSCSPITIGLDIGIASVGWALLAPDRIVALGVRAFDKAETAKEGESLNLARRTSRLMRRRLQRRAWRQTKVARLLRREGLIDDARFFHDQRPAPVTPWRLRVEGLDRRLIAEEWARVIYHLCKHRGFHWTSRAEAKKAGEDAKGEGGKVKQGLAATARLMRDKGYRTAAEMVLAEFPDAQRNKQGDYGKALSRVSLAEELAELFSRQHELGNPHAGESFQSELLGNGDRRSGLFWSQKPALAGDKLLKMLGHCTFEKNEYRAPKASFTVERHVWLTRLNNLRIVVDGVTRPLNEHERRIALPLPYAQAGDLTHKQLRTALVKAGALDESFRYAKFPYAQSADGKAKDPETAVLVKLPAWQELRKLLKDKGLETEWQGMAGAAQAGNPELLDRIAWVLSVYKDDDEVERELGQLDLPGGQAMVAALGETRFDKFSNLSLKALGKIVPHMETGLRYDEACAAAGYHHSQLFKAGEGEQRFLPPFYSGRDEHGRMVFNDKLDDIPRNPVVLRALNQARKVVNALIREYGSPDSVHIEMARELSKPFDERKRVEREQTEYRDRNEKDKALFNEHFGQMPKGQEFEKWRLYREQQGKCAYSIEPLDLERLLEAGYAEIDHALPYSRSFDDSKNNKVLVLAKENRDKGNRTPYEYLGGAEDSERWRRFVAYVEGNKAYRLAKRSRLLRKNFGEDEAKDFRERNLNDTRYICKFFKNHVERHLKLADTSEAKRCVVLSGQLTAFLRARWGLLKLRGDSDRHHAMDAAVVAACSHGMVKRLSDYARRKELEAVREGFVDLETGEVVNPAMFRQLKAHFPEPWTGFRHELETRLFTDDPAQLRAALSELGTYAPTELDALKPLFVSRAPQRRNGGAAHKDTIYGQPERLKAQGGVTQKVPLSGLTLKDMDRLVDPHRNEKLYAAIRARLEAHGGKGDKAFPAGNPLRKPDRDGNPTGPVVRTVTLALDKLSGIPVRGGIAKNDSMLRVDVFARGGKFHLVPVYVHHRVKGLPDRAIVAFKDETEWTLIDDSFAFCFSLHPNDLVRVTLKSESWLGYFAGCDRSTGAISLWAHDRNQNVGKDGLIRGIGIKTAQSVEKFHVDVLGKPYPAPPETRRDLA

SEQ ID NO: 18807 - protein, 1169 aa, unidentified
  REGION 1..1169: note = Cas Enzyme sequence
MNMGEGKRNPRQVSLPGVLDTFPVFRPEIIVATALTPDSNNGPIMEEAFMQGNTSREVLTFGFDIGIASVGWAVLAPNRIIAVGVRCFDKAETAKEGESLNLARRQARLMRRRLRRRAWRLTKLARLLKRNGLIADANFFKQQNPTTQYLWQLRVEALDRKLNAEEWARVIYHLVKHRGFHWVSKAEEAKADSDGEGGKVKKGLAATKRLMEEKQYRTAAEMVLKEFPEAQRNKQGDYGKALSRVLLGKELADLFEAQRAFGNTFASVELEQAVLGWGDRKSGLFWEQKPPLSGEALLKMLGKCTFERGEYRAPKASFTAERHVWLTRLNNLRIVVDGVTRPLNAAERALALPLPYQQASDFSYKQLRATLVKVGLLPNEFRFTGLSYPSERQQAEGKAKNPEEEKLIKLPAWQTLKKTLKDKGLETEWQGLASQPEQLDAIAWVLSVYKDGDEVERELRALKLPGGDTMVDALATLSFDKFHNLSLKALRAIVPHMEAGLRYDEACVQAGYHHSQLFQAGTAESKYLPPLYSGRDKDGRMVFNEDLDVPRNPVVLRSLNQARKVCNALIREYGSPHAVHIEMARDLSRPMDERNKVKKAQDEFRERNDKARERFADEHGIVGSVKGKDFEKYMLYHEQQSQCAYSLLPIDRNRLFEPGYVEIDHALPYSRSFDDSKNNKVLVLAAENRNKGNRTPYEYLDGKAKSEQWHRFVAWVEQNKAYRQAKRSRLLRKDFGDKEAAEFRERNLNDTRYICRFFKNYVERYLKLADDSDKKRCVVLSGQLTAFLRNRWGFNKVREESDRHHALDAVVVAACSHGMVKRLSDYSRRKELENARNVVDMETGEIVDPVLLAQLEQHFPKPWEHFRDEALLRLKCDDAEKLRSEIAALGSYPEAAVQALKPLFVSRAPQRRNSGAAHKDTIYAQPERLKEKGSVTQKVPLSSLTLADFGEPGNDKKPCKLVDPHRNEKLYDAIQKRLKDHDGKGDKAFPPDNPLRKPDRDGNPAGPVVRTVTLLIDRLSGIPVRGGIAKNDSMLRVDVFTKAGKFHLVPVYVHHSVAKELPNRAIIQGRDEDEWTQIDDSFAFCFSLFPNDLVRIQQKGKEQIVGYYSGCDRSDASVAVWCHDRNISVGNDGLIRKIGVKTALSVEKFNVDVLGNIYPAPKEVRRGLA

SEQ ID NO: 18808 - protein, 901 aa, unidentified
  REGION 1..901: note = Cas Enzyme sequence
MAQYVFGLDICIASVGWAVLDAQRIVDLGVRCFDKAETAKEGDPLNLTRRQARLLRRRLYRRAWRLTQLARLFKRDGLIDDAKLFAKAPSWTENAWELRLRGLDHLLTPLEWARVIYHLCKHRGFHWTSKAEEAKAESDAEGGRVKQGLAHTKALMQVKNYRSTAEMVLAEFPGAQRNKRGQYDKALSRVLLGEELALLFATQRRLGNPHASEHFEQLILGHGDRKSGLFWQQKPALSGADLLKMLGKCTFEKTEYRAPKASFSAERHVWLTRLNNLRIVVDGRARPLNDAERQAVLLLPYQTETFKYKTLKAAFVKVGLWGDGVRFGGLAYPSQTQAEAEKAKDPEDQFLVKLPAWHELRKAFKAAGHEALWQQISMPALEEDPTLLDQIATVLSVYKDGTEVVQQLRQLALPEPDASIAVREKIRFDKFSSLSLKALRRIVPLMQGGLRYDEAVAQIPEYGHHSQRIDPGATRHLYLPPFYEAQRKYAGKGDRIGSMQFREDADVPRHPVVLRALNQARKVVNALIREYGSPVAVNIEMARDLSRPLDERNKVKRAQEEFRDRNDKARSEFERDFGYKPKGAVFEKWMLYREQLGQCAYSQQPLDIQRVLDDLNYAQVDHALPYSRSYDDSKNNKVLVLTRENQNKGNRTPFEYLTSFPGGEDGERWRAFVAWVQGNKAYRMAKRNRLLRKNYGTDESRGFIDRNLNDTRYICKFFKNYVEEHLQLAARTDGDTARRCVVVNGQLTAFLRARWGLAKVRGDSDRHHALDAAVVAACTHGMVKALADYSRRKEITFLQEGFPDPETGEILNLAAFDRAREHFPEPWPHFAHELKARLFIDDLVALREDMQHLGSYAQDDLDRLRTLFVSRAPQRRNGGAVHKGTIYAQPENLKQQGSTIE

SEQ ID NO: 18809 - protein, 1137 aa, unidentified
  REGION 1..1137: note = Cas Enzyme sequence
MAQYVFGLDIGIASVGWAVLDEQRIVDLGVRCFDKAETAKEGDPLNLTRRQARLLRRRLYRRAWRLTQLARLLKREGLIEDARLFAHSPAFVEPDPTNAKRQHLVSAWELRRAGLDRRLAPLEWARVIYHLCKHRGFHWISKAEEAAADSDAEGGRVKQGLKSTKALMEAKGYRSAAEMVLAEFPTAQRNKQGQYDKALARVLLGQEFALLFATQRRLGNPHASERFEALLLGSGDRKGGLFWQQKPALSGADLLKMLGKCTFEKTEFRAPKASFTAERHVWLTKLNNLRIVEDGRSRPLNEAERAAALALPYQTENFKYKSLKNTLVKAGLWSADVRFGGLSYPSTAQKENDKAKDPEDQALVKLPTWNTLRKAFEKAGHGSLWQRIGTPALEGQPELLDQIAWVLSVFKDGAEVVQQLRRLNLPESDTCIAVLEQLSFDKFSSLSLKALRRIVPLMEKGLRYDEAVAQISEYGHHSQLTTPDASKRLYLPPFYEHERKYGKSDRVGSMQFREDANVPRNPVVLRALNQARKVVNALIRRHGSPMAVHIEMARDLSRPLDERREVQKLQDEFKERNQKLRDDFETLFKRKPNGKDFEKWLLYKEQGGQCAYSLQPLAPSGDCNEIFLDGNTQVDHALPYSRSYDDSKNNKVLVLTRENQNKGNRTAYEYLTSFPGGEDGERWRAFAAWVQGNKAYRMAKRTRLLRKNYGQDEARGFIDRNLNDTRYICKFFKNYVEEHLQLAERPDGDRNRRCVVVSGQLTGFLRARWGLTKVRAESDRHHALDAAVVAACTHGMVKALADHARTKELEFLSEGSPDPETGEVLNPAAFDKGKKHFPEPWPHFRHELQARLFTDDLAALREDMLRLGSYSPQALADMRTVFVSRAPQRRNGGAVHKETIYAQPDSLKAQGGVIEKVLLTSLKLPDLERLLEPHRNERLYAAIRERLQAHGGKADKAFGPDNPLRKPDKNGQPTGPIVRSVKLVRDKQSGIPIRGGLAKNDAMLRVDVFTKAGKFHLVPVYVHHRVTGLPNRAIVAFKDETEWTLIDESFEFLFSVYPNDFIRVQQKGKPIIEGYFSSAHRGTGNINLWLHDRSTVDRKDGAIEGIGVKTALFFERFNVDVLGNCYPAPKETRRGLA

SEQ ID NO: 18810 - protein, 1132 aa, unidentified
  REGION 1..1132: note = Cas Enzyme sequence
MPTNETTMSPTASSLIFGLDIGIASVGWAVLSPERIVDLGVRAFDKAETAKEGDSLNLVRRTARLMRRRLWRRAWRLTKLSRLLKRNGLIADVDWMRTQPTFSDSTWALRAQGLDRLLTATEWARVIYHLCKHRGFHWVSKAEEAAADGDASGEGGRVKKGLAGTKALMTDKGYRTAAEMVLAEFPEAQRNKRGNYDKALSRVLLDDEFRQLFEVQRRLGNPHASDALELQVRGHGDRKSGLFWHQKPALAGSDLLKMLGLCTFEKAEPRAPKASFSAERHVWLTRLNNLRVVVDGLSRPLNERERQIALNLPYESGEKFTYKNLRTVLVKTCGLSEGFRFGGLSYPSASQTEEQKAKNPEDQPLVKLSAWHTLRLALKNAGLQNVWLQLSTPALDGHPDTLDQIGWILSVYKEDGEVQVELQKLSLPQAEQTIAVLLGVRFDKFHALSLKALRKIVPLMAQGLRYDEAVAQIPEYGHHSQLVKCDEAKTPYLPAFYQGRNASGTMVFREDLDVPRNPVVLRALNQARKVVNALIKAYGSPMAVHIEMARDLSRPLDERREVQKLQDEFRDRNQKAREDFEAQFHRKPSGKDFEKWMLYREQGGQCAYSQQPLAPNGDCNSIFLDGATQIDHALPYSRSFDDSKNNKVLVITRENQNKGNRTAYEYLTSFEGGEDGPRWRNFVAWVNQNKAYRAAKRNRLLRKNYGAEEAQGFRDRNLNDTRYICKFFKNYVEQNLQLAPKEDGDSNRRCVVVSGQLTSFLRARWGLLKIREESDRHHALDAAVVAACSHSMVKALADHARRKEVEFLQQGFADPETGEIINPEAFDRGRRHFPEPWAHFRHELEARLKTDDLAALREDMRRLGSYSEADLQALRTLFVSRAPQRRNGGAVHKDTIYAQPERLKAQGGVVQKVALTSLTLKDLDKLADPHRNAKLYAAIRQRLEAHGGKADKAFGHDKPFYKPGKDGQPSGPVVRTVKLEIDKLSGIPLRGGVAKNDSMLRVDVFTKAGKFHLVPVYVHHRVTGLPNRAIVAFKDEEEWTLIDESFGFLFSMYPNDLLRVTLKKEVRFGYYSSCNRTTGSIDLWAHDRAHAIGKGGLIQSIGVKVAVALEKFSVDVLGHIYPAPPEPRRGLA

SEQ ID NO: 18811 - protein, 1122 aa, unidentified; identical to SEQ ID NO: 17044
  REGION 1..1122: note = Cas Enzyme sequence

SEQ ID NO: 18812 - protein, 1138 aa, unidentified
  REGION 1..1138: note = Cas Enzyme sequence
MNYYNGFIITENAMASKHDNLGALTFGLDIGIASVGWAVLGEDRIIGLGVRCFDKAETAKEGESLNLARRSARLLRRRLRRRVWRLTKLARVLKREGVIADSNLFRNKIEKNTAVPKSSWQLRVDALDRQLAAEEWARVIYHLCKHRGFHWISRAEEKAAEGDSKSEGGKVKQGLAGTKKLMAEKGYRTAAEMVLAEFPDAQRNKQGDYSKALERKLLGRELTLLFKQQRELGNPYTSTELETKILGSGDRKSGLFWAQNPALAGSDLLKMLGHCTFEKTEYRAPKASFTAERHVWLTRLNNLRIVVDGTTRSLNEVERRITLPMPYQQAGDLTYKQLRTALNKAGYLPESFRYAGLAYPSGQKTDEKSKDPESAVLVKLPAWQELRKTLEKKELASEWVKISSDALDGKPQLFDQIAWVLSVYKDDGEVGTELRKLNLPNAEKMIDALLDIRFDKFSNLSLKALRQIVPFMEQGLRYDEAVANIPEYGHHSQLHKAGTGEHKYLPPFYKERDKTGRMVFNDDMDIPRNPVVLRALNQARKVVNALIKEYGSPHEVHIEMTRDLSRPLDERRNIEKLQKEFRDNNEKVKAQFAQDFSIVGAVKGKEFEKYQLYREQQGKCAYSIDPIDIHRLFEQGYVEIDHALPYSRSFDDSKNNRVLVFAKENRDKGNRTPFEYLDGKENSERWRQFVAFAEGNKAYRLAKRSRLLRKDFGEIEAKEFRERNLNDTRYICKFFKNYVEQYLQLHEDSEAKRCVVLSGQMTSFLRARWGLVKVRSDSDRHHALDAAVVAACSHSMVKRLSDYSRRKELEQVREGFVDVDTGEIINPDMFEQIEKHFPNPWQNFRHELEARLKLDDPALLREEMQRLGTYSEDELQSLRPLFVSRAPQRRNSGAAHKDTIYAQPERLKAQGGVTQKVALTSLTLKDLDKLIDPHRNEKLYDAIRSRLEQHGGKGDKAFPASNPLRKPDCAGNPTGPIVRGVTMVIDKLSGIPIRGGIAKNDSMVRVDVFAKAGKFHLVPVYVHHTVAKVLPDRAIVQAKDEAEWTLIDDSFEFCFSLHPNDLVQVQQKGKSAILGYYSSCHRGTGNINLWAHDRSLQVGKDGMIEGIGVKTALSIEKFNVDVLGNRYPAPPEKRRDLA

SEQ ID NO: 18813 - protein, 1134 aa, unidentified
  REGION 1..1134: note = Cas Enzyme sequence
MNYYNGFIITENAMTSKQENLGALTFGLDIGIASVGWAVLGENRIIDLGVRCFDKAETAKEGESLNLTRRSARLLRRRLRRRAWRLTKLARLLKREGLIADANFFKYKIEKNSPVPKSSWQLRVDALDRQLTSDEWARVIYHLCKHRGFHWISRAEEKAAEGDKGEGGKVKQGLAGTKKLMAEKNYRTAAEMVLAEFPEAQRNKQGDYSKALSRVLLGDELKALFEHQRKLGNSFASEKLEASILGSGDRKSGLFWTQNPALTGDKLLEMLGYCTFEKSEHRAPKASFTAERHVWLTKLNNLRIMVDGTTRGLNEMERRLALPMPYQQAGDLTYKQLRAALTKSGFLPESFRFTGLSYASGQKADEKAKDPETGVLTKLPAWHELRKILKDAGLESEWQKISTDALEGKPELLDQIAWVLSVYKEDDEVVTELRKLSLPNAEKMIDALLDIRFDKFSNLSLKALRQIVPFMEQGQRYDEAVANIPEYGHHSQLHKVGAGEYKYLPPFYKERDKTGRMVFNDDMDIPRNPVVLRALNQARKVVNALIKKYGSPHEVHIEMARDLSRPLDERRDIEKLQKEFRDNNEKIKAQFAQDFNIVGAVKGKEFEKYQLYREQQGKCAYSMQPIDIIRLFETGYVEIDHALPYSRSFDDSKNNRVLVFASENSNKANRTPFEYLDGKFDSPQWRSFVGFVEGNKAYRLAKRSRLLRQDFGEKESKEFRERNLNDTRYICKFFKNYVEQYLQLHEDSEAKRCVVLSGQMTSFLRLKWGFVKIRGNSDRHHALDAAVVAACSHGMVKRLSDYSRRKELEQVREGFVDADGVILDLAMFDQIEKHFPNPWAHFRNELEARLKLDDPAMLREEMQRLGTYSEEALQSVHPLFVSRAPQRRNSGAAHKDTIYAQPERFVAQGGVTQKVPLSSLTLKDLDKLIDPHRNEKLYAAIRSRLEEHGGKGDKAFSASNPLHKPDSEGNPTGPIVRGVTMVIDKLSGIPIRGGIAKNDSMIRVDVFTKANKFHLVPVYVHHAVAKVLPDRAVVAFKDETEWTLIDDSFEFCFSMYPNDLIHTKLKNESYWGYFSGCDRATGAIGLWAQDRNKLIGKDGLNRVGVKMALSMEKFNVDVLGNRYPAPPEKRRDLA

SEQ ID NO: 18814 - protein, 1140 aa, unidentified
  REGION 1..1140: note = Cas Enzyme sequence
MTSKQKNYGPLTFGLDIGIASVGWAVLGESRIVDLGVRCFDKAETAKEGESLNLARRTARLLRRRLRRRAWRLTKVARLLKCEGLIPDVNLLKQQPAKGELAARPWQLRVEGLDRNLTAEEWARVVYHLCKHRGFHWVSRAEEKAADSDSEGGKVKKGLAGTKKLMLEKNYRSAAEMVLAEFPEAQRNKQGDYSKALSRVLLGDELKALFQRQREFGNPYASAELEAAILGNGDRKSGLFWAQKPPLSGADLLKMLGKCTFEKSEYRAPKASFTAERHVWLTRLNNLRIVVDGVIRGLNEGERSVALPLPYRQASDLTYKQLANALIKEGLLPKDGFKFAGLSYPSDRQKEEGKAKNPEDERLVKLPAWHELRKTLESADLKEEWQKLSTDALEGRPQLLDEIARVLSVYKDDVAVETELSKLLLSDAMIKALSFVSFDKFSNLSLKALYRIVPLMEQGQRYDEAVASLPEYGHHSQLHKAGSGEAKYLPPFYSGRDKDGRMVFDEDMDVPRNPVVLRALNQARKVVNALIRTYGSPHEVHIEMARDLSRPFDERRDVEKLQKEFRERNEKDKALFAQTFSIVGAVKGKEFEKYQLYREQQGKCAYSIEAIDLHRLLEPGYVEIDHALPYSRSFDDSKNNRVLVLARENRNKGNLTPYEYLDGSENSERWRQFVGFVEGNKAYRLAKRGRLLRKDFGEKDSAEFRDRNLNDTRYICKFFKNYVERYLKLAEGSEAKRCVVLSGQLTSFLRARWGLVKVRSDSDRHHALDAAVVAACSHGMVKRLSDYSRRKELDQVREGFVDMETGEIVNPAMFDRLEQHFPAPWPYFRDELLARLSCDDAAKLRAEMERLGTYPADALETLRQLFVSRAPQRRNSGAAHKDTIYAQPERLKEQGGVTQKVALSSLTLKDLDKLIDPHRNEKLYAAIRTRLELHGGKGDKAFPASNPLRKPDRDGNPTGPIVRTVTAVIDKLSGIPVRGGIAKNDSMLRVDVFTKAGKFHLVPVYVHHAVAKMLPNRAIVAFKDEEEWTLIDDSFQFCFSLHPNDFLKVTQRSGETISGYYRGCHSGTAAINIALHDRYALGEKTTSLALHTKDPAKPLPNDKLGLIEGIGVKLAAKLEKFNVDVLGNLHPAPPEKRRDL

SEQ ID NO: 18815 - protein, 1143 aa, unidentified
  REGION 1..1143: note = Cas Enzyme sequence
MTSKQKNLGPLTFGLDIGIASVGWAVLGENHIVDLGVRCFDKAETAKEGESLNLARRTARLMRRRLRRRAWRLTKAARLLKHEGLIAEVNVLKQQPAKGFKTPNLWKLRVEALNRKLDAEEWARVIYHITKHRGFHWISRAEAKAADSDSEGGKVKKGLSGTRKLMNAKKYRTAAEMVINEFPDAQRNKQGDYSKALSRELLADELKRLFQCQREQGNPYAGEKLEAAILGNGDKKSGLFWAQKPALSGKDLLKMLGHCTFEKAEYRAPKASFTAERHVWLTRLNNLRIVVDGEMRALTEAERQIALPLPYQQASDFSYKQLRKALIKAGLSDDFRFAGLSYPSERQLKEEKAKDPEDEKLIKLPAWQELKKTLKDKGLETEWQQVSVAALDGKPQLLDKIAEVLSVYKEDAEVEAELRKLSLPNKDKMMDALLDIRFDKFSSLSLKALYNILPHMESGLRYDEACEKAGYHHNQLYKVGEGEHTYLPPFYSGRDKDGRLKFNEDMDIPRNPVVLRALNQARKVVNALIRKYGSPYEVHIEMARDLSRNFNERRDIKKEQDEFRKRNEDAKAAFASEFNIVGAVKGKDFEKYQLYREQQGKCAYSIESMDIDRLFEQGYVEIDHALPYSRSFDDSKNNRVLVLARENRNKGNLTPYEYLDGKNNSERWRQFEAFVNGNKTYRQAKRNRLLKKDFGEKESRDFMERNLNDTRYICRFFKNYVERHLKLHDESDAKRCVVLSGQMTSFLRARWGLIKVRGDSDRHHALDAAVVAAASHGMVKRLSDYSRRKELEKVREGFVDVETGEIVNPAMFDRLEQHFPSPWEHFRDELLARLSMDDPATLRTEMEKLGNYPSDALEALRPLFVSRAPQRRNSGAAHKETVYAQPESLKTTGSVTQKVSISDLKPADIDKLIDPHRNEKLYAALRVWVQSRDEREKRAKEIERAAKTHKRELTTEEKSEIERLRALPRKPDRNGNPTGPIVRTVTMVIDKLSGIPLRGGIAKNDTMLRVDVFKSKKDGKFHLVPVYVHHRVKGLPNRAIVAGKDEEEWTVMDGGHNFLYSLHPNDLVRVQQKGKQPIVGYFSSCHRGTGNINLWTPDRNARVGKDGMIEGIGVKTALSFEKFNVDVLGNIYPAPPETRRDVA

SEQ ID NO: 18816 - protein, 1118 aa, unidentified
  REGION 1..1118: note = Cas Enzyme sequence
ASVGWAVLGESRIVDLGVRCFDKAETAKEGESLNLARRTARLLRRRLRRRAWRLTKLARLLKREGLIADANLFKNKIEKGSPVPKSSWQLRVDALGRQLTSEEWARVIYHLCRHRGFHWVSRAEEKAAENDSKSEGGRVKRGLAGTKKLMAEKNYRTAAEMVLAEFPEAQRNKQGDYSKALSRVLLNDEFVLLFRRQREFGNPHTSTEFQEKILGTGDKKSGLFWAQNPALAGNDLLKMLGHCTFEKGEYRAPKASFTAERHVWLTRLNNLRIVVDGTTRSLTEAERREALPMPYKQAGDLTYKQLRSTLTKAGYLPESFKFTGLPYPSGLKTDEKAKDPESAVLVKIPAWHELRKTLEKKGLADEWQKMSTEALEGNPKRLDDVAWVLSVYKDDAEVEAKLRELPLPNADKLVDALLDIRFDKFSNLSIKALRQIVPFMELGQRYDEAVANIPEYGHHSQLHIAGAGEHKYLPPFYSGRDKDGRMVFNEDMDIPRNPVVLRALNQARKVVNALIKEYGSPHEVHIEMARDLTKPLRGHWNDQGKFIEGRQDILKKQEEFRDRNKKDKAKFAEFASTFNIVGSVKGKEFEKYQLYREQQGKCAYSLEPIDLHRLFETGYVEIDHALPYSRSFDDSKNNRVLVLARENRNKGNRTPFEYLDGKDNSERWRQFSGFVEGNKAYRLAKRSRLLRKDFGEKESKEFRERNLNDTRYICKFFKNYVEQYLQLHEDSDAKRCVVLSGQMTSFLRARWGLVKIRGDSDRHHALDAAVVAACTHGMVKRLSDYSRRKELGQVREGFVDVDTGEILNPAMFEQIEKHFPNPWPHFRNEVEARLKLDDPVLLREELQRLGTYSDQALEAVHPLFVSRAPQRRNSGAAHKDTIYAQPERLKAQGGVMQKIALTSLTLKDMDKLVDPHRNEKLYAAIRARLEQHGGKGDKAFPASNPLRKPDSAGNPTGPIVRGVTMVIDKLSGIPVRGGIAKNDTMLRVDVFTKAGRFHLVPVYVYHAVAKVLPDRAIVAFKDEAEWTLIDDSFGFCFSLYPNDLLQVTLKQEKWIGYYAGCDRSTGNVNLWAHDRSLVVGKDGLIRTGVKTALSIEKFNVDALGNRYPAPPEKRRDLA

SEQ ID NO: 18817 - protein, 1137 aa, unidentified
  REGION 1..1137: note = Cas Enzyme sequence
MTGKQNDFGPLTFGLDIGIASVGWAVLGESRIVDLGVRCFDKAETAKEGESLNLARRTARLLRRRLRRRAWRLTKLARLLKREGLIADANLFKNKIEKGSPVPKSSWQLRVDALGRQLTSEEWARVIYHLCRHRGFHWVSRAEEKAAENDSKSEGGRVKRGLAGTKKLMAEKNYRTAAEMVLAEFPEAQRNKQGDYSKALSRVLLNDEFVLLFRRQREFGNPHTSTEFQEKILGTGDKKSGLFWAQNPALAGNDLLKMLGHCTFEKGEYRAPKASFTAERHVWLTRLNNLRIVVDGTTRSLTEAERREALPMPYKQAGDLTYKQLRSTLTKAGYLPESFKFTGLPYPSGLKTDEKAKDPESAVLVKIPAWHELRKTLEKKGLADEWQKMSTEALEGNPKRLDDVAWVLSVYKDDAEVEAKLRELPLPNADKLVDALLDIRFDKFSNLSIKALRQIVPFMELGQRYDEAVANIPEYGHHSQLHIAGAGEHKYLPPFYSGRDKDGRMVFNEDMDIPRNPVVLRALNQARKVVNALIKEYGSPHEVHIEMARDLTKPLRGHWNDQGKFIEGRQDILKKQEEFRDRNKKDKAKFAEFASTFNIVGSVKGKEFEKYQLYREQQGKCAYSLEPIDLHRLFETGYVEIDHALPYSRSFDDSKNNRVLVLARENRNKGNRTPFEYLDGKDNSERWRQFSGFVEGNKAYRLAKRSRLLRKDFGEKESKEFRERNLNDTRYICKFFKNYVEQYLQLHEDSDAKRCVVLSGQMTSFLRARWGLVKIRGDSDRHHALDAAVVAACTHGMVKRLSDYSRRKELGQVREGFVDVDTGEILNPAMFEQIEKHFPNPWPHFRNEVEARLKLDDPVLLREELQRLGTYSDQALEAVHPLFVSRAPQRRNSGAAHKDTIYAQPERLKAQGGVMQKIALTSLTLKDMDKLVDPHRNEKLYAAIRARLEQHGGKGDKAFPASNPLRKPDSAGNPTGPIVRGVTMVIDKLSGIPVRGGIAKNDTMLRVDVFTKAGRFHLVPVYVYHAVAKVLPDRAIVAFKDEAEWTLIDDSFGFCFSLYPNDLLQVTLKQEKWIGYYAGCDRSTGNVNLWAHDRSLVVGKDGLIRTGVKTALSIEKFNVDALGNRYPAPPEKRRDLA

SEQ ID NO: 18818 - protein, 1138 aa, unidentified
  REGION 1..1138: note = Cas Enzyme sequence
MNYYNGFIITENAMTSKQENLGALTFGLDIGIASVGWAVLGENRIIDLGVRCFDKAETAKEGESLNLARRMARLLRRRLRRRAWRLTKLARLLKREGLIADANLFKNKIEKNTPVPKSSWQLRVDALDRKLNAEEWARVIYHLCKHRGFHWISRAEEKAAESDSKGESGKVKQGLAGTKKLMQEKNYRTAAEMVLAEFPEAQRNKQGDYSKALSRILLGDELKTLFEHQRKLDSPFATEKLEAAILGNGDRKSGLFWAQNPALAGSDLLKMLGYCTFEKTEYRAPKASFTAERHVWLTRLNNLRIVVDGTTRPLNEAERRIALLMPYQQAGDFTYKQLRTALTKAGFLPESFRYTGLSYASGQKAGEKTKDPESAALVKFPAWQELRKTLEKKELASEWQKISTDALDGKPQLLDQIAWVLSVYKDDDEVKAELSKLNLPNAEKMIDALLDIRFDKFSNLSLKALCKIVPLMEQGQRYDEAIANIPEYGHHSQLHKVGAGEHKYLPPFYKERDKTGRMVFNDDMDIPRNPVVLRALNQARKVVNALIKKYDSPHEVHIEMARDLSRPLDERREVEKLQKEFRDNNEKGKAQFAQDFNIVGAVKGKEFEKYQLYREQQGKCAYSIEPMDIHRLFEQGYVEIDHALPYSRSFDDSKNNRVLVLAKENRDKGNRTPFEYLGGKDNSEPWRQFVAFVEGNKAYRLAKRSRLLRKDFGDKEAKEFRERNLNDTRYICKFFKNYVEQYLQLHEDSEAKRCVVLSGQMTSFLRARWGLVKVRGDSDRHHALDAAVVAACSHGMVKRLSDYSRRKELEQVREGFVDVDTGEIVNPAMFQQVQEHFPNPWPHFRDEVKLRLSMDDPALLRSEMEKFGTYTPEALQALHPLFVSRAPQRRNSGAAHKDTIYAQPKRLVAQGGVTQKVALTSLTLKDLDKLIDPHRNDKLYTAIRARLEQHGGKGDKAFPSSNPLRKPDSEGNPTGPIVRGVTMVIDKLSGIPIRGGIAKNDSMVRVDVFTKANKFHLVPVYVHHTVAKALPNRAVVAFKDEDEWTLIDDSFDFCFSLHPNDLVQVQQKGKAGMIGYYSSCHRGTGNINLWAHDRNLQVGKDGMIEGIGVKTALSLEKFNVDVLGNRYPAPPEKRRDLA

SEQ ID NO: 18819 - protein, 1125 aa, unidentified
  REGION 1..1125: note = Cas Enzyme sequence
MTSKQENLGALTFGLDIGIASVGWAVLGENRIIDLGVRCFDKAETAKEGESLNLARRMARLLRRRLRRRAWRLTKLARLLKREGLIADANLFKNKIEKNTPVPKSSWQLRVDALDRKLNAEEWARVIYHLCKHRGFHWISRAEEKAAESDSKGESGKVKQGLAGTKKLMQEKNYRTAAEMVLAEFPEAQRNKQGDYSKALSRILLGDELKTLFEHQRKLDSPFATEKLEAAILGNGDRKSGLFWAQNPALAGSDLLKMLGYCTFEKTEYRAPKASFTAERHVWLTRLNNLRIVVDGTTRPLNEAERRIALLMPYQQAGDFTYKQLRTALTKAGFLPESFRYTGLSYASGQKAGEKTKDPESAALVKFPAWQELRKTLEKKELASEWQKISTDALDGKPQLLDQIAWVLSVYKDDDEVKAELSKLNLPNAEKMIDALLDIRFDKFSNLSLKALCKIVPLMEQGQRYDEAIANIPEYGHHSQLHKVGAGEHKYLPPFYKERDKTGRMVFNDDMDIPRNPVVLRALNQARKVVNALIKKYDSPHEVHIEMARDLSRPLDERREVEKLQKEFRDNNEKGKAQFAQDFNIVGAVKGKEFEKYQLYREQQGKCAYSIEPMDIHRLFEQGYVEIDHALPYSRSFDDSKNNRVLVLAKENRDKGNRTPFEYLGGKDNSEPWRQFVAFVEGNKAYRLAKRSRLLRKDFGDKEAKEFRERNLNDTRYICKFFKNYVEQYLQLHEDSEAKRCVVLSGQMTSFLRARWGLVKVRGDSDRHHALDAAVVAACSHGMVKRLSDYSRRKELEQVREGFVDVDTGEIVNPAMFQQVQEHFPNPWPHFRDEVKLRLSMDDPALLRSEMEKFGTYTPEALQALHPLFVSRAPQRRNSGAAHKDTIYAQPKRLVAQGGVTQKVALTSLTLKDLDKLIDPHRNDKLYTAIRARLEQHGGKGDKAFPSSNPLRKPDSEGNPTGPIVRGVTMVIDKLSGIPIRGGIAKNDSMVRVDVFTKANKFHLVPVYVHHTVAKALPNRAVVAFKDEDEWTLIDDSFDFCFSLHPNDLVQVQQKGKAGMIGYYSSCHRGTGNINLWAHDRNLQVGKDGMIEGIGVKTALSLEKFNVDVLGNRYPAPPEKRRDLA

SEQ ID NO: 18820 - protein, 1116 aa, unidentified
  REGION 1..1116: note = Cas Enzyme sequence
VNDKLFAEPLTFGFDIGIASVGWAVLAPNRIVTLGVRAFDKAETAKEGQSLNLARRNARLMRRRLRRRVWRLKKLARALKRHGVIDDLHLFDPQHPYAPSLWRVRVEGLDRQLNPEEWARVLYHLCKHRGFHWISRAEERKAESDGKGEGGKVTQGLKATARLMRDKGYRTAAEMVLTEFPEAQRNKQGDYGKALSRELLSDELSLLFQRQRVLGNPHASAELEAEILGSGDRKSGLFWLQKPALSGAALLKMLGRCTFERAEYRAPKASFTAERHVWLTRLNNLRLFVNGRTRPLNDEERRIALPLPYLQVSDFKYRQLRAALVKQAGLPDNVRFAGLAYPSDAQKAEGKAKDPEEATLVKLPAWHEVWLALKRAGLETEWEGMAAAAIDGRAELLDQIAYVLSVFKDDTEVEAELRKLQLPRADTMIEALLDLRFDKFHSLSLKALRGIVPHMEQGLRYDEACERAGYKHSQPQSIATGEHKHLPPFYAKRDKDGKMVFNEDLDVPRNPVVLRALNQARKVVNALVRQHGSPHEVRIEMARDLSRPLDERRQIEKEQHEYRARNERDRAMFAEHFGREPKGVEFEKWRLYREQQGKCAYSITPIEIDRLLEEGYVEVDHALPYSRSFDDSKNNKVLVHAAENRNKGNRTPYEYLGGADDSTRWRQFVAFVESSKAYRQAKRSRLLRRNFGADDAKEFRERNLNDTRYICRFFKNFIEQHLKLADDSESKRCVVVSGQLTAFLRARWGLLKIREESDRHHALDAAVVAACTHGMVKRLSDYARTREQEHVRGGFVDMETGEIVDPAAFVRLERHFPQPWTDFRYELEMRLKEDDPVKLRAAMEALGTYPQASVALLRPLFVSRAPQRRNGGAAHKDTIYGQPERLKAQGSVTQKVALASLTMKDLDRLIDPHRNEKLYAAIRARLAAHGGKGEKAFSPGDPLRKPDRDGNPTGPIVRTVTMVIDKLSGIPVRGGVAKNDTMLRVDVFTKDRKFHLVPVYVHHRVKGLPDRAIVAFKDEDEWTVIDDSFEFIFSLCPNDLVRVHQKGKQPFLGYYASCHRGTGNINIWAHDRNALVGKDGLLEGIGVKTAISLNKLHVDTLGNVYPAPPEVRRGLA

SEQ ID NO: 18821 - protein, 1202 aa, unidentified
  REGION 1..1202: note = Cas Enzyme sequence
MTGKQKNLGARTFGLDIGIASVGWAVLGESRIIDLGVRAFDKAETAKEGDSLNLVRRMARLMRRRLHRRAWRLTKLARLLKREGLIADAHLFKSQQPFPQSPWQLRVDALDRRLNDEEWARVIYHLCKHRGFHWVSRAEEKAAEGDSKGEGGAVTQALKKTKEMKEKYRTAAEMVLVEFVTQRTDKDGNVVLNKTGEPILDGAARNKQGDYSKALSRVLLGDELKELFREQSKLGNPHASVELEAEILGNGDKKTGLFWEQEPALTGPKLLEMLGRCTFEKSGGPDGKGEYRAPKASFTAERHVWLTRLNNLRVVVDGTTRPLDEQERRIALPLPYLPGEKFTYKNLRTALVKAGCLPESFRFAMPYPSEQQKIEGKAKDPEADTLIKLPAWHELRLTLKKAELETEWQNMANAALNGQPELLDEIARVLSVYKDDAEVETELRKLALPNLEKMVKALLDIRFAKFHALSLKALRKIVPFMEKGQRYDEAVANIPEYGHHSQLHKIGEGEHKYLPPFYSGRDKDGRMVFSEDMDIPRNPVVLRALNQARKVVNALIREYGAPHEVHIEMARDLSRPLDERRKIEAEQKDFHDGNEKNKSEFASHFSIVGTPKGKDFEKWRLYREQQGKCAYSIEPIDLNRLLEAGYVEIDHALPYSRSFDDSKNNKVLVLARENRNKGNKTPYEYLDGAENSERWRQFVAFVESNKAYRQAKRSRLLRKDFGEKEAKEFRERNLNDTRYICKFFKNYVEQYLQLHEDSDAKRCVVLSGQLTAFLRARWGLIKVRGDSDRHHALDAAVVAACSHSMVKRLSDYSRCKELGKAHKDFVNVETGEIINHFPDPWPHFRDELQARLNIDDPALLRTEMEQLGTYPPEALGTLRPLFVSRAPQRRNGGAAHMDTIYTKPRDGHVLMVEDKKAKKIAKDNAEKVLRPATTEEKASMVIGRIGVMDKDSKGNYKLTLEKLDDIIDPRRNENMIEALRHWIANRDEREKAAKTIEASFGRGKEKRKPTDAENAEIERLRALPRKPLKDDPGNGPFTGPIIRAVKVNAGKMSGIQIRNGLAAQESLIRVDVFSKEGKFYLAPLYVADTAKKKLPDQTADGETQIDNSFDFRFSLHPNDLAKVTLKGKGSILGYFRGYGGPPNPYNITLAIHDRNKNGHERANDKGEIPSIGIKTALNIEKFNVDVLGNTYPAPPEKRRDLA

SEQ ID NO: 18822 - protein, 1125 aa, unidentified
  REGION 1..1125: note = Cas Enzyme sequence
VEKVNGKPDPVALTFGFDIGIASVGWAVLAPNRIVALGVRAFDKAETAKEGDSLNLVRRTARLMRRRLRRRAWRLIKLVRLLKHQGVIADNHLFRPEHAHPRSPWCLRLEALDLRLSAEEWARVIYHLCKHRGFHWTSRAEEKQAEQDKKGEGGKVKQGLAGTAKLMKEKGYRSAAEMVLSEFPDAQRNKQGDYTKALARTLLGDELAMLFRRQRELGNPHATSELEAAVLGSGDKKSGLFWVQKPALAGSDLLKMLGKCTFEKTEYRAPKASFTAERHVWLTRLNNLRVFVDGEPRPLTEQERRIALPLPYQQPGDLTYKKLRGVLVKAGCLQDTFRFVGLTYPSAAQLADAKAKDPETAALIKLPAWQALRLTLKKARLETEWEGVAGAAIDGRPELLDQIAWALSVFKDDAEVAAELRKLPLSNSDKMIEALLDLRFDRFHALSLKALRNIVPHMESGLRYDEATEKAGYHHSQLFKAGAGEHKTLPSFYARRDQDGRMMFSEDMDVPRNPVVLRALNQARKVLNALVRTYGSPQQVRIEMARDLSRPLDERRKIKAEQDEYRDRNEQDKGRFSEHFGRPPSGVEFEKWRLYREQQCKCAYSIEPIDVHRLLEPGYVEIDHALPYSRSYDDSKNNKVLVLAAENRNKGNRTPYEYLGGADDSPRWRQFVGFVESNKAYRLAKRTRLLRKNFGEDEAKEFRERNLNDTRYICRFFKTYVERYLKLAEGSESQRCVVVSGQLTAFLRARWGLLKIREESDRHHALDAAVVAACTHGMVKRLSDYARRKELEHVSAGFVDMQTGEIVDSAAYAQLERHFPAPWPNFRHELDSRLRIDDPALLRAEMERLGTYPIEALDALRPLFVSRAPQRRNGGAAHKDTIYAQPEKLKAQGSVTQRIPLASVSLKKPEQVDSFVDQLIDPHRNQKLYAAIRDRLKAHGGKGDKAFPLDNPLRKPDREGNPTGPIVRAVTVVIDKLSGIPVRGGIAKNDTMLRVDVFTKAGKFHLVPVYVHHRVKGLPNRAIVALKDEDEWTLIDDSFAFCFSLYPNDLVQVNLKKESLMGYYAGCDRSTGAINLWAHDRNQKVGKEGLIRGIGVKLAISVAKFHVDSLGNTFPAPPENRRGLA

SEQ ID NO: 18823 - protein, 1192 aa, unidentified
  REGION 1..1192: note = Cas Enzyme sequence
VSAISSVPQKLTFGLDIGIASVGWAVLAENRIVDLGVRCFDKAETADRGESLNLARRSARLTRRRLYRRAWRLTKLARLLKREGLIPSADFFKSQPGFQDHAWQLRVAGLDRLLTPTEWARVIYHLCKHRGFHWISKAEEVQAEADAKGEGGRVKQGLSQTESLMKEKAYRTAAEMVLKEYVKTQTDSQGIPKKDKVGQPIPVGAARNKRGDYSQALSRKLLDEELGKLFEAQRRLGNLHANVELEIIIRGTGDKRSGLFWKQKPALSGNDLLKMLGRCTFERTGGPDGKGEYRAPKASFLAERHVWLTRLNNLRIIASGVSRPLNEAERQIVLPLPYGYADAKLTYKQMRSALTKKTGLHDFNFVGIPNDKEKDVLVKLPSWEKLSSTLKDKGLESEWLQISTAALEGKPAQLDAIGWVLSVFKDDDEIRTELDKLKLPGGQRMNEALLSVSFDKFHALSLKALRRIVPQMETGLRYDEACEIAGYVHSRSMKVETDDKEKFLPPLYEDARGHKPGEVGKLLFSERVEREITGGIPRNPVVLRALNQARKVVNALIRKHGSPASVHIEMARDLSRPLKERKAISDAQDEFQKINEKARTEFETTFGLTAKGREFEKFMLYREQDGQCAYSLRPLAPSGDIRDIFAVGATEIDHALPYSRSFDNSKNNKVLVLPKENRDKGDKTPYEYLTSFEGGENGERWCKFVAAIERNHKYRGAKKNRLLRKNFGLDESMEFMARNLNDTRYICKFFKNYVEQYLQLTSDSKRCVVVNGGLTSLLRARWGLPTSKTKRAESDRHHAMDAVVIAACGHLIVQRTSTMLNSTGWTHRPDLGGYLNTETGEILSTQEFARKDDVYKLLPRPWKHFRDELLARINLDNLVELRSQMKAFSTYPTEALESLTPLFVSRAPQRRNGGAAHKETIYPKPRPDHRLMVQVKAKDGKKFSRTATPEELGNMAVEQIGVFETADKGRKYRLTEERLNDAVGAERNAWMIHALRLWIAQRGDNPKQPGTTVFPKKPRKGDPQDGPFTGPEIKSIKVNAGDMTGFEVREGIVQNERLVRLDVFQKDRRYFLVPLYIRHKVVRQLPVHTADGSVAVDDSYQFLFAIHPNDLIEVRNGEDTIRGYFKGYGGPPNPSNITLVIHDRNAQSHPRANTKGEIPSIGVRTANALIKFHVDILGNVYPAPPEVRHGLA

SEQ ID NO: 18824 - protein, 1098 aa, unidentified
  REGION 1..1098: note = Cas Enzyme sequence
LDRALSLYWGKNLKWGVKMGYGIGLDIGIASVGWAVVELNREERPVRIIKMGSRIFDAAEQPKTGEPLAAPRRIARSMRRRLRRHRHRLDRIKHLLIEDQIISQDELDNLYIGQLDDIYALRTKALDKDITKKELARILLHIAQRRGFKSNRKTDKDDKEAGALLSAVKANKTIMTEKGYRTVGEMFYKDPQFAYEKRNKLGTYKATVQRDMVADEVRTIFARQEKHINLAKDFEDKYLEILLSQRSFDEGPGVGSPYGGDQIEKMIGNCTLEPEEKRAPKNSASFERFNLLQKINHLCLVTKGTSVSLTDEQREKIITLAYGTADLKYSKIRKELNIPEGTTFNLVYYKDNDIETSEKKEKLNCLKGYHEMRKALDKVAKGHISQLTKKQLNDAAYALTVYKTDAKISAYMLEHNIVQEDIDVLLNVPGFSKFGHLSVKACDELIPYLEKGMTYDKACEAAGIDFQGQTGDKSKLLPAQTDDMEEITSPVVRRSVSQTIKVINAIIRDNNSSPAYINIELAREMSKNFTDRKKDEKGMKESQAVNDRLMERIKSEFHKAHPTGMDLVKLKLYEEQGGVCAYSQKVLDVKRLFEPGYVEVDHIIPYSISFDDSYKNKVLVLSRENQNKGNKLPLEYMPPKQKEAFIVWTKNNVRNYRKKQILLKEKITKDDEDKFKQRNLQDTQHMSRFLYNYIRNYLQFAPSPNGRKKFVTAVNGAITSHMRKRWGINKNRANGDIHHAVDALVVACTTDGMIKEISNYSKIKENEYAKTKEGVALVNRHTGEILKKFPLPWAEFREELDARLSNKPSDKLTVMHLPNYTGINLEKMEPIFVSRMPKHKVTGAAHLDTVKGIIDDQWVVLKKSLTELKLNKDGIIENYYRPESDLLVYSALIARLKAFGNDGKKAFAEPFYKPKSDGTKGPLVRKVKIMEKSTLNVPVHQGTAVAANDSMVRIDVFKVEGDGYYFVPIYVADTLKKELPNRAVVQSKPYSEWKVMSDKNFVFSLYPNDLFKVTHNDKLKFSLINEDSSLPDKYEPIEEFVYFIKAGIASGTITVENHDGTYIISSLGLKTLKNIDKYQIDVLGNYVKVNKEKRQKFC

SEQ ID NO: 18825 - protein, 964 aa, unidentified
  REGION 1..964: note = Cas Enzyme sequence
VLIHLAQRRGFKSNRKNVAKDKEAGKLLAAVKENNNLMTEKSYRTIGEMFFLDDKFSHQKRNKAEEYAHTISRDKVFDEIVRLFNAQRKYTNPFTDASFEKKYTEIVLGQRSFDEGPGFPSPYAGNLIEKMVGKCTFEKDLPRASKATYSFELFNLLQKINSLRIEDISGSNRNLNREERQRVVESAHEKSDLKFSDLRKLLNLSPNHRFNSLTYGSADMNEIEKKSKFNYLKAFHDIRKALDKVAKGHINQLTIEQKDSIGETFTLFKNEETVAGKLRQAGLSKYDIEALLHLSFRGFGHLSLKALKNIIPHLQEGLVYSDAATLAGYNFRAHDNENKHMYLPANGEELKDITNPVVRRAVSQSIKVINAVIRQYGSPQLICLELSREMGKNFIDRKKIEKQIKENTDLNDAIRNKVIEYGHSNPTGQDIVKMKLWQEQDGRCAYSGQAIPISTLFEPGVADVDHIIPYSISFDDSYANKVLVKSSENRQKGNLLPCEYLKYNPANLERFMIWVNTSVRNYRKQQRLLKQSITAEDRNKWKERQLNDTKYISRFMLNYIRDYLKFATVDNLGKRQVISVNGSITAYMRKRWGLKKDRLAGDLHHAMDAAVVACISESMIRKITRYSQYCEAKSIRNRFIDYETGEIINPLQKRFGVRFIEPWDKFKVELESRLSADPALRIQTYNLKNYLNPENVKPIFVSRMPQRKNRGPAHKDTIRSGRLAAKGLTVSKVEITKLKLDADGEIKGYYYPGSDLKLYNALKERLHDFGGVALVAFKETFYKPAAAGKPASPVKKVKIIDSCTLNVNVGYGIAANGNMLRIDVFKKTDGYYWVPIYVSDTVKSTLPNKAVLAAKPIKLWVEMHDDDFVFSLYPNDLIRFVHKSGVGATCWDKTKVTLKESFMYYIKASISTASISVESHDSSYTIPSLGVKTLALIEKWNVDVLGNRSLVKNETRQYFPGQTK

SEQ ID NO: 18826 - protein, 1070 aa, unidentified
  REGION 1..1070: note = Cas Enzyme sequence
MNYRLGLDIGITSVGWAVLEHNEEEEPVKIVDLGVRIFDRAENPKDGSSLARPRREARSARRRIRRHRHRIERIKRLLEDYRVISLAELESLYHSSQSLTDIYELRYYGLERRLSNQEWARVLIHLAQRRGFKSNRKKENEKEEGKLLAAVKSNQDIMHDKGYRTVGEMFYLDPKFALHKRNKADDYSHTIGRQQVLDEISLLFARQRELGNPHTTIEFENVYKDIVSGQRSFDLGPGDPSPYAGNQIEKMRGNCTFEKDCPRAAKACYSFELFNLYQKINSLRIESAQETSRFLTAEERELIVQLAHQKADLNYSTIRNILELRDEQWFNNLTYGLDNTKETEKKSKFNYLKSYHQIRKAMDSVSKGRIQQFTVSQLDLLGETLTLYKNEGSISRILSEAGFSKQDIDAVLSLNFRGFSHLSLKAIRNILPWLEKGQVYSEAATSAGYNFRGHDSQPQKYLPLKNEQLDNITNPVVRRAVSQSIKIINAIIRKYGSPQLICIELSREMGKSFDERKVIEKQIKENNALNEQVRQKIIEFGHSNPSGQDIVKMKLWQEQDGRCAYSGDPIPIERLFEPGVADVDHIVPYSISFDDSYANKVLVRSSENHQKGNLLPYEYMKNDPVKLERFIVWVNTSVKNYHKKQRLLKKSITDEDRNKWNERPLNDTKYISRFMLNYIRNNLQFAPAEYLGKRRVITVNGSITAFLRKMWGLKKERLAGDLHHAQDAVVVACVSESMIQKITRYYQYYETRYSSNHFVDRETGEIINARQEKFGIKFVEPWEGFRFELESRLSDDPVFRIKAYNLKNYLNPDEVKPVFVSRMPTRKNRGLANEATIRSPRLVEEGFFISKVNITDLILNANGEIKGYYQPQSDLRLYEALKSRLREFNGDGKKAFKEPFYKPTKTGKLGPLVKKVKVIEKSNLNVLVGSGIAANGDMIRIDVFKTEEGYFWVPIYVADTVKKTLPNKAALQSKPYELWPEMSDDDFIFSLYPNDLIRFQREKDKDEFMYYKKAGISTASITVESHDRSYSIPSLGVKTLLLLEKWEVDVLGNRYRVKKERRQYFPGQVR

SEQ ID NO: 18827 - protein, 1068 aa, unidentified
  REGION 1..1068: note = Cas Enzyme sequence
MIGGLAMKHAIGLDIGIASIGWSVINLERNRIEDLGVRVFPAPEHPKDGSSLAKKRREAGGARKRIQRKRSRLLGIRQLFQEYGVLSLQEMDALFQSPLNKNPYEIRVDGLSRRLSSTEWFQALYHIAKHRGFQSTKKTPPNSKEKEKEEGTLLEGIKNNASLLQEAKYRTVGEMILMDPKFQDHKRNKHGDYSHTIPQSLLREEIETLFFEQQRLGNPYTTDEFKRKILDTFASRLHFAAPGQIESRVGPCTFEAGEKRAPCMSWSAERFILFGKINNLRIRDYFRGERSLSIGEARDLANLAYQKPEVKYKDIRKLFDLDDTAYYSGIRYSGKDTEREKSEGAVFVRLKGTHELRRAITSKLGKEAWETYASTPEILDEIARTLTWLKNEEDIRKSLSDKNIPPYLIEAVRDLDFKGAINLSFKALHKILPHMENGLRYDEAWPKAGYQGPVSEIESVRSVLLPPEDFDDITNPVVKRSLHQTRKVINALVRKYGSPWSIHIELAREMGKSFDDRKKIKTMQEENNAEKERTKKDFIENYTREPSGTDLLKFRLWKEQGGFDPYHQVHIDSGRLFHQDDATYAEIDHIIPYSRSFDNSYTNKVLVLAEANRNKGNRTPREYIFSESRPEKWEAFVAWVEAQIRNGKKKSNLLRESFTLEDSNRMTERNLTDTRFITSHLANYLERCLVFSDPSPTSRKVLRVNGAVTATLRGKWGLHKDREAGHLHHALDAAVVAVTSHGLIQRITEYDQIRNSPGAKRNNGGARERTPQPWEGFSRELLARISPNPTEEIGKVSLPSYGAEESASLRPVFVSHMPVRKARGAAHKESVRSVKLGENGGTSIRTPLAKLDFKSLEKMVGKERDRRLYESLKERLVAYGGDGGKAFGGSAPPFYKPTKDGSRGPLVRSIKVFSPGTAGVLVRGGIAENDNLVRVDVYKYKTKFSLVPHYVPDIAKGIVKKRGVLAHKEEKDWEVIGDEHKFCFSLFPNDLIEIIQKGTAKTLGYYRGMDRSDGKIALNLHDGSNKKEIRVSTRTCDSIRKFQVGLLGDYHEVKKEKPPQGKIDDGLA

SEQ ID NO: 18828 - protein, 1003 aa, unidentified
  REGION 1..1003: note = Cas Enzyme sequence
LRARRLLKREGVLQAADFDENGLIKSLPNTPWQLRAAALDRKLTPLEWSAVLLHLIKHRGYLSQRKNEGETADKELGALRAGMKSNTQALKTGNFRTPAELALNKFEKESGHIRNQRGDYSHTFSREDLQAELVLLFEKQKEFGNPHVSDGLKEGIETLLMAQRPALSGDAIQKMLGHCTFEPTEPKAAKNTYTAERFIWLTKLNNLRILEQGSERPLTDTERATLMDEPYRKSKLTYAQVRKLLDLDDTAFFKGLRYGKDNAETSTLMEMKAYHAISRALEKEELKDKKSPLNLSPELQDEIGTAFSLFKTDEDITGSLKDRVQPEILEALLKHISFDKFVQISLKALRRIVPLMEQGKRYDEACAEIYGDHYGKKNTEEEIYLPPIPADEIRNPVVLRALSQARKVINAVVRRYGSPARIHIETAREVGKSFKDRKEIEKRQEENRKDREKAAAKFREYFPNFVGEPKSKDILKLRLYEQQHGKCLYSGKEINLGRLNEKGYVEIDHALPFSRTWDDSFNNKVLVLGSENQNKSNQTPYEYFNGKDNSREWQEFKARVETSRFPRSKKQRILLQKFDEDGFKERNLNDTCYVNRFLCQFIADRMRLTGKGKRRVFASNGQITNLLRGFWGLRKVRAENDRHHALDAVVVACSTVAMQQKITHFVHHKEMNAFDGKTIDKETGEVLHQKTHFPQPWEFFAQEVMLRVFGKPDGKPEFEEADTPEKLRALLAEKLSSRPEAVHEYVTPLFVSRAPNRKMSGAHKDTLRSAKRFVKHNEKISVKRVWLTEIKLADLENMVNYKNGREIELYEALKARLGAYGGNAKQAFDPKDNPFYKKGGQLVKAVRVEKTQESGVLLNKKNAYTIADNGDMVRVDVFCKVDKKGKNQYFIVPIYAWQVAENILPDIDCKGYRIDDSYTFCFSLHKYDLIAFQKDEKSKVEFAYYINCDSSNGRFYLAWHDKGSKEQQFRISTQNLVLMQKYQIDELGKEIRPCRLKKRPPVR

SEQ ID NO: 18829 - protein, 1081 aa, unidentified
  REGION 1..1081: note = Cas Enzyme sequence
MAAFKPNPINYILGLDIGISSVGWAMVEIDEAENPIRLIDLGVRIFERAEVPKTGDSLAVARRLARSVRRLTRRRAHRLLRARRLLKREGVLQAADFDENGLIKSLPNTTWQLRAAALDRKLTSLEWSAVLLHLIKHRGYLSQRKNEDETADKELGALLKGLADNAHALQTGDFRTPAELALNKFEKESGHIRNQRGDYSHTFSRKDLQAELNVLFEKQKEFGNPHVTDGLKEGIETLLMTQRPALSGDAVQKMLGHCAFEPTEPKAAKNTYTAERFVWLTKLNNLRILEQGSERPLTDTERATLMDEPYRKSKLTYAQARKLLDLDDTAFFKGLRYGKDNAEASTLMEMKAYHAISRALEKEGLKDKKPPLNLSPELQDEIGTALSLFKTDEDITGRLKDRVQPEILEALLKHISFDKFVQISLKALRRIVPLMEQGKRYDEACAEIYGDHYGKKNTEEKIYLPPIPADEIRNPVVLRALSQARKVINGVVRRYGSPARIHIETAREVGKSFKDRKEIEKRQEENRKDREKAAAKFREYFPNFVGEPKSKDILKLRLYEQQHGKCLYSGKEINLGRLNEKGYVEIDHALPFSRTWDDSFNNKVLVLGSENQNKGNQTPYEYFNGKDNSREWQEFKARVETGRFPRSKKQRILLQKFDEDGFKERNLNDTRYVNRFLCQFVADHMRLTGKGKRRVFASNGQITNLLRGFWGLRKVRAENDRHHALDAVVVACSTVAMQQKITRFVRYKEMNAFDGKTIDKETGEVLHQKTHFPQPWEFFAQEVMIRVFGKPDGKPEFEEADTSEKLRTLLAEKLSSRPEAVHEYVTPLFVSRAPNQKMSGQGHMETVKSAKRLDEGISVLRVPLTQLKLKDLEKMVNREREPKLYEGLKARLEAHKDDPAKAFAEPFYKYDKAGNRTQQVKAVRVEQVQKTGVWVRNHNGIADNATMVRVDVFEKGGKYYLIPIYSWQVAKGILPDRAVVAYADEEDWTVIDESFRFKFVLYANDLIKVRLKKDSFLGYFSGLDRATGAISLREHDMEKSKGKDGIYRIGVKTALSFQKYQIDELGKEIRPCRLKKRPPVR

SEQ ID NO: 18830 - protein, 1093 aa, unidentified
  REGION 1..1093: note = Cas Enzyme sequence
MTAFKPNPLNYILGLDIGIASVGWAMVEIDDKENPVRLIDLGVRVFECAEVPKTGDSLAAARRSARSIRRLTRRRAHRLLRARRLLKHEGVLKPEDFDENGFIKLLPNTPWQLRAAALDRKLTPLEWAAVLLHLVKHRGYLSQRKNEGETADKELGALLKGVADNTHALQAGNFRTPAELALNKFEKESGHIRNQRGDYSHTFSRKDLQAELVLLFEKQKKFGNPYVSDDLKNGIDNLLMTQRDSIPDESAILRMQGKCTFEKNKSRAAKHSWSAERFIWLSKLANLRITDEFGTRKLTEIERQILIDLPYKLKTVNYQQVRNALTTLSPNALFNIGYHQKDKKGEIKSSDKIEKDTKFMEMKFWHKIKETLEGNGRKTEWQSLSRNHNLLDEIGTVFTICKNDERRKALLSGKIKEDQDILDILCDHVDFTCTVNLSLEALKNILPFMEQGDDYDTAWRKVYPPQSTKKESVLPPIPADEIRNPVVLRALSQARKVINAIVHRYGSPARIHIETAREVGKSFKDRKEIEKRQEENRKDREKAAAKFREYFPNFVGEPKSKDILKLRLYEQQHGKCLYSGKAIDIRRLNGKGYVEIDHALPFSRTWDDSFNNKVLVLGSENQNKGNRTPYEYLNGKDNSREWLEFKARVETSRFPHSKKQRVLLQKFDEKGFKERNLNDTRYVNRFLCQFVADHMQLTRKGKRRVFASNGQITNLLRGFWGLRKVRADNDRHHALDAVVVACSTVAMQEKITRFVRYKEMNAFDGKTIDKETGEVLHQKTHFPQPWKFFTQEVMIRVFGKPDGEPEFEEADTPEKLRALLAEKLPSRPEAIHEYVMPLFVSRAPTRKMSGQGHDATLFSAKHFKKSKEAVKRKLLTEIKIADLDNMINKDRERELFEALKNRLSQYNNDPQKAFDPKTNPFYKKGGQLVKSIRVTEPKKMKTGLLLNKDAAVAKNSDMVRVDVFEKGGKYYLVPIYSWQVAKEILPDRAIIAFKDEEEWQLIDDSFNFKFPLHPNDLVEVITKKARIFGYFASCHRGTGNINIRIYDLDNKVGKNGILEGIGVKTALSFQKYQIDELGKEIRPCHLKKRPPVR

SEQ ID NO: 18831 - protein, 1026 aa, unidentified
  REGION 1..1026: note = Cas Enzyme sequence
PQPAAAGRWARGVPPLPRRRAHRLLRARRLLKREGVLQAADFDENGLIKSLPNTPWQLRAAALDRKLTPLEWSAVLLHLIKHRGYLSQRKNEGETADKELGALRAGMKSNTQALKTGNFRTPAELALNKFEKESGHIRNQRGDYSHTFSREDLQAELVLLFEKQKEFGNPHVSDGLKEGIETLLMAQRPALSGDAIQKMLGHCTFEPTEPKAAKNTYTAERFIWLTKLNNLRILEQGSERPLTDTERTILINQPYKKKLTYAQARKLLGLEDTAFFKGLHYGKDNAETSTLMEMKAYHAISRALEKEGLKDKKSPLNLSPELQDEIGTVFSLFKTDEDITGHLKDRVQPEILEALLKHISFDKFVQISLKALRRIVPLMEQGKRYDEACAEIYGDHYGKKNTEEEIYLPPIPADEIRNPVVLRALSQARKVINAVVRRYGSPARIHIETAREVGKSFKDRKEIEKRQEENRKDREKAAAKFREYFPNFVGEPKSKDILKLRLYEQQHGKCLYSGKEINLGRLNEKGYVEIDHALPFSRTWDDSFNNKVLVLGSENQNKGNQTPYEYFNGKDNSREWQEFKARVETSRFPRSKKQRILLQKFDEDGFKERNLNDTRYVNRFLCQFIADRMRLTGKGKRRVFASNGQITNLLRGFWGLRKVRAENDRHHALDAVVVACSTVAMQQKITHFVHHKEMNAFDGKTIDKETGEVLHQKTHFPQPWEFFAQEVMLRVFGKPDGKPEFEEADTPEKLRALLAEKLSSRPEAVHEYVTPLFVSRAPNRKMSGQGHMETVKSAKRLDEGISVLRVPLTQLKLKDLEKMVNREREPKLYEALKARLETHKDDPAKAFAEPFYKYDKAGNRTQQVKAVRVEQVQKTGVWVHNHNGIADNATMVRVDVFEKGGKYYLVPIYSWQVAKGILPDRAVVQGKDEEDWTVMDDSFEFKFVLYANDLIKLTAKKNEFLGYFVSLNRATGAIDIRTHDTDSTKGKNGIFQSVGVKTALSFQKYQIDELGKEIRPCRLKKRPPVR

SEQ ID NO: 18832 - protein, 1082 aa, unidentified
  REGION 1..1082: note = Cas Enzyme sequence
MTAFKPNPINYILGLDIGIASVGWAMVEIDEDENPICLIDLGVRVFERAEVPKTGDSLAAARRLARSVRRLTRRRAHRLLRARRLLKREGVLQAADFDENGLIKSLPNTPWQLRAAALDRKLTPLEWSAVLLHLIKHRGYLSQRKNEGETADKELGALLKGVADNAHALQTGNFRTPAELALNKFEKESGHIRNQRGDYSHTFSREDLQAELVLLFEKQKEFGNPHISDGLKEGIETLLMTQRTALSGDAVQKMLGYCTFEPTEPKAAKNTYTAERFVWLTKLNNLRILEQGNERPLTDTERATLMDEPYRKSKLTYAQARKLLELDDTAFFKGLRYGKDNAEASTLMEMKAYHAISRALEKEGLKDKKSPLNLSPELQDEIGTAFSLFKTDEDITGRLKDRVQPEILEALLKHISFDKFVQISLKALRRIVPLMEQGKRYDEACAEIYGDHYGKKNTEEEIYLPPIPADEIRNPVVLRALSQARKVINGVVRRYGSPARIHIETAREVGKSFKDRKEIEKRQEENRKDREKAAAKFREYFPNFVGEPKSKDILKLRLYEQQHGKCLYSGKEINLGRLNEKGYVEIDHALPFSRTWDDSFNNKVLVLGSENQNKGNQTPYEYFNGKDNSREWQEFKARVETSRFPRSKKQRILLQKFDEDGFKERNLNDTRYVNRFLCQFIADHMRLTGKGKRRVFASNGQITNLLHVFWGLRKVRAENDRHHALDAVVVACSTVAMQQKITRFVRYKEMNAFDGKTIDKETGEVLHQKAHFPQPWEFFAQEVMIRVFGKLDGKPEFEEADTPEKLRTLLAEKLSSRPEAVHEYVTPLFVSRAPNRKMSGAHKDTLRSAKRFVKHNEKISVKRVWLTEIKLADLENMVNYKNGREIELYDALKARLEKYGGNAKQAFDPNNNPFYKKGGQLVKAVRVEKTQESGVLLNKKNAYTIADNGDIVRVDVFCKADKKGKNQYFIVPIYAWQVAENILPDIDCKGYRIDDSYTFCFSLHKYDLITFQKDEKSKVEFAYYINCDSSDGRFYLAWHDKGSKEQQFRISTQNLVLMQKYQIDELGKEIRPCRLKKRPPVR

SEQ ID NO: 18833 - protein, 1082 aa, unidentified
  REGION 1..1082: note = Cas Enzyme sequence
MTAFKPNPLNYILGLDIGIASVGWAMVEIDDKENPVRLIDLGVRVFERAEVPKTGDSLAAARRLARSVRRLTRRRAHRLLRARRLLKHEGVLKPEDFDENGFIKLLPNTPWQLRAAALDRRLAPLEWAAVLLHLVKHRGYLSQRKNEGETADKELGALLKGVADNTHTLQAGDFRTPAELALNKFEKESGHIRNQRGDYSHTFSRKDFQAELVLLFKKQKEFGNPHISDGLKEGIETLLMAQRPALSGDAVQKMLGYCTFEPTEPKAAKNTYTAERFIWLTKLNNLRILEQGSERPLTDTQRATLMDEPYRKSKLTYAQARKLLDLDDTAFFKGLRYGKDNAEASTLMEMKAYHAISRALEKEGLKDKKSPLNLSPELLDEIGTVFSLFKTDEDITGRLKDRVQPEILEALLKHISFDKFVQISLKALRRMVPLMEQGKRYDEACAEIYGDHYGKKNTEEEIYLPPIPADEIRNPVVLRALSQARKVINAVVRRYGSPARIHIETAREVGKSFKDRKEIEKRQEENRKDREKAAAKFREYFPNFVGEPKSKDILKLRLYEQQHGKCLYSGKEIDLGRLNEKGYVEIDHALPFSRTWDDSFNNKVLVLGSENQNKDNQTPYEYFNGKDNSREWQEFKARVETSRFPRSKKQRILLQKFDEDGFKERNLNDTRYVNRFLCQFIADHMLLTGKGKRRVFASNGQITNLLRGFWGLRKVRAENDRHHALDAVVVACSTVAMQQKITRFVRYKEMNAFDGKTIDKETGEVLHQKTHFPQPWEFFAQEVMIRVFGKPDGKPEFEEADTPEKLRTLLAEKLSSRPEAVHEYVTPLFVSRAPNRKMSGQGHMETVKSAKRLDEGISVLRVPLTQLKLKDLEKMVNREREPKLYEALKARLEAHKDDPAKAFAEPFYKYDKAGNRTQQVKAVRVEQVQKTGVWVRNHNGIADNATMVRVDVFEKGGKYYLVPIYSWQVAKGILPDRAIIAFKDEEDWQLIDDSFNFKFSLHPNDLIEVITKKARIFGYFASCHRGTGNINIRIHDLDNKVGKNGILEGIGVKTALSFQKYQLDELGKEIRPCRLKKRPSVR

SEQ ID NO: 18834 - protein, 1082 aa, unidentified
  REGION 1..1082: note = Cas Enzyme sequence
MAAFKPNPINYVLGLDIGIASVGWAMVEIDEEENPIRLIDLGVRVFERAEVPKTGDSLAAVRRLARSVRRLTRRRAHRLLRARRLLKREGVLQAADFDENGLIKSLPNTPWQLRTAALDRKLTPLEWSAVLLHLIKHRGYLSQRKNEGETADKELGALLKGVADNAHALQTSNFRTPAELALNKFEKESGHIRNQRDDYSHTFSRKDLQAELNLLFEKQKEFGNPHVSDGLKEGIETLLMTQRPALSGDAVQKMLGHCTFEPTEPKAAKNTYTAERFIWLTKLNNLRILEQGSERPLTATERATLMDEPYRKSKLTYAQARKLLGLEDTAFFKGLHYGKDNAETSTLMEMKAYHAISRALEKEGLKDKKSPLNLSPELQDEIGTAFSLFKTDEDITGRLKDRVQPEILEALLKHISFDKFVQISLKALRRIVPLMEQSKRYDEACAEIYGDHYGKKNAEEAIYLPPIPADEIRNSVVLRALSQARKVINAVVRRYGSPARIHIETAREVGKSFKDRKEIEKRQEENRKDREKAAAKFREYFPNFVGEPKSKDILKLRLYEQQHGKCLYSGKEINLGRLNEKGYVEIDHALPFSRTWDDSFNNKVLVLGSENQNKSNQTPYEYFNGKDNSREWQEFKARVETSRFPRSKKQRILLQKFDEDGFKERNLNDTRYVNRFLCQFIADRMRLTGKGKRRVFASNGQITNLLRGFWGLRKVRAENDRHHALDAVVVACSTVAMQQKITHFVRYKEMNAFDGKTIDKETGEVLHQKAHFPQPWEFFAQEVMIRVFGKPDGKPEFEEADTPEKLRTLLAEKLSSRPEAVHEYVTPLFVSRAPNRKMSGQGHMETVKSAKRLDEGISVLRVPLTQLKLKDLEKMVNREREPKLYEALKARLETHKDDPAKAFAEPFYKYDKAGNRTQQVKAVRVEQVQKTGVWVRNHNGIADNATMVRVDVFEKGGKYYLVPIYSWQVAKGILPNRAVVQGKDEEDWTVMDDSFEFKFVLYANDLIKLTAKKNEFLGYFVSLNRATGAIDIRTHDTDSTKGKNGIFQSVGVKTALSFQKYQIDELGKEIRSCRLKKRPPVR

SEQ ID NO: 18835 - protein, 1081 aa, unidentified
  REGION 1..1081: note = Cas Enzyme sequence
MAAFKPNPMNYILGLDIGIASVGWAMVEIDEEENPIRLIDLGVRIFERAEVPKTGDSLAMARRLARSVRRLTRRRAHRLLRARRLLKREGVLQAADFDENGLIKSLPNTPWQLRAAALDRKLMPLEWSSVLLHLIKHRGYLSQRKNEGETADKELGALLKGVADNAHTLQTGDFRTPAELALNKFEKESGHIRNQRGDYSHTFSRKDLQAELNLLFEKQKEFGNPHVSDGLKEGIETLLMAQRPALSGDAVQKMLGHCTFEPTEPKAAKNTYTAERFIWLTKLNNLRILEQGSERPLTDTERATLMDEPYRKSKLTYAQARKLLELEDTAFFKGLRYGKDNTEASTLMEMKAYHAISRALEKEGLKDKKSPLNLSPELQDEIGTAFSLFKTDEDITGRLKDRVQPEILEALLKHISFDKFVQISLKALRRIVPLMEQGKRYDEACAEIYGDHYGKKNAEEEIYLPPIPADEIRNPVVLRALSQARKVINGVVRRYGSPARIHIETAREVGKSFKDRKEIEKRQEENRKDREKAAAKFREYFPNFVGEPKSKDILKLRLYEQQHGKCLYSGKEINLGRLNEKGYVEIDHALPFSRTWDDSFNNKVLVLGSENQNKGNQTPYEYFNGKGNSREWQEFKARVETSRFPRSKKQRILLQKFDEDGFKERNLNDTRYVNRFLCQFVADHMRLTGKGKRRVFASNGQITNLLRGFWGLRKVRAENDRHHALDAVVVACSTVAMQQKITRFVRYKEMNAFDGKTIDKETGEVLHQKTHFPQPWEFFAQEVMIRVFGKPDGKPEFEEADTPEKLRALLAEKLSSRPEAVHEYVTPLFVSRAPNRKMSGQGHMETVKSAKRLDEGISVLRVPLTQLKLKDLEKMVNREREPKLYEALKARLEAHKDDPAKAFAEPFYKYDKAGNRTQQVKAVRVEQVQKTGVWVRNHNGIADNATMVRVDVFEKGGKYYLVPIYSWQVAKGILPDRAVVAYADEENWTVIDESFRFKFVLYSNDLIKVRLKKDSFLGYFSGLDRATGAISLREHDMEKSKGKDGIYRIGVKTALSFQKYQIDELGKEIRPCRLKKRPPVR

SEQ ID NO: 18836 - protein, 999 aa, unidentified
  REGION 1..999: note = Cas Enzyme sequence
RILKREGVLQAADFDENGLIKSLPNTPWQLRAAALDRKLTPLEWSAVLLHLIKHRGYLSQRKNEGETADKELGALLQGLANNAHALQTGDFRTPAELALNKFEKESGHIRNQRGDYSHTFSRKDLQAELNLLFEKQKEFGNPHVSDGLKEGIETLLMTQRPALSGDAVQKMLGHCTFEPTEPKAAKNTYTAERFVWLTKLNNLRILEQGSERPLTATERATLMDEPYRKSKLTYAQARKLLGLEDTAFFKGLHYGKDNAETSTLMEMKAYHAISRALEKEGLKDKKSPLNLSPELQDEIGTAFSLFKTDEDITGRLKDRVQPEILEALLKHISFDKFVQISLKALRRIVPLMEQSKRYDEACAEIYGDHYGKKNAEEAIYLPPIPADEIRNSVVLRALSQARKVINAVVRRYGSPARIHIETAREVGKSFKDRKEIEKRQEENRKDREKAAAKFREYFPNFVGEPKSKDILKLRLYEQQHGKCLYSGKEINLGRLNEKGYVEIDHALPFSRTWDDSFNNKVLVLGSENQNKSNQTPYEYFNGKDNSREWQEFKARVETSRFPRSKKQRILLQKFDEDGFKERNLNDTRYVNRFLCQFIADRMRLTGKGKRRVFASNGQITNLLRGFWGLRKVRAENDRHHALDAVVVACSTVAMQQKITHFVRYKEMNAFDGKTIDKETGEVLHQKAHFPQPWEFFAQEVMIRVFGKPDGKPEFEEADTPEKLRTLLAEKLSSRPEAVHEYVTPLFVSRAPNRKMSGQGHMETVKSAKRLDEGISVLRVPLTQLKLKDLEKMVNREREPKLYEALKARLETHKDDPAKAFAEPFYKYDKAGNRTQQVKAVRVEQVQKTGVWVRNHNGIADNATMVRVDVFEKGGKYYLVPIYSWQVAKGILPNRAVVQGKDEEDWTVMDDSFEFKFVLYANDLIKLTAKKNEFLGYFVSLNRATGAIDIRTHDTDSTKGKNGIFQSVGVKTALSFQKYQIDELGKEIRSCRLKKRPPVR

SEQ ID NO: 18837 - protein, 1081 aa, unidentified
  REGION 1..1081: note = Cas Enzyme sequence
MAAFKPNPINYILGLDIGIASVGWAMVEIDEEENPICLIDLGVRVFERAEVPKTGDSLAMARRLARSVRRLTRRRAHRLLRTRRLLKREGVLQDTDFDENGLIKSLPNTPWQLRAAALDRKLMPLEWSAVLLHLIKHRGYLSQRKNEGETADKELGALLKGVADNAHALQTGDFRTPAELALNKFEKESGHIRNQRGDYSHTFSRKDLQAELNLLFEKQKEFGNPHVSDGLKEGIETLLMAQRPALSGDAVQKMLGHCTFEPTEPKAAKNTYTAERFVWLTKLNNLRILEQGSERPLTDTERATLMDEPYRKSKLTYAQARKLLGLEDTAFFKGLRYGKDNAEASTLMEMKAYHAISRALEKEGLKDKKSPLNLSPELQDEIGTAFSLFKTDEDITGRLKDRVQPEILEALLKHISFDKFVQISLKALRRIVPLMEQGKRYDEACAEIYGDHYGKKNAEEEIYLPPIPADEIRNPVVLRALSQARKVINGVVRRYGSPARIHIETAREVGKSFKDRKEIEKRQEENRKDREKAAAKFREYFPNFVGEPKSKDILKLRLYEQQHGKCLYSGKEINLGRLNEKGYVEIDHALPFSRTWDDSFNNKVLVLGSENQNKGNQTPYEYFNGKGNSREWQEFKARVETSRFPRSKKQRILLQKIDEDDFKERNLNDTRYVNRFLCQFVADHMRLTGKGKRRVFASNGQITNLLRGFWGLRKVRAENDRHHALDAVVVACSTVAMQQKITRFVRYKEMNAFDGKTIDKETGEVLHQKAHFPQPWEFFAQEVMIRVFGKPDGKPEFEEADTPEKLRALLAEKLSSRPEAVHEYVTPLFVSRAPNRKMSGQGHMETVKSAKRLDEGISVLRVPLTQLKLKDLEKMVNREREPKLYEALKARLEAHKDDPAKAFAEPFYKYDKAGNRTQQVKAVRVEQVQKTGVWVRNHNGIADNATMVRVDVFEKGGKYYLVPIYSWQVAKGILPDRAVVAYADEENWTVIDESFRFKFVLYSNDLIKVRLKKDSFLGYFSGLDRATGAISLREHDMEKSKGKDGIYRIGVKTALSFQKYQIDELGKEIRPCRLKKRPPVR

SEQ ID NO: 18838 - protein, 1082 aa, unidentified
  REGION 1..1082: note = Cas Enzyme sequence
MAAFKPNPINYILGLDIGIASIGWAMVEIDEEENPIRLIDLGVRVFERAEAPKTGDSLAAARRLARSVRRLTRRRAHRLLRARRLLKREGVLQAADFDENGLIKSLPNTPWQLRAAALDRKLTPLEWSAVLLHLIKHRGYLSQRKNEGETADKELGALLQGLANNAHALQTGDFRTPAELALNKFEKESGHIRNQRGDYSHTFSRKDLQAELNLLFEKQKEFGNPHVSDGLKEGIETLLMTQRPALSGDAVQKMLGHCTFEPTEPKAAKNTYTAERFVWLTKLNNLRILEQGSERPLTATERATLMDEPYRKSKLTYAQARKLLGLEDTAFFKGLHYGKDNAETSTLMEMKAYHAISRALEKEGLKDKKSPLNLSPELQDEIGTAFSLFKTDEDITGRLKDRVQPEILEALLKHISFDKFVQISLKALRRIVPLMEQSKRYDEACAEIYGDHYGKKNAEEAIYLPPIPADEIRNSVVLRALSQARKVINAVVRRYGSPARIHIETAREVGKSFKDRKEIEKRQEENRKDREKAAAKFREYFPNFVGEPKSKDILKLRLYEQQHGKCLYSGKEINLGRLNEKGYVEIDHALPFSRTWDDSFNNKVLVLGSENQNKSNQTPYEYFNGKDNSREWQEFKARVETSRFPRSKKQRILLQKFDEDGFKERNLNDTRYVNRFLCQFIADRMRLTGKGKRRVFASNGQITNLLRGFWGLRKVRAENDRHHALDAVVVACSTVAMQQKITHFVRYKEMNAFDGKTIDKETGEVLHQKAHFPQPWEFFAQEVMIRVFGKPDGKPEFEEADTPEKLRTLLAEKLSSRPEAVHEYVTPLFVSRAPNRKMSGQGHMETVKSAKRLDEGISVLRVPLTQLKLKDLEKMVNREREPKLYEALKARLETHKDDPAKAFAEPFYKYDKAGNRTQQVKAVRVEQVQKTGVWVRNHNGIADNATMVRVDVFEKGGKYYLVPIYSWQVAKGILPNRAVVQGKDEEDWTVMDDSFEFKFVLYANDLIKLTAKKNEFLGYFVSLNRATGAIDIRTHDTDSTKGKNGIFQSVGVKTALSFQKYQIDELGKEIRSCRLKKRPPVR

SEQ ID NO: 18839 - protein, 1082 aa, unidentified
  REGION 1..1082: note = Cas Enzyme sequence
MTAFKPNPINYILGLDIGIASVGWAMVEIDEDENSICLIDLGVRVFERAEVPKTGDSLAAARRLARSVRRLTRRRAHRLLRARRLLKREGVLQAADFDENGLIKSLPNTPWQLRAAALDRKLTPLEWSAVLLHLIKHRGYLSQRKNEGETADKELGALLKGVADNAHALQTGDFRTPAELALNKFEKECGHIRNQRGDYSHTFSRKDLQAELNLLFEKQKEFGNPHVSDGLKEGIETLLMAQRPALSGDAVQKMLGHCTFEPTEPKAAKNTYTAERFIWLTKLNNLRILEQGSERPLTDTERATLMDEPYRKSKLTYAQARKLLGLEDTAFFKGLRYGKDNAEASTLMEMKAYHAISRALEKEGLKDKKSPLNLSSELQDEIGTAFSLFKTDEDITGRLKDRVQPEILEALLKHINFDKFIQISLKALRRIVPLMEQGKRYDEACAEIYGDHYGKKNTEEEIYLPPIPADEIRNPVVLRALSQARKVINAVVRRYGSPARIHIETAREVGKSFKDRKEIEKRQEENRKDREKAAAKFREYFPNFVGEPKSKDILKLRLYEQQHGKCLYSGKEINLGRLNEKGYVEIDHALPFSRTWDDSFNNKVLVLGSENQNKGNQTPYEYFNGKDNSRKWQEFKARVETSRFPRSKKQRILLQKFDEDGFKERNLNDTRYVNRFLCQFIAERMRLTGKGKRRVFASNGQITNLLRGFWGLRKVRAENDRHHALDAVVVACSTVAMQQKITRFVRYKEMNAFDGKTIDKETGEVLHQKTHFPQPWEFFAQEVMIRVFGKPDGKPEFEEADTPEKLRALLAEKLSSRPEAVHEYVTPLFVSRAPNRKMSGQGHMETVKSAKRLDEGISVLRVPLTQLKLKDLEKMVNREREPKLYEALKARLEAHKDDPAKAFADPFYKYDKAGNRTQQVKAVRVEQVQKTGVWVRNYNGIADNATMVRVDVFEKGGKYYLVPIYSWQVAKGILPDRAVVQGKDEEDWTVMDDSFEFKFVLYANDLIKVIAKKNEFHGYFAGLNRATGTIDIRVHDLDSTKGKNGIFQSVGVKTALSFQKYQIDELGKEIRPCRLKKRPPVR

SEQ ID NO: 18840 - protein, 1082 aa, unidentified
  REGION 1..1082: note = Cas Enzyme sequence
MAAFKPNPINYIIGLDIGIASVGWAMVEIDEEENPIRLIDLGVRVFERAEVPKTGDSLAAARRLARSVRRLTRRRAHRLLRARRLLKREGVLQAADFDENGLIKSLPNTPWQLRAAALDRKLTPLEWSAVLLHLIKHRGYLSQRKNEGETADKELGALLKGVADNAHALQTGDFRTPAELALNKFEKESGHIRNQRGDYSHTFSRKDLQAELVLLFEKQKEFGNPHISDGLKEGIETLLMAQRPALSGDAVQKMLGYCTFEPTEPKAAKNTYTAERFIWLTKLNNLRILEQGSERPLTDTERATLMDEPYRKSKLTYAQARKLLDLDDTAFFKGLRYGKDNTEASTLMEMKAYHAISRALEKEGLKDKKSPLNLSPELQDEIGTAFSLFKTDEDITGRLKDRVQPEILEALLKHINFDKFVQVSLKALRRIVPLMEQGKRYDEACAETYGDHYGEKNSEEMLYLPPIPADEIRNPVVLRALSQARKVINSVVRRYGSPDRIHIETAREVGKSFKDRKEIEKRQEENRKDREKAAAKFREYFPNFVGEPKSKDILKLRLYEQQHGKCLYSGKEINLGRLNEKGYVEIDHALPFSRTWDDSFNNKVLVLGSENQNKGNQTPYEYFNGKDNSREWQEFKARVETSRFPRSKKQRILLQKFDEDGFKERNLNDTRYVNRFLCQFVADHMLLTGKGKRRVFASNGQITNLLRGFWGLRKVRTENDRHHALDAVVVACSTVAMQQKITRFVRYKEMNAFDGKTIDKETGEVLHQKAHFPQPWEFFAQEVMIRVFGKPDGKPEFEEADTPEKLRTLLAEKLSSRPEAVHEYVTPLFVSRAPNRKMSGAHKDTLRSAKRFVKHNEKISVKRVWLTEIKLADLENMVNYKNGREIELYEALKARLGAYGGNAKQAFDPKDNPFYKKGGQLVKAVRVEKTQESGVLLNKKNAYTIADNGDMVRVDVFCKVDKKGKNQYFIVPIYAWQVAENILPDIDCKGYRIDDSYTFCFSLHKYDLIAFQKDEKSKVEFAYYINCDSSNGRFYLAWHDKGSKEQQFRISTQNLVLMQKYQIDELGKEIRPCRLKKRPPVR

SEQ ID NO: 18841 - protein, 1081 aa, unidentified
  REGION 1..1081: note = Cas Enzyme sequence
MAAFKPNPINYILGLDIGIASVGWAMVEIDEAENPIRLIDLGVRIFERAEVPKTGDSLAMARRLARSVRRLTRRRTHRLLRARRLLKREGVLQAADFDENGLIKSLPNTPWQLRAAALDRKLMPLEWSAVLLHLIKHRGYLSQRKNEGETADKELGALLKGVADNAHALQTGDFRTPAELALNKFEKENGHIRNQRGDYSHTFSRKDLQAELNVLFEKQKEFGNPHISDGLKEGIETLLMTQRPALSGDAVQKMLGHCTFEPTEPKAAKNTYTAERFIWLTKLNNLRILEQGSERPLTDTERATLMDEPYRKSKLTYAQARKLLDLDDTAFFKGLRYGKDNAEASTLMEMKAYHAISRALEKEGLKDKKSPLSLAPELQDEIGTAFSLFKTDEDITGRLKDRVQPEILEALLKHISFDKFVQISLKALRRIVPLMEQGKRYDEACAEIYGDHYGKKNAEEEIYLPPIPADEIRNPVVLRALSQARKVINGVVRRYGSPARIHIETAREVGKSFKDRKEIEKRQEENRKDREKAAAKFREYFPNFVGEPKSKDILKLRLYEQQHGKCLYSGKEINLGRLNEKGYVEIDHALPFSRTWDDSFNNKVLVLGSENQNKSNQTPYEYFNGKDNSREWQEFKARVETSRFPRSKKQRILLQKFDEDGFKERNMNDTRYVNRFLCQFVTDHMQLTGKGKRRVFASNGQITNLLRGFWGLRKVRVENDRHHALDAVVVACSTVAMQQKITRFVRYKEMNAFDGKTIDKETGEVLHQKTHFPQPWEFFAQEVMIRVFGKPDGKPKFEEADTPEKLRTLLAEKLSSRPEAVHEYVTPLFVSRAPNRKMSGQGHMETVKSAKRLDEGISVLRVPLTQLKLKDLEKMVNREREPKLYEALKARLEAHKDDPAKAFAEPFYKYDKAGNRTQQVKAVRVEQVQKTGVWVRNHNGIADNATMVRVDVFEKGGEYYLVPIYSWQVAKGILPNRAVVQKKDEEDWTVMDESFEFKFVLYANDLIKVQLKKDSFFGYFIKLDRATGQISLRHHDLDKSKGKDGIYRIGVKTALSFQKYQIDELGKEIRPCRLKKRPPVR

SEQ ID NO: 18842 - protein, 1019 aa, unidentified
  REGION 1..1019: note = Cas Enzyme sequence
VARSVRRLPRRRAHRLLRARRLLKHEGVLKPEDFDENGFIKLLPNTPWQLRAAALDRRLAPLEWAAVLLHLVKHRGYLSQRKNEEQTADKELGALLKGVADNTHALQAGNFRTPAELALNKFEKESGHIRNQRGDYSHTFSRKDLQAELVLLFEKQKEFGNPYVSDDLKNGIENLLMTQRPALSGDAIQKMLGHCTFEPTEPKAAKNTYTAERFIWLTKLNNLRILNQGSERPLTDAERTTLMDEPYKKSKLTYAQARKLLGLDDTAFFKGLRYGKDNAESATLMEMKAYHTISRTLEKEGLKDKKSPLSLSPELQDEIGTAFSLFKTDEEITGRLKGCLQSEILDALLKHISFDKFVQISLKALRRIVPLMEQGKRYDEACAEIYGDHHGRKNSEETLYLPPIPADEIRNPVVLRALSQARKVINGVLRRYGSPARIHIETAREVGKSFKDRKEIEKRQEENRKDREKAAAKFREYFPNFVGEPKSKDILKLRLYEQQHGKCLYSGKEIDLGRLNEKGYVEIDHALPFSRTWDDSFNNKVLVLGSENQNKGNRTPYEYFNDKDNSREWQEFKARVETSRFPHSKKQRILLQKFDEEGFKERNLNDTRYVNRFLCKFVADHMQLTGKGKRRVFASNGQITNLLRGFWGLRKVRAENDRHHALDAVVVACSTVAMQQRITRFVRYKEMNAFDGKTVDKETGEVLHQKTHFPQPWEFFAQEVMIRVFGKPDGKPELEEADTPEKLRALLAEKLSSRPEAVHEYVTPLFVSRAPNRKMSGQGHMETVKSAKRLDEGISVLRVPLTQLKLKDLEKMVNREREPKLYEGLKARLEAHKDDPAKAFAEPFYKQNKAGNPTQQVKAVRIEQVQKTGVWVRNRNGVADNATMVRIDVFEKGGKYYLVPIYSWQVAKGILPDRAVVQGRDEEDWTVMDDSFEFKFVLYANDLIKLTAKKNEFLGYFVSLNRANGAIDIRTHDTDSTKGKNGIFQSVGVKTALSFQKYQIDELGKEIRPCRLKKRPPVR

SEQ ID NO: 18843 - protein, 1086 aa, unidentified
  REGION 1..1086: note = Cas Enzyme sequence
MEKQMTAFKPNPLNYILGLDIGIASVGWAMVEIDDKENPVRLIDLGVRVFERAEVPKTGDSLAAARRLARSVRRLTRRRAHRLLRARRLLKHEGVLKPEDFDENGFIKLLPNTPWQLRAAALDRRLAPLEWAAVLLHLVKHRGYLSQRKNEGETADKELGALLKGVADNTHTLQAGDFRTPAELALNKFEKESGHIRNQRGDYSHTFSRKDFQAELVLLFKKQKEFGNPHISDGLKEGIETLLMAQRPALSGDAVQKMLGYCTFEPTEPKAAKNTYTAERFIWLTKLNNLRILEQGSERPLTDTQRATLMDEPYRKSKLTYAQARKLLDLDDTAFFKGLRYGKDNAEASTLMEMKAYHAISRALEKEGLKDKKSPLNLSPELLDEIGTVFSLFKTDEDITGRLKDRVQPEILEALLKHISFDKFVQISLKALRRMVPLMEQGKRYDEACAEIYGDHYGKKNTEEEIYLPPIPADEIRNPVVLRALSQARKVINAVVRRYGSPARIHIETAREVGKSFKDRKEIEKRQEENRKDREKAAAKFREYFPNFVGEPKSKDILKLRLYEQQHGKCLYSGKEIDLGRLNEKGYVEIDHALPFSRTWDDSFNNKVLVLGSENQNKDNQTPYEYFNGKDNSREWQEFKARVETSRFPRSKKQRILLQKFDEDGFKERNLNDTRYVNRFLCQFIADHMLLTGKGKRRVFASNGQITNLLRGFWGLRKVRAENDRHHALDAVVVACSTVAMQQKITRFVRYKEMNAFDGKTIDKETGEVLHQKTHFPQPWEFFAQEVMIRVFGKPDGKPEFEEADTPEKLRTLLAEKLSSRPEAVHEYVTPLFVSRAPNRKMSGQGHMETVKSAKRLDEGISVLRVPLTQLKLKDLEKMVNREREPKLYEALKARLEAHKDDPAKAFAEPFYKYDKAGNRTQQVKAVRVEQVQKTGVWVRNHNGIADNATMVRVDVFEKGGKYYLVPIYSWQVAKGILPDRAIIAFKDEEDWQLIDDSFNFKFSLHPNDLIEVITKKARIFGYFASCHRGTGNINIRIHDLDHKIGKNGILEGIGVKTALSFQKYQIDELGKEIRPCRLKKRPPVR

SEQ ID NO: 18844 - protein, 1144 aa, unidentified
  REGION 1..1144: note = Cas Enzyme sequence
LLKEGAHGKSPKCLDGNLGNFAKVSDRLFPLYINKEVICSFYLHVNTFFRYIDVVVYEIVEKQMTAFKPNPLNYILGLDIGITSVGWAMVEIDNEENPIRLIDLGVRVFERAEVPKTGDSLAAARRLARSIRRLIRRRAHRLLRARRLLKHEGVLRSEDFDENGFIKLLPNTPWQLRAAALDRKLMPLEWAAVLLHLVKHRGYLSQRKNEEQTADKELEALREGMKSNTQALQTGNFRTPAELALNKFEKESGHIRNQRGDYSHTFSRKDLQAELVLLFEKQKEFGNPYVSDDLKNGIENLLMTQRPALSGDAIQKMLGHCTFEPTEPKAAKNTYTAERFIWLTKLNNLRILNQGSERPLTDTERATLMEAPYTKKLTYAQARKLLGLDDTAFFKGLRYGKDNAESATLMEMKAYHAISRALEKEGLKDKKSPLSISPELQDEIGTAFSLFKTDEDITGRLKDCLQPEILDALLKHISFDKFVQISLKALRRIVPLMEQGKRYDEACAEIYGDHHGRRNSEETLYLPPIPADEIRNPVVLRALSQARKVINGVVRRYGSPVRIHIETAREVGKSFKDRKEIEKRQEENRKDREKAAAEFQEYFPNFVGEPKSKDILKLRLYRQQNCKCLYSGKEINLGRLNEKGYVEIDHALPFSRTWDDSFNNKVLVLGSENQNKGNRTPYEYLNGKDNSREWQEFKARVETSRFPRGKKQRILLQKFDEGEFKKRNLNDTRYINRFLCQFVAGHIRLLSDGENRVFAFNGQITNLLRGFWGLRKVRAENDRHHALDAVVVACSTVAMQQRITRFVRYKEMNAFDGKTVDKETGEVLHQKTHFPQPWEFFTQEVMIRVFGKLGGKPEFEEADTPEKLRALLAEKLPSRPEAVHEYVAPLFVSRAPNRKMSGAHKDTLRSAKRFVKHNEKISVKRVWLTDIKLADLENMVNYKNGREIELYETLKARLEKYGGNAKQAFDPKDNPFYKKGGQLVKAVRVEKTQESGVLLNKNNAYTIADNGDMVRADVFCKTDKKGKNQYFIVPIYAWQVAENILPDIDCKGYRIDDSYTFCFSLHKYDLMAFQKDEKSKVEFAYYINCDSSDGRFYLAWHDKGAKEQQFRISTQNLVLMEKYQIDELGKEIRPCRLKKRPPVR

SEQ ID NO: 18845 - protein, 1082 aa, unidentified
  REGION 1..1082: note = Cas Enzyme sequence
MAAFKPNPINYIIGLDIGIASVGWAMVEIDEEENPIRLIDLGVRVFERAEVPKTGDSLAAARRLARSVRRLTRRRAHRLLRARRLLKREGVLQAADFDENGLIKSLPNTPWQLRAAALDRKLTPLEWSAVLLHLIKHRGYLSQRKNEGETADKELGALLKGVANNAHALQTGDFRTPAELALNKFEKESGHIRNQRGDYSHTFSRKDLQAELVLLFEKQKEFGNPHISDGLKEGIETLLMAQRPALSGDAVQKMLGYCTFEPTEPKAAKNTYTAERFIWLTKLNNLRILEQGSERPLTDTERATLMDEPYRKSKLTYAQARKLLDLDDTAFFKGLRYGKDNTEASTLMEMKAYHAISRALEKEGLKDKKSPLNLSPELQDEIGTAFSLFKTDEDITGRLKDRVQPEILEALLKHINFDKFVQVSLKALRRIVPLMEQGKRYDEACAETYGDHYGEKNSEEMLYLPPIPADEIRNPVVLRALSQARKVINSVVRRYGSPARIHIETAREVGKSFKDRKEIEKRQEENRKDREKAAAKFREYFPNFVGEPKSKDILKLRLYEQQHGKCLYSGKEINLGRLNEKGYVEIDHALPFSRTWDDSFNNKVLVLGSENQNKGNQTPYEYFNGKDNSREWQEFKARVETSRFPRSKKQRILLQKFDEDGFKERNLNDTRYVNRFLCQFVADHMLLTGKGKRRVFASNGQITNLLRGFWGLRKVRTENDRHHALDAVVVACSTVAMQQKITRFVRYKEMNAFDGKTIDKETGEVLHQKAHFPQPWEFFAQEVMIRVFGKPDGKPEFEEADTPEKLRTLLAEKLSSRPEAVHEYVTPLFVSRAPNRKMSGAHKDTLRSAKRFVKHNEKISVKRVWLTEIKLADLENMVNYKNGREIELYEALKARLGAYGGNAKQAFDPKDNPFYKKGGQLVKAVRVEKTQESGVLLNKKNAYTIADNGDMVRVDVFCKVDKKGKNQYFIVPIYAWQVAENILPDIDCKGYRIDDSYTFCFSLHKYDLIAFQKDEKSKVEFAYYINCDSSNGRFYLAWHDKGSKEQQFRISTQNLVLMQKYQIDELGKEIRPCRLKKRPPVR

SEQ ID NO: 18846 - protein, 1012 aa, unidentified
  REGION 1..1012: note = Cas Enzyme sequence
RLTRRRAHRLLRARRLLKREGVLQAADFDENGLIKSLPNTPWQLRAAALDRKLTPLEWSAVLLHLIKHRGYLSKRKNEEQTADKELGALRAGMKSNTQALKTGNFRTPAELALNKFEKESGHIRNQRGDYSHTFSREDLQVELVLLFEKQKEFGNPHVSDGLKEGIETLLMAQRPALSGDAIQKMLGHCTFEPTEPKAAKNTYTAERFIWLTKLNNLRILEQGSERPLTDTERTILINQPYKKKLTYAQARKLLGLEDTAFFKGLHYGKDNAETSTLMEIKAYHAISRALEKEGLKDKKSPLNLSPELQDEIGMAFSLFKTDEDITGRLKDRVQPEILEALLKHINFDKFVQISLKALRRIVPLMEQGKRYDEACAEIYGDHYGKKNTEEKIYLPPIPADEIRNPVVLRALSQARKVINAVVRRYGSPARIHIETAREVGKSFKDRKEIEKRQEENRKDREKAAAKFREYFPNFVGEPKSKDILKLRLYEQQHGKCLYSGKEINLGRLNEKGYVEIDHALPFSRTWDDSFNNKVLVLGSENQNKSNQTPYEYFNGKDNSREWQEFKARVETSRFPRSKKQRILLQKFDEDGFKERNLNDTRYVNRFLCQFIADRMRLTGKGKRRVFASNGQITNLLRGFWGLRKVRAENDRHHALDAVVVACSTVAMQQKITHFVRYKEMNAFDGKTIDKETGEVLHQKAHFPQPWEFFAQEVMIRVFGKPDGKPEFEEADTPEKLRTLLAEKLSSRPEAVHEYVTPLFVSRAPNRKMSGQGHMETVKSAKRLDEGISVLRVPLTQLKLKDLEKMVNREREPKLYEALKARLETHKDDPAKAFAEPFYKYDKAGNRTQQVKAVRVEQVQKTGVWVRNHNGIADNATMVRVDVFEKGGKYYLVPIYSWQVAKGILPNRAVVQGKDEEDWTVMDDSFEFKFVLYANDLIKLTAKKNEFLGYFVSLNRATGAIDIRTHDTDSTKGKNGIFQSVGVKTALSFQKYQIDELGKEIRSCRLKKRPPVR

SEQ ID NO: 18847 - protein, 1100 aa, unidentified
  REGION 1..1100: note = Cas Enzyme sequence
MVILTWDIFILTKHHITEKLMATFKPNPINYILGLDIGIASVGWAMVEIDEEENPIRLIDLGVRVFERAEVPKTGDSLAAARRLARSVRRLTRRRAHRLLRARRLLKREGVLQAADFDENGLIKSLPNTPWQLRAAALDRKLTPLEWSAVLLHLIKHRGYLSQRKNEGETADKELGALLKGVADNAHALQTGDFRTPAELALNKFEKESGHIRNQRGDYSHTFSRKDLQAELNLLFEKQKEFGNPHVSDGLKEDIETLLMTQRPALSGDAVQKMLGHCTFEPTEPKAAKNTYTAERFIWLTKLNNLRILEQGSERPLTDTERAILINQPYKKKLTYAQARKLLGLEDTAFFKGLRYGEDNAESAILMEMKAYDAISRALEKEGLKDKKSPLNLSPELQDEIGTALSLFKTDEDITGRLKDRVQPEILEALLNISFDKFVQISLKALRKIVPLMEQGKRYDEACAEIYGDHYGKKKTEEKIYLPPIPADEIRNSVVLRALSQARKVINAVVRRYGSPARIHIETAREVGKSFKDRKEIEKRQEENRKDREKAAAKFREYFPNFVGEPKSKDILKLRLYEQQHGKCLYSGKEIDLGRLNEKGYVEIDHALPFSRTWDDSFNNKVLVLGSENQNKGSKTPYEYFNGKDNSREWQEFKARVETSRFPRSKKQRILLQKFDEDGFKERNLNDTRYVNRFLCQFVANHMRLTGKGKRRVFASNGQITNLLRGFWGLRKVRAENDRHHALDAVVVACSTVAMQQKITYFVHYKEMNAFDGKTIDKETGEVLHQKTHFPQPWEFFAQEVMIRIFGKPDGKPEFEEADTPEKLRTLLAEKLSSRPEAVHEYVTPLFVSRAPNRKMSGAHKDTLRSAKRFVKHNEKISVKRVWLTEIKLADLENMVNYKNGREIELYEALKARLGAYGGNAKQAFDPKDNPFYKKGGQLVKAVRIEKTQESGVLLNKKNAYTIADNGDMVRVDVFCKVDKKGKNQYFIVPIYAWQVAENILPDIDCKGYRIDDSYTFCFSLHKYDLIAFQKDEKSEVEFAYYINCDSSNGRFYLAWHDKGSKEQQFRISTQNLISVEKYQIDELGKEIRPCRLKKRPPVR

SEQ ID NO: 18848 - protein, 1086 aa, unidentified
  REGION 1..1086: note = Cas Enzyme sequence
MEKQMTAFKPNPLNYILGLDIGIASVGWAMVEIDDKENPVRLIDLGVRVFERAEVPKTGDSLAAARRLARSVRRLTRRRAHRLLRARRLLKHEGVLKPEDFDENGFIKLLPNTPWQLRAAALDRRLAPLEWAAVLLHLVKHRGYLSQRKNEGETADKELGALLKGVADNTHTLQAGDFRTPAELALNKFEKESGHIRNQRGDYSHTFSRKDFQAELVLLFKKQKEFGNPHISDGLKEGIETLLMAQRPALSGDAVQKMLGYCTFEPTEPKAAKNTYTAERFIWLTKLNNLRILEQGSERPLTDTQRATLMDEPYRKSKLTYAQARKLLDLDDTAFFKGLRYGKDNAEASTLMEMKAYHAISRALEKEGLKDKKSPLNLSPELLDEIGTVFSLFKTDEDITGRLKDRVQPEILEALLKHISFDKFVQISLKALRRMVPLMEQGKRYDEACAEIYGDHYGKKNTEEEIYLPPIPADEIRNPVVLRALSQARKVINAVVRRYGSPARIHIETAREVGKSFKDRKEIEKRQEENRKDREKAAAKFREYFPNFVGEPKSKDILKLRLYEQQHGKCLYSGKEIDLGRLNEKGYVEIDHALPFSRTWDDSFNNKVLVLGSENQNKDNQTPYEYFNGKDNSREWQEFKARVETSRFPRSKKQRILLQKFDEDGFKERNLNDTRYVNRFLCQFIADHMLLTGKGKRRVFASNGQITNLLRGFWGLRKVRAENDRHHALDAVVVACSTVAMQQKITRFVRYKEMNAFDGKTIDKETGEVLHQKTHFPQPWEFFAQEVMIRVFGKPDGKPEFEEADTPEKLRTLLAEKLSSRPEAVHEYVTPLFVSRAPNRKMSGQGHMETVKSAKRLDEGISVLRVPLTQLKLKDLEKMVNREREPKLYEALKARLEAHKDDPAKAFAEPFYKYDKAGNRTQQVKAVRVEQVQKTGVWVRNHNGIADNATMVRVDVFEKGGKYYLVPIYSWQVAKGILPDRAIIAFKDEEDWQLIDDSFNFKFSLHPNDLIEVITKKARIFGYFASCHRGTGNINIRIHDLDNKVGKNGILEGIGVKTALSFQKYQLDELGKEIRPCRLKKRPSVR

SEQ ID NO: 18849 - protein, 1115 aa, unidentified
  REGION 1..1115: note = Cas Enzyme sequence
LYINKEVICAFYLHVNTFFRYIAVVVYEIVEKQMTAFKPNPLNYILGLDIGITSVGWAMVEIDDKENPIRLIDLGVRVFERAEVPKTGDSLAAARRAARSIRRLIRRRAHRLLRARRLLKHEGVLKPEDFDENGFIKLLPNTPWQLRAAALDRKLTPLEWAAVLLHLVKHRGYLSQRKNEGETDDKELGALLKGVADNTHALQAGNFRTPAELALNKFEKESGHIRNQRGDYSHTFSRKDLQAELVLLFEKQKEFGNPYVSDDLKNGIENLLMTQRPALSGDAIQKMLGHCTFEPAEPKAAKNTYTAERFIWLTKLNNLRILNQGNERPLTDAERTTLMDEPYKKSKLTYAQARKLLDLDDTAFFKGLRYGKDNAESATLMEMKAYHAISRALEKEGLKDKKSPLSLSPELQDEIGTAFSLFKTDEEITGRLKGCLQPEILDALLKHISFDKFVQISLKALRRIVPLMEQGKRYDEACAEIYGDHHGRRNSEETLYLPPIPADEIRNPVVLRALSQARKVINGVVRRYGSPARIHIETAREVGKSFKDRKEIEKRQEENRKDREKAAAEFQEYFPNFVGEPKSKDILKLRLYEQQHGKCLYSGKVIDIRRLNEKGYVEIDHALPFSRTWDDSFNNKVLVLGSENQNKGNRTPYEYFNGKDNSREWLEFKARVETSRFPHSKKQRVLLQKFDEEGFKERNLNDTRYVNRFLCQFVADHMQLTGKGKRRVFASNGQITNLLRGFWGLHKVRAENDRHHALDAVVVACSTVAMQQKITRFVRYKEMNAFDGKTIDKETGEVLHQKTHFPQPWKFFTQEVMIRVFGKPDGEPEFEEADTPEKLRALLAEKLPSRPEAIHEYVMPLFVSRAPNRKMSGQGHMETVKSAKRLDEGISVLRVPLTQLKLKDLEKMVNREREPKLYEGLKARLEAHKDDPAKAFAEPFYKQNKAGNPTQQVKAVRIEQVQKTGVWVRNQNGIADNATMVRVDVFEKAGKYYLVPIYSWQVAKGILPDKAIIAFKDEEEWQLIDDSFNFKFPLHPNDLVEVITKKARIFGYFASCHRGTGNINIRIHDLDNKVGKNGILEGIGVKTALSFQKYQIDELGKEIRPCRLKKRPPVR

SEQ ID NO: 18850 - protein, 1082 aa, unidentified
  REGION 1..1082: note = Cas Enzyme sequence
MAAFKPNPINYILGLDIGIASVGWAMVEIDEEENPIRLIDLGVRVFERAEVPKTGDSLAAARRLARSVRRLTRRRAHRLLRARRLLKREGVLQAADFDENGLIKSLPNTPWQLRAAALDRKLTPLEWSAVLLHLIKHRGYLSQRKNEGETADKELGALRAGMKSNTQALKTGNFRTPAELALNKFEKESGHIRNQRGDYSHTFSREDLQAELVLLFEKQKEFGNPHVSDGLKEGIETLLMAQRPALSGDAIQKMLGHCTFEPTEPKAAKNTYTAERFIWLTKLNNLRILEQGSERPLTDTERATLMDEPYRKSKLTYAQVRKLLDLDDTAFFKGLRYGKDNAETSTLMEMKAYHAISRALEKEELKDKKSPLNLSPELQDEIGTAFSLFKTDEDITGSLKDRVQPEILEALLKHISFDKFVQISLKALRRIVPLMEQGKRYDEACAEIYGDHYGKKNTEEEIYLPPIPADEIRNPVVLRALSQARKVINAVVRRYGSPARIHIETAREVGKSFKDRKEIEKRQEENRKDREKAAAKFREYFPNFVGEPKSKDILKLRLYEQQHGKCLYSGKEINLGRLNEKGYVEIDHALPFSRTWDDSFNNKVLVLGSENQNKSNQTPYEYFNGKDNSREWQEFKARVETSRFPRSKKQRILLQKFDEDGFKERNLNDTCYVNRFLCQFIADRMRLTGKGKRRVFASNGQITNLLRGFWGLRKVRAENDRHHALDAVVVACSTVAMQQKITHFVHHKEMNAFDGKTIDKETGEVLHQKTHFPQPWEFFAQEVMLRVFGKPDGKPEFEEADTPEKLRALLAEKLSSRPEAVHEYVTPLFVSRAPNRKMSGAHKDTLRSAKRFVKHNEKISVKRVWLTEIKLADLENMVNYKNGREIELYEALKARLGAYGGNAKQAFDPKDNPFYKKGGQLVKAVRVEKTQESGVLLNKKNAYTIADNGDMVRVDVFCKVDKKGKNQYFIVPIYAWQVAENILPDIDCKGYRIDDSYTFCFSLHKYDLIAFQKDEKSKVEFAYYINCDSSNGRFYLAWHDKGSKEQQFRISTQNLVLMQKYQIDELGKEIRPCRLKKRPPVR

SEQ ID NO: 18851 - protein, 1082 aa, unidentified
  REGION 1..1082: note = Cas Enzyme sequence
MAAFKPNPINYILGLDIGIASVGWTMVEIDEEENPIRLIDLGVRVFERAEVPKTGDSLAAARRLARSVRRLTRRRAHRLLRARRLLKREGVLQAADFDENGLIKSLPNTPWQLRAAALDRKLTPLEWSAVLLHLIKHRGYLSQRKNEGETADKELGALLKGVADNAHTLQTGDFRTPAELALNKFEKESGHIRNQRGDYSHTFSRKDLQAELNLLFEKQKEFGNPHVSDGLKEGIETLLMTQRPALSGDAVQKMLGHCTFEPAEPKAAKNTYTAERFIWLTKLNNLRILEQGSERPLTATERATLMDEPYRKSKLTYAQARKLLGLEDTAFFKGLRYGKDNAEASTLMEMKAYHAISRALEKEGLKDKKSPLNLSPELQDEIGTAFSLFKTDEDITGRLKDRVQPEILEALLKHISFDKFVQISLKALRRIVPLMEQGKRYDEACAEIYGDHYGKKNAEEKIYLPPIPADEIRNPVVLRALSQARKVINAVVRRYGSPARIHIETAREVGKSFKDRKEIEKRQEENRKDREKAAAEFQEYFPNFVGEPKSKDILKLRLYRQQNCKCLYSGKEINLGRLNEKGYVEIDHALPFSRTWDDSFNNKVLVLGSENQNKGNRTPYEYLNGKDNSREWQEFKARVETSRFPHSKKQRILLQKFDEEGFKERNLNDTRYVNRFLCQFFADHMRLTGKGKRRVFASNGQITNLLRGFWGLRKVRAENDRHHALDAVVVACSTVAMQQKITRFVRYKEMNAFDGKTIDKETGEVLHQKTHFPQPWEFFAQEVMIRVFGKPDGKPEFEEADTPEKLRALLAEKLSSRPEAVHEYVTPLFVSRAPNRKMSGQGHMETVKSAKRLDEGISVLRVPLTQLKLKDLEKMVNREREPKLYEALKARLEAYKDDPAKAFAEPFYKYDKAGNRTQQVKAVRIEQVQKTGVWVRNHNGIADNATMVRVDVFEKGGKYYLVPIYSWQVAKGILPDRAIIAFKDEEDWQLIDDSFNFKFSLHPNDLIEVITKKARIFGYFASCHRGTGNINIRIHDLDHKIGKNGILEGIGVKTALSFQKYQIDELGKEIRPCRLKKRPPVR

SEQ ID NO: 18852 - protein, 1110 aa, unidentified
  REGION 1..1110: note = Cas Enzyme sequence
LHVNAFFRYIAVVVYEIAEKQMTAFKPNPLNYILGLDIGIASVGWAMVEIDDKENPVRLIDLGVRVFERAEVPKTGDSLAAARRLARSVRRLTRRRAHRLLRARRLLKHEGVLKPEDFDENGLVKPLPYIPKQPRNTPWQLRAAALDRKLTPLEWAAVLLHLVKHRGYLSQRKNEGETDDKELGALLKGVADNTHALQAGNFRTPAELALNKFEKESGHIRNQRGDYSHTFSRKDLQAELVLLFEKQKEFGNPYVSDDLKNGIENLLMTQRPALSGDAIQKMLGHCTFEPAEPKAAKNTYTAERFIWLTKLNNLRILNQGNERPLTDAERTTLMDEPYKKSKLTYAQARKLLDLDDTAFFKGLRYGKDNAESATLMEMKAYHAISRALEKEGLKDKKSPLSLSPELQDEIGTAFSLFKTDEEITGRLKGCLQPEILDALLKHISFDKFVQISLKALRRIVPLMEQGKRYDEACAEIYGDHHGRRNSEETLYLPPIPADEIRNPVVLRALSQARKVINGVVRRYGSPARIHIETAREVGKSFKDRKEIEKRQEENRKDREKAAAEFQEYFPNFVGEPKSKDILKLRLYRQQNCKCLYSGKEINLGRLNEKGYVEIDHALPFSRTWDDSFNNKVLVLGSENQNKGNRTPYEYLNGKDNSREWQEFKARVETSRFPHSKKQRILLQKFDEEGFKERNLNDTRYVNRFLCKFVADHMQLTGKGKRRVFASNGQITNLLRGFWGLRKVRAENDRHHALDAVVVACSTVAMQQRITRFVRYKEMNAFDGKTVDKETGEVLHQKTHFPQPWEFFAQEVMIRVFGKPDGKPELEEADTPEKLRALLAEKLSSRPEAVHEYVTPLFVSRAPNRKMSGQGHMETVKSAKRLDEGISVLRVPLTQLKLKDLEKMVNREREPKLYEGLKARLEAHKDDPAKAFAEPFYKQNKAGNPTQQVKAVRIEQVQKTGVWVRNRNGVADNATMVRIDVFEKGGKYYLVPIYSWQVAKGILPDRAVVQGRDEEDWTVMDDSFEFKFVLYANDLIKLTAKKNVFLGYFVSLNRATGAIDIRTHDTDSTKGKNGIFQSVGVKTALSFQKYQIDELGKEIKPCRLKKRPPVR

SEQ ID NO: 18853 - protein, 1086 aa, unidentified
  REGION 1..1086: note = Cas Enzyme sequence
MEKQMTAFKPNPLNYILGLDIGIASVGWAMVEIDDKENPVRLIDLGVRVFERAEVPKTGDSLAAARRLARGAPRLPRRRAHRLLRARRLLKHEGVLKPEDFDENGFIKLLPNTPWQLRAAALDRRLAPLEWAAVLLHLVKHRGYLSQRKNEGETADKELGALLKGVADNTHTLQAGDFRTPAELALNKFEKESGHIRNQRGDYSHTFSRKDFQAELVLLFKKQKEFGNPHISDGLKEGIETLLMAQRPALSGDAVQKMLGYCTFEPTEPKAAKNTYTAERFIWLTKLNNLRILEQGSERPLTDTQRATLMDEPYRKSKLTYAQARKLLDLDDTAFFKGLRYGKDNAEASTLMEMKAYHAISRALEKEGLKDKKSPLNLSPELLDEIGTVFSLFKTDEDITGRLKDRVQPEILEALLKHISFDKFVQISLKALRRMVPLMEQGKRYDEACAEIYGDHYGKKNTEEEIYLPPIPADEIRNPVVLRALSQARKVINAVVRRYGSPARIHIETAREVGKSFKDRKEIEKRQEENRKDREKAAAKFREYFPNFVGEPKSKDILKLRLYEQQHGKCLYSGKEIDLGRLNEKGYVEIDHALPFSRTWDDSFNNKVLVLGSENQNKDNQTPYEYFNGKDNSREWQEFKARVETSRFPRSKKQRILLQKFDEDGFKERNLNDTRYVNRFLCQFIADHMLLTGKGKRRVFASNGQITNLLRGFWGLRKVRAENDRHHALDAVVVACSTVAMQQKITRFVRYKEMNAFDGKTIDKETGEVLHQKTHFPQPWEFFAQEVMIRVFGKPDGKPEFEEADTPEKLRTLLAEKLSSRPEAVHEYVTPLFVSRAPNRKMSGQGHMETVKSAKRLDEGISVLRVPLTQLKLKDLEKMVNREREPKLYEALKARLEAHKDDPAKAFAEPFYKYDKAGNRTQQVKAVRVEQVQKTGVWVRNHNGIADNATMVRVDVFEKGGKYYLVPIYSWQVAKGILPDRAIIAFKDEEDWQLIDDSFNFKFSLHPNDLIEVITKKARIFGYFASCHRGTGNINIRIHDLDNKVGKNGILEGIGVKTALSFQKYQLDELGKEIRPCRLKKRPSVR

SEQ ID NO: 18854 - protein, 1185 aa, unidentified
  REGION 1..1185: note = Cas Enzyme sequence
MLKFQTAFRFLCLIPKEMPLETEEFQGADDVLQNSGSKGQSIATRCIFIHPSRSYCSNVSHFAVQQYIGNSSDCSNGSQLFHLHVNAFFRYIAVVVYEIAEKQMTAFKPNPLNYILGLDIGIASVGWAMVEIDDKENPVRLIDLGVRVFERAEVPKTGDSLAAARRAARSIRRLVRRRAHRLLRARRLLKHEGVLKPEDFDENGFIKLLPNTPWQLRAAALDRRLAPLEWAAVLLHLVKHRGYLSQRKNEEQTADKELGALLKGVADNTHALQAGDFRTPAELALNKFEKESGHIRNQRGDYSHTFSRKDLQAELVLLFEKQKEFGNPYVSDDLKNGIENLLMTQRPALSGDAIQKMLGHCTFEPAEPKAAKNTYTAERFIWLTKLNNLRILNQGNERPLTDAERTTLMDEPYKKSKLTYAQARKLLDLDDTAFFKGLRYGKDNAESATLMEMKAYHTISRALEKEGLKDKKSPLSLSPELQDEIGTAFSLFKTDEEITGRLKGCLQPEILDALLKHISFDKFVQISLKALRRIVPLMEQGKRYDEACAEIYGDHYGEKNSEETLYLPPIPADEIRNPVVLRALSQARKVINGVVRRYGSPVRIHIETAREVGKSFKDRKEIEKRQEENRKDREKAAAKFREYFPNFVGEPKSKDILKLRLYRQQNCKCLYSGKEINLGRLNEKGYVEIDHALPFSRTWDDSFNNKVLVLGSENQNKGNRTPYEYLNGKDNSREWQEFKARVETSRFPHSKKQRILLQKFDEEGFKERNLNDTRYVNRFLCKFVADHMQLTGKGKRRVFASNGQITNLLRGFWGLRKVRAENDRHHALDAVVVACSTVAMQQRITRFVRYKEMNAFDGKTVDKETGEVLHQKTHFPQPWEFFAQEVMIRVFGKPDGKPELEEADTPEKLRALLAEKLSSRPEAVHEYVTPLFVSRAPNRKMSGQGHMETVKSAKRLDEGISVLRVPLTQLKLKDLEKMVNREREPKLYEGLKARLEAHKDDPAKAFAEPFYKQNKAGNPTQQVKAVRIEQVQKTGVWVRNRNGVADNATMVRIDVFEKGGKYYLVPIYSWQVAKGILPDRAVVQGRDEEDWTVMDDSFEFKFVLYANDLIKLTAKKNVFLGYFVSLNRATGAIDIRTHDTDSTKGKNGIFQSVGVKTALSFQKYQIDELGKEIKPCRLKKRPPVR

SEQ ID NO: 18855 - protein, 1082 aa, unidentified
  REGION 1..1082: note = Cas Enzyme sequence
MAAFKPNPINYILGLDIGIASVGWAMVEIDEEENPIRLIDLGVRVFERAEVPKTGDSLAAARRLARSVRRLTRRRAHRLLRARRLLKREGVLQAADFDENGLIKSLPNTPWQLRAAALDRKLTPLEWSAVLLHLIKHRGYLSQRKNEGETADKELGALRAGMKSNTQALKTGNFRTPAELALNKFEKESGHIRNQRGDYSHTFSREDLQAELVLLFEKQKEFGNPHVSDGLKEGIETLLMAQRPALSGDAIQKMLGHCTFEPTEPKAAKNTYTAERFIWLTKLNNLRILEQGSERPLTDTERATLMDEPYRKSKLTYAQVRKLLDLDDTAFFKGLRYGKDNAETSTLMEMKAYHAISRALEKEELKDKKSPLNLSPELQDEIGTAFSLFKTDEDITGSLKDRVQPEILEALLKHISFDKFVQISLKALRRIVPLMEQGKRYDEACAEIYGDHYGKKNTEEEIYLPPIPADEIRNPVVLRALSQARKVINAVVRRYGSPARIHIETAREVGKSFKDRKEIEKRQEENRKDREKAAAKFREYFPNFVGEPKSKDILKLRLYEQQHGKCLYSGKEINLGRLNEKGYVEIDHALPFSRTWDDSFNNKVLVLGSENQNKSNQTPYEYFNGKDNSREWQEFKARVETSRFPRSKKQRILLQKFDEDGFKERNLNDTCYVNRFLCQFIADRMRLTGKGKRRVFASNGQITNLLRGFWGLRKVRAENDRHHALDAVVVACSTVAMQQKITHFVHHKEMNAFDGKTIDKETGEVLHQKTHFPQPWEFFAQEVMLRVFGKPDGKPEFEEADTPEKLRALLAEKLSSRPEAVHEYVTPLFVSRASNRKMSGAHKDTLRSAKRFVKHNEKISVKRVWLTEIKLADLENMVNYKNGREIELYEALKARLGAYGGNAKQAFDPKDNPFYKKGGQLVKAVRVEKTQESGVLLNKKNAYTIADNGDMVRVDVFCKVDKKGKNQYFIVPIYAWQVAENILPDIDCKGYRIDDSYTFCFSLHKYDLIAFQKDEKSKVEFAYYINCDSSNGRFYLAWHDKGSKEQQFRISTQNLVLMQKYQIDELGKEIRPCRLKKRPPVC

SEQ ID NO: 18856 - protein, 1056 aa, unidentified
  REGION 1..1056: note = Cas Enzyme sequence
MENKNLHYILGLDLGIASVGWAVVEIDEKENPLRLIDVGVRTFERAEVPKTGESLALSRRLARSARRLTQRRVARLKKAKRLLKSENILLSTDERLPHQVWQLRVEGLDRKLERQEWAAVLLHLIKHRGYLSQRKNESKSENKELGALLSGVASNHELLQQATYRTPAELAVKKFEVEEGHIRNQQGAYTHTFSRLDLLAEMELLFSRQQHFGNPFASEKLLENLTSLLMWQKPALSGEAILKMLGKCTFEDEYKAAKNTYSAERFVWITKLNNLRIQENGLERALNDNERLMLINQPYEKAKLNYAQVRSRLNLSDEAIFKGVRYSGEDKKAIETKTTLMEMKTYHQIRKVLEGNNLKAEWAELKANPTLLDEIGTAFSLYKTDEDISGYLAGKLSQPVLDVLLENLSFDKFIQLSLKALYKLLPLMQQGLRYDEACREIYGDHYGKKTEENHHFLPQIPADEIRNPVVLRTLTQARKVINGVVRLYGSPARIHIETGREVGKSYKDRRELEKRQEENRKQRENAIKEFKEYFPHFAGEPKTKDILKMRLYKQQNAKCLYSGKPIELHRLLEKGYVEVDHALPFSRTWDNSFSNKVLVLANENQNKGNSTPFEWLDGKHNSERWRAFKALIETSAFPYAKKQRILSQKLDEKGFIERNLNDTRYVARFLCNFIADNMHLTGEGKRKVFASNGQITALLRSRWGLAKSREDNDRHHALDAVVVACSTVAMQQKITRFVRFEEGNVFTGERRDRETGEIIPLHFPAPWQFFKQEVEIRIFSDNPKLELENRLSDRPQANHEFVQPLFVSRMPTRKMTGQGHMETVKSAKRLNEGISVIKIPLTKLKLKDLELMVNREREKDLYKSLKARLEAFNDDPAKAFTESFVKNGWAIVKSIRVEKVQKSGVLVHAGNGVADNASGSIVRVDVFIKDRKYFLVPIYTWQVAKGILPNRAVIADTDENEWEMMDENSTFQFSLHPNDLIRVKTKKDEFWGYFNGLNRHTGGINIRTHDLEKSKGKQGIFEGIGVKIALSFEKYQVDELGKNIRLCKPSKRQPVR

SEQ ID NO: 18857 - protein, 1052 aa, unidentified; identical to SEQ ID NO: 16288
  REGION 1..1052: note = Cas Enzyme sequence

SEQ ID NO: 18858 - protein, 1054 aa, unidentified
  REGION 1..1054: note = Cas Enzyme sequence
MENKNLHYILGLDLGIVSVGWAVVEIDDKENPLRLIDVGVRTFERAEVPKTGESLALSRRLARSARRLTQRRVARLKKAKRLLKSENILLSTDERLPHQVWQLRVEGLDRKLERQEWAAVLLHLIKHRGYLSQRKNESKSENKELGALLSGVASNHELLQQATYRTPAELAVKKFEVEEGHIRNQQGAYTHTFSRLDLLAEMELLFSRQQHFGNPFTSEKLLENLTALLMWQKPALSGEAILKMLGKCTFEDEYKAAKNTYTAERFVWITKLNNLRIQENGLERALSDNERLMLIEQPYEKAKLTYAQVRSILNLSDDAIFKGVRYSGEDKKAIETKTTLMEMKAYHQIRKVLEGNNLKAEWAELKANPTLLDEIGTAFSLYKTDEDISAYLAGKLSQPVLDVLLENLSFDKFIQLSLKALYKLLPLMQQGLRYDEACREIYGDHYGKKTEENHHFLPQIPADEIRNPVVLRTLTQARKVINGVVRLYGSPARIHIETGREVGKSYKDRRELEKRQEENRKQRENAIKEFKEYFPHFAGEPKAKDILKMRLYKQQNAKCLYSGKPIELHRLLEKGYVEVDHALPFSRTWDDSFNNKVLVLANENQNKGNLTPFEWLDGKHNSERWRAFKALVETSAFPYAKKQRILSQKLDEKGFIERNLNDTRYVARFLCNFIADNMRLTGEGKHKVFASNGQITALLRGRWGLAKSREDNDRHHALDAVVVACSTVAMQQKITRFVRFEAGDVFTGERIDRETGEIIPLHFPTPWQFFKQEVEIRIFSDNPKLELENRLPDRPQANHEFVQPLFVSRMPTRKMTGQGHMETVKSAKRLNEGISVIKMPLTKLKLKDLELMVNREREKDLYDALKARLEAFNDDPAKAFAEPFMKKGGAIVKSVRVEQVQKSGVLVRQGNGVADNASMVRVDVFTKDGKYFLVPIYTWQVAKGILPNKAIVALKDENEWIEIDNNYIFLFSLYQNDLIKVKTKKDKFWGYFNGLNRHTGGINIRTHDLEKSKGKQGIFEGIGVKTALSFEKYQVDELGKNIRLCKPSKRQPVR

SEQ ID NO: 18859 - protein, 1050 aa, unidentified
  REGION 1..1050: note = Cas Enzyme sequence
MENKNLHYILGLDLGIASVGWAVVEIDKEENPLCLIDVGVRTFERAEVPKTGESLALSRRLARSARRLTQRRVARLKKAKRLLKSENILLSTDEHLPHQVWQLRVEGLDRKLERQEWAAVLLHLIKHRGYLSQGKNGSKSENKELGALLSGVDNNHKLLQQATYRSPAELAVKKFEVEEGHIRNQQGAYTHTFSRLDLLAEMERLFSRQQHFGSPFASEKLLENLTALLMWQKPALSGEAILKMLGKCTFEDEYKAAKNTYTAERFVWITKLNNLRIQENGLERALNDNERLILTEQPYEKTKLTYAQVRSILNLSDDAIFKGVRYFGKDKKAIETKTTLMEMKAYHKIHNVLKSNNLKAEWAELKANPTLLDEIGTAFSLYKTDEDISAYLAGKLSQPVLNALLLENLNFDRFIQLSLKALYKLLPLMQQGLRYDEACHEIYGDHYGKKTEENHYFLPQIPADEIRNPVVLRTLTQARKVINGVVRLYGSPARIHIETGREVGKSYKDRRELEKRQEENRKQRENAIKEFKEYFPHFAGEPKAKDILKMRLYKQQNAKCLYSGKPIELHRLLEKGYVEVDHALPFSRTWDNSFNNKVLVLASENQNKGNLTPFEWLDGKHNSERWRAFKALVETSAFPYAKKQRILSQKLDEKGFIERNLNDTRYVARFLCNFIADNMRLTGEGKRKVFASNGQITALLRGRWGLAKSREDNDRHHALDAVVVACSTVAMQQKITRFVRFEAGDVFTGERIDRETGEIIPLHFPTPWQFFKQEVEIRIFSDNPKLELENRLPDRPQANHEFVQPLFVSRMPIRKMTGKAHEETLRSPKKLSEGKSIKKERLSNLKLTDLERMVNKEKEPELYQSLKEHFSKYGDYSKEKFFKKGGTEVKSIRLYKTQNKYVELNNGKTIADNGDIVRVDVFKKEKKYHAVNIYAWQVAKGILSKETSTGLFLDDNYIFQFSLFKNDLVKIPNPNNKSEYLFAYFIRPDDEPRWILKLQDNAIIPDGFSKKEKNSFRLSFKNQSFIEKYHIDELGKNINLCKQSKRQAVR

SEQ ID NO: 18860 - protein, 1056 aa, unidentified
  REGION 1..1056: note = Cas Enzyme sequence
MENKNLHYILGLDLGIASVGWAVVEIDEKENPLRLIDVGVRTFERAEVPKTGESLALSRRLARSARRLTQRRVARLKKAKRLLKSENILLSTDERLPHQVWQLRVEGLDRKLERQEWAAVLLHLIKHRGYLSQRKNESKSENKELGALLSGVASNHELLQQATYRTPAELAVKKFEVEEGHIRNQQGAYTHTFSRLDLLAEMELLFSRQQHFGNPFASEKLLENLTSLLRWQKPALSGEAILKMLGKCTFEDEYKAAKNTYSAERFVWITKLNNLRIQENGLERALNDNERLMLINQPYEKAKLNYAQVRSRLNLSDEAIFKGVRYSGEDKKAIETKTTLMEMKTYHQIRKVLEGNNLKAEWAELKANPTLLDEIGTAFSLYKTDEDISGYLAGKLSQPVLDVLLENLSFDKFIQLSLKALYKLLPLMQQGLRYDEACREIYGDHYGKKTEENHHFLPQIPADEIRNPVVLRTLTQARKVINGVVRLYGSPARIHIETGREVGKSYKDRRELEKRQEENRKQRENAIKEFKEYFPHFAGEPKTKDILKMRLYKQQNAKCLYSGKPIELHRLLEKGYVEVDHALPFSRTWDNSFSNKVLVLANENQNKGNSTPFEWLDGKHNSERWRAFKALIETSAFPYAKKQRILSQKLDEKGFIERNLNDTRYVARFLCNFIADNMHLTGEGKRKVFASNGQITALLRSRWGLAKSREDNDRHHALDAVVVACSTVAMQQKITRFVRFEEGNVFTGERRDRETGEIIPLHFPAPWQFFKQEVEIRIFSDNPKLELENRLSDRPQANHEFVQPLFVSRMPTRKMTGQGHMETVKSAKRLNEGISVIKIPLTKLKLKDLELMVNREREKDLYKSLKARLEAFNDDPAKAFTESFVKNGWAIVKSIRVEKVQKSGVLVHAGNGVADNASGSIVRVDVFIKDRKYFLVPIYTWQVAKGILPNRAVIADTDENEWEMMDENSTFQFSLHPNDLIRVKTKKDEFWGYFNGLNRHTGGINIRTHDLEKSKGKQGIFEGIGVKIALSFEKYQVDELGKNIRLCKPSKRQPVR

SEQ ID NO: 18861 - protein, 1054 aa, unidentified
  REGION 1..1054: note = Cas Enzyme sequence
MENKNLHYILGLDLGIASVGWAVVEIDKKENPLRLIDVGVRTFERAETQKGESLALSRRSARSARRLTQRRVARLKKAKRLLKSENILLSTDERLPHQVWQLRVEGLDRKLERQEWAAVLLHLIKHRGYLSQRKNESKSENKELGALLSGVASNHELLQQATYRTPAELAVKKFEVEEGHIRNQQGAYTHTFSRLDLLAEMELLFSRQQHFGNPFASEKLLENLTALLMWQKRALSGEDILKMLGKCTFEDEYKAAKNTYTAERFVWITKLNNLRIQENGLERALSDNERLMLIEQPYEKAKLTYAQVRSILNLSDEAIFKGVRYFGEDKKAIEIKTILMEMKGYHQICNALKGNNLKAEWAELKENPALLDEIGTAFSLYKTDEDISAYLAGKLSQPVLNALLLKNLSFDKFIQLSLKALYKLLPLMQQGLRYDEACCEIYGDHYGKKTEETHHFLPQIPADEIRNPVVLRTLTQARKVINGVVRLYGSPARIHIETGREVGKSYKDRRELEKRQEENRKQRENAIKEFKEYFPHFAGEPKAKDILKMRLYKQQNAKCLYSGKPIELHRLLEKGYVEVDHALPFSRTWDDSFNNKVLVLANENQNKGNLTPFEWLDGKHNSERWRAFKALVETSAFPYAKKQRILSQKLDEKGFIERNLNDTRYVARFLCNFIADNMRLTGEGKRKVFASNGQITALLRGRWGLAKSREDNDRHHALDAVVVACSTVAMQQKITRFVRFEAGDVFTGERIDRETGEIIPLHFPTPWQFFKQEVEIRIFSDNPKLELKNKLPDRPQANHEFVQPLFVSRMPTRKMTGQGHMETVKSAKRLNEGISVIKMPLTKLKLKDLELMVNREREKDLYDALKARLEAFNDDPAKAFAEPFMKKGGAIVKSVRVEQVQKSGVLVREGNGVADNASMVRVDVFTKDGKYFLVPIYTWQVAKGILPNKAIVALKDENEWIEIDNNYIFLFSLYQNDLIKVKTKKDKFWGYFNGLNRHTGGINIRTHDLEKSKGKQGIFEGIGVKTALSFEKYQVDELGKNIRLCKPSKRQAVR

SEQ ID NO: 18862 - protein, 1052 aa, unidentified
  REGION 1..1052: note = Cas Enzyme sequence
MENKNLHYILGLDLGIASVGWAVVEIDKKENPLRLIDVGVRTFERAETQKGESLALSRRSARSARRLTQRRVARLKKAKRLLKSENILLSTDERLPHQVWQLRVEGLDRKLERQEWAAVLLHLIKHRGYLSQRKNESKSENKELGALLSGVASNHELLQQATYRTPAELAVKKFEVEEGHIRNQQGAYTHTFSRLDLLAEMELLFSRQQHFGNPFASEKLLENLTALLMWQKRALSGEDILKMLGKCTFEDEYKAAKNTYTAERFVWITKLNNLRIQENGLERALSDNERLMLIEQPYEKAKLTYAQVRSILNLSDDAIFKGVRYSGEDKKAIETKTTLMEMKAYHQIRKVLEGNNLKAEWVALKANPTLLDEIGTAFSLYKTDEDISAYLAGKLSQPVLNALLENLSFDKFIQLSLKALYKLLPLMQQGLRYDEACREIYGDHYGKKTEETHHFLPQIPADEIRNPVVLRTLTQARKVINGVVRLYGSPARIHIETGREVGKSYKDRHELKKRQEENRKQREKTISEIKTLFPNFSGEPKGKDILKMRLYYQQNAKCLYSGKPLELHRLFEQKYVEVDHALPLSRTWDDSFNNKVLVLANENQNKGNLTPFEWLDGKNNSERWRTFKALVETSAFPYAKKQHILSQKLDEKGFIERNLNDTRYVARFLCNFIADNMHLTGEGKRKVFASNGQITALLRRRWGLAKSREDNDRHHALDAVLVACSTVAMQQKITRFIRFEAGDVFTGERIDRETGEIIPLHFPTPWQFFKQEVEIRIFSDNPKLDLENSLPDRPQANHEFVQPLFVSRMPTRKMTGQGHMETVKSAKRLNEGISMIKMPLTKLKLKDLELMVNREREKDLYDALKTRLEAFNNDPAKAFAEPFMKKGGAIVKSVRVEQVQKSGVLVRQGNGVADNASMVRVDVFTKDGKYFLVPIYTWQVAKGILPNKAVIQGKDEEDWEDIDDATFQFSLHPNDLISVKTKKDEFLGYFNGLNRHTGGINIRTHDLEKSKGKQGIFEGIGVKIALSFEKYQIDELGKNIRLCKPSKRQPVR

SEQ ID NO: 18863 - protein, 1054 aa, unidentified
  REGION 1..1054: note = Cas Enzyme sequence
MENKNLHYILGLDLGIASVGWAVVEIDEKENPLRLIDVGVRTFERAEVPKTGESLALSRRLARSARRLTQRRVARLKKAKRLLKSENILLFTDERLPHQVWQLRVEGLDRKLERQEWAAVLLHLIKHRGYLSQRKNESKSENKELGALLNGVDNNHKLLQQATYRTPAELAVKKFEIEEGHIRNQQGAYTHTFSRLDLLAEMELLFSRQQHFGNPFASEKLLENLTALLMWQKPALSGDAILKRLGKCTFEDEYKAAKNTYTAERFVWITKLNNLRIQENGLERALSDNERLMLIEQPYEKAKLTYAQVRSILNLSDEAIFKGVRYFGEDKKAIEIKTILMEMKGYHQICNALKGNNLKAEWAELKENPALLDEIGTAFSLYKTDEDISAYLAGKLSQPVLNALLLKNLSFDKFIQLSLKALYKLLPLMQQGLRYDEACREIYGDHYGKKTEETHHFLPQIPADEIRNPVVLRTLTQARKVINGVVRLYGSPARIHIETGREVGKSYKDRHELKKRQEENRKQREKTISEIKTLFPNFSGEPKGKDILKMRLYYQQNAKCLYSGKPLELHRLFEQKYVEVDHALPLSRTWDDSFNNKVLVLANENQNKGNLTPFEWLDGKHNSERWRAFKALVETSAFPYAKKQRILSQKLDEKGFIERNLNDTRYVARFLCNFIADNMRLTGEGKRKVFASNGQITALLRRRWGLAKSREDNDRHHALDAVLVACSTVAMQQKITRFIRFEAGDVFTGERIDRETGEIIPLHFPTPWQFFKQEVEIRIFSDNPKLELENRLPDRPQANHEFVQPLFVSRMPTRKMTGQGHMETVKSAKRLNEGISMIKMPLTKLKLKDLELMVNREREKDLYDALKTRLEAFNNDPAKAFAEPFMKKGGAIVKSVRVEQVQKSGVLVRQGNGVADNASMVRVDVFTKDGKYFLVPIYTWQVAKGILPNKAVIQGKDEEDWEDIDDATFQFSLHPNDLISVKTKKDEFLGYFNGLNRHTGGINIRTHDLEKSKGKQGIFEGIGVKIALSFEKYQIDELGKNIRLCKPSKRQPVR

SEQ ID NO: 18864 - protein, 1054 aa, unidentified
  REGION 1..1054: note = Cas Enzyme sequence
MENKNLHYILGLDLGIASVGWAVVEIDEKENPLRLIDVGVRTFERAEVPKTGESLALSRRLARSARRLTQRRVARLKKAKRLLKSENILLSTDERLPHQVWQLRVEGLDRKLERQEWAAVLLHLIKHRGYLSQRKNESKSENKELGALLSGVASNHELLQQATYRTPAELAVKKFEVEEGHIRNQQGAYTHTFSRLDLLAEMELLFSRQQHFGNPFASEKLLENLTSLLMWQKPALSGEAILKMLGKCTFEDEYKAAKNTYSAERFVWITKLNNLRIQENGLERALNDNERLMLINQPYEKAKLNYAQVRSRLNLSDEAIFKGVRYSGEDKKAIETKTTLMEMKTYHQIRKVLEGNNLKAEWAELKANPTLLDEIGTAFSLYKTDEDISGYLAGKLSQPVLDVLLENLSFDKFIQLSLKALYKLLPLMQQGLRYDEACREIYGDHYGKKTEENHHFLPQIPADEIRNPVVLRTLTQARKVINGVVRLYGSPARIHIETGREVGKSYKDRRELEKRQEENRKQRENAIKEFKEYFPHFAGEPKTKDILKMRLYKQQNAKCLYSGKPIELHRLLEKGYVEVDHALPFSRTWDNSFSNKVLVLANENQNKGNSTPFEWLDGKHNSERWRAFKALIETSAFPYAKKQRILSQKLDEKGFIERNLNDTRYVARFLCNFIADNMHLTGEGKRKVFASNGQITALLRSRWGLAKSREDNDRHHALDAVVVACSTVAMQQKITRFVRFEEGNVFTGERRDRETGEIIPLHFPAPWQFFKQEVEIRIFSDNPKLELENRLSDRPQANHEFVQPLFVSRMPTRKMTGQGHMETVKSAKRLNKGISVIKMPLTKLKLKDLELMVNREREKYLYDTLKARLEAFNDDPAKAFAEPFIKKGGAIVKSVRVEQIQKSGVLVREGNGVADNASMVRVDVFTKGGKYFLVPIYTWQVAKGILPNKAIVALKDENEWIEIDNNHIFLFSLYQNDLIKVKTKKDELFGYFNSLNRATAAIDIKVHDLDKSKGKNGIYQSVGVKLALSFEKYQVDELGKNIRLCKPSKRQAVR

SEQ ID NO: 18865 - protein, 1057 aa, unidentified
  REGION 1..1057: note = Cas Enzyme sequence
MENKNLHYILGLDLGIASVGWAVVEIDEKENPLRLIDVGVRTFERAEVPKTGESLALSRRLARSARRLTQRRVARLKKAKRLLKSENILLSTDERLPHQVWQLRVEGLDRKLERQEWAAVLLHLIKHRGYLSQRKNESKSENKELGALLSGVASNHELLQQATYRTPAELAVKKFEVEEGHIRNQQGAYTHTFSRLDLLAEMELLFSRQQHFGNPFASEKLLENLTSLLMWQKPALSGEAILKMLGKCTFEDEYKAAKNTYSAERFVWITKLNNLRIQENGLERALNDNERLMLINQPYEKAKLNYAQVRSRLNLSDEAIFKGVRYSGEDKKAIETKTTLMEMKTYHQIRKVLEGNNLKAEWAELKANPTLLDEIGTAFSLYKTDEDISGYLAGKLSQPVLDVLLENLSFDKFIQLSLKALYKLLPLMQQGLRYDEACREIYGDHYGKKTEENHHFLPQIPADEIRNPVVLRTLTQARKVINGVVRLYGSPARIHIETGREVGKSYKDRRELEKRQEENRKQRENAIKEFKEYFPHFAGEPKTKDILKMRLYKQQNAKCLYSGKPIELHRLLEKGYVEVDHALPFSRTWDNSFSNKVLVLANENQNKGNSTPFEWLDGKHNSERWRAFKALIETSAFPYAKKQRILSQKLDEKGFIERNLNDTRYVARFLCNFIADNMHLTGEGKRKVFASNGQITALLRSRWGLAKSREDNDRHHALDAVVVACSTVAMQQKITRFVRFEEGNVFTGERRDRETGEIIPLHFPAPWQFFKQEVEIRIFSDNPKLELENRLSDRPQANHEFVQPLFVSRMPTRKMTGQGHMETVKSAKRLNEGISVIKIPLTKLKLKDLELMVNREREKDLYKSLKARLEAFNDDPAKAFTESFVKNGWAIIVKSIRVEKVQKSGVLVHAGNGVADNASGSIVRVDVFIKDRKYFLVPIYTWQVAKGILPNRAVIADTDENEWEMMDENSTFQFSLHPNDLIRVKTKKDEFWGYFNGLNRHTGGINIRTHDLEKSKGKQGIFEGIGVKIALSFEKYQVDELGKNIRLCKPSKRQPVR

SEQ ID NO: 18866 - protein, 1008 aa, unidentified
  REGION 1..1008: note = Cas Enzyme sequence
VPKTGESLALSRRLARSARRLTQRRVARLKKAKRLLKSENILLFTDERLPHQVWQLRVEGLDRKLERQEWAAVLLHLIKHRGYLSQRKNESKSENKELGALLNGVDNNHKLLQQATYRTPAELAVKKFEIEEGHIRNQQGAYTHTFSRLDLLAEMELLFSRQQHFGNPFASEKLLENLTALLMWQKPALSGDAILKRLGKCTFEDEYKAAKNTYTAERFVWITKLNNLRIQENGLERALSDNERLMLIEQPYEKAKLTYAQVRSILNLSDEAIFKGVRYFGEDKKAIEIKTILMEMKGYHQICNALKGNNLKAEWAELKENPALLDEIGTAFSLYKTDEDISAYLAGKLSQPVLNALLLKNLSFDKFIQLSLKALYKLLPLMQQGLRYDEACCEIYGDHYGKKTEETHHFLPQIPADEIRNPVVLRTLTQARKVINGVVRLYGSPARIHIETGREVGKSYKDRRELEKRQEENRKQRENAIKEFKEYFPHFAGEPKAKDILKMRLYKQQNAKCLYSGKPIELHRLLEKGYVEVDLALPFSRTWDDSFNNKVLVLANENQNKGNLTPFEWLDGKHNSERWRAFKALVETSAFPYAKKQRILSQKLDEKGFIERNLNDTRYVARFLCNFIADNMRLTGEGKRKVFASNGQITALLRGRWGLAKSREDNDRHHALDAVVVACSTVAMQQKITRFVRFEAGDVFTGERIDRETGEIIPLHFPTPWQFFKQEVEIRIFSDNPKLELKNKLPDRPQANHEFVQPLFVSRMPTRKMTGQGHMETVKSAKRLNEGISVIKMPLTKLKLKDLELMVNREREKDLYDALKARLEAFNDDPAKAFAEPFMKKGGAIVKSVRVEQVQKSGVLVREGNGVADNASMVRVDVFTKDGKYFLVPIYTWQVAKGILPNKAIVALKDENEWIEIDNNYIFLFSLYQNDLIKVKTKKDKFWGYFNGLNRHTGGINIRTHDLEKSKGKQGIFEGIGVKTALSFEKYQVDELGKNIRLCKPSKRQAVR

SEQ ID NO: 18867 - protein, 1008 aa, unidentified
  REGION 1..1008: note = Cas Enzyme sequence
VPKTGESLALSRRLARSARRLTQRRVARLKKAKRLLKSENILLFTDERLPHQVWQLRVEGLDRKLERQEWAAVLLHLIKHRGYLSQRKNESKSENKELGALLNGVDNNHKLLQQATYRTPAELAVKKFEIEEGHIRNQQGAYTHTFSRLDLLAEMELLFSRQQHFGNPFASEKLLENLTALLMWQKPALSGDAILKRLGKCTFEDEYKAAKNTYTAERFVWITKLNNLRIQENGLERALSDNERLMLIEQPYEKAKLTYAQVRSILNLSDEAIFKGVRYFGEDKKAIEIKTILMEMKGYHQICNALKGNNLKAEWAELKENPALLDEIGTAFSLYKTDEDISAYLAGKLSQPVLNALLLKNLSFDKFIQLSLKALYKLLPLMQQGLRYDEACCEIYGDHYGKKTEETHHFLPQIPADEIRNPVVLRTLTQARKVINGVVRLYGSPARIHIETGREVGKSYKDRRELEKRQEENRKQRENAIKEFKEYFPHFAGEPKAKDILKMRLYKQQNAKCLYSGKPIELHRLLEKGYVEVDHALPFSRTWDDSFNNKVLVLANENQNKGNLTPFEWLDGKHNSERWRAFKALVETSAFPYAKKQRILSQKLDEKGFIERNLNDTRYVARFLCNFIADNMRLTGEGKRKVFASNGQITALLRGRWGLAKSREDNDRHHALDAVVVACSTVAMQQKITRFVRFEAGDVFTGERIDRETGEIIPLHFPTPWQFFKQEVEIRIFSDNPKLELKNKLPDRPQANHEFVQPLFVSRMPTRKMTGQGHMETVKSAKRLNEGISVIKMPLTKLKLKDLELMVNREREKDLYDALKARLEAFNDDPAKAFAEPFMKKGGAIVKSVRVEQVQKSGVLVREGNGVADNASMVRVDVFTKDGKYFLVPIYTWQVAKGILPNKAIVALKDENEWIEIDNNYIFLFSLYQNDLIKVKTKKDKFWGYFNGLNRHTGGINIRTHDLEKSKGKQGIFEGIGVKTALSFEKYQVDELGKNIRLCKPSKRQAVR

SEQ ID NO: 18868 - protein, 1084 aa, unidentified
  REGION 1..1084: note = Cas Enzyme sequence
VSIYRWQFLCNNVGIKSLIACIKENGMKSVSLNYILGLDLGIASVGWAVVEIDKNENPLRLVDVGVRTFERAEEPKTGDSLAAERRLARSTRRLIRRRAHRLLRAKRLLKREGILLAEDFRLPTELRDLPNNVWELRVRGLAHKLERKEWAAVLLHLIKHRGYLSQRKNESKTDNKELGALLKGVRENHQLLQLNDYSSPAELAIKKFQTECGHIRNQRGEYIHTFDRLDLQRELKQLFNAQRTVQNPYTTVELEQQVTELLMCQKESLSGEAILKMLGKCTFEPTEYKAAKNTYSAERFIWLTKLSNLRILENGIERELTKSERELVINQPYAKAKFTYAQLRRLLELSDNALFKGLHYAKDNAESVTLMEMKAFHAIRKALENNGLKIEWQGLATNPKLLDEIGTAFSLYKTDEDITKYLNGKLSQSILNVLLENIVFDRFIQLSLPCLEKILPLMEQGSRYDEACKAIYGDHYDKRKQEENLYLPTIPADEIRNPVVLRALSQARKVINGVVRLYGSPARVHIETGREVGRSFRERNEIKKQQEENRTQRESAVKKFKEFFPAFSGEPKVKDILKMRLYELQHGKCLYSRKEIDLTRLLEKGYTEIDHALPFSRTWDDSFNNKVLVLASENQNKGNKTPYEWLGGEENSPYWKMFVALVNGSRFSYAKKQRILTQELDEEGFKERNLNDTRYIARFLCKFIAGNMLLLGKGKKKVFASNGQITALLRRRWGIAKIRDENDRHHAVDAIVVACSTVGMQQKITQFVRFKEGNAFTGERIDRGSGEIIPIHFPEPWKYFRQEVEIRVFSDAPKEDLIIKLPDRPQANHEFVQPLFVARAPNRKMTGPGHLETIKSVKRLDEGISILKVPLSQLKLNLLENMVNREREPELYKALKTRLEQFENNPAKAFTEPFYKKGGQQVKSVRVEMVQKTGVLVRNGKGIADNASMVRVDVFTKSGKYFLVPIYTWQVAKGILPNKAIVAHKDESQWDEIDDSFKFKFSIYSNDLIKVVTKKETFFGYYSGCDRATAAISIKEHDSEKTKGKDGLHRSIGVKTAVSFEKYQVDELGKNIRLCRLSKRQKVR

SEQ ID NO: 18869 - protein, 1102 aa, unidentified
  REGION 1..1102: note = Cas Enzyme sequence
MVILAWDIFILTKHHITEKLMAAFKPNPINYVLGLDIGIASVGWAMVEIDEEENPIRLIDLGVRVFERAEVPKTGDSLAAVRRLARSVRRLTRRRAHRLLRARRLLKREGVLQAADFDENGLIKSLPNTPWQLRTAALDRKLTPLEWSAVLLHLIKHRGYSSQRKNEGETADKELGALLKGVADNAHALQTSNFRTPAELALNKFEKESGHIRNQRGDYSHTFSRKDLQAELNLLFEKQKEFGNPHVSDGLKEGIETLLMTQRPALSGDAVQKMLGHCTCEPTEPKAAKNTYTAERFVWLTKLNNLRILEQGSERPLTDTERATLMDEPYRKSKLTYAQVRKLLDLDDTAFFKGLRYGKDNAEASTLMEMKAYHAISRALEKEGLKDKKSPLNLSPELQDEIGTAFSLFKTDEDITGRLKDRVQPEILETLLKHISFDKFVQISLKALRRIVPLMEQGKRYDEACAEIYGDHYDKKNTEEKIYLPPIPADEIRNPVVLRALSQVRKVINAVVRRYGSPARIHIETAREVGKSFKDRKEIEKRQEENRKDREKAAAKFREYFPNFVGEPKSKDILKLRLYEQQHGKCLYSGKEINLGRLNEKGYVEIDHALPFSRTWDDSFNNKVLVLGSENQNKGNQTPYEYFNGKDNSREWQEFKARVETSRFPRSKKQRILLQKFDEDGFKERNLNDTRYVNRFLCQFIADRMRLTGKGKRRVFASNGQITNLLRGFWGLRKVRAENDRHHALDAVVVACSTVAMQQKITRFVRYKEMNAFDGKTIDKETGEVLHQKAHFPQPWDFFAQEVMIRVFGKPDGKPEFEEADTPEKLRTLLAEKLSSRPEAVHEYVTPLFVSRASNRKMSGAHKDTLRSAKRFVKHNEKISVKRVWLTEIKLADLENMVNYKNGREIELYEALKARLGAYGGNAKQAFDPKDNPFYKKGGQLVKAVRVEKTQESGVLLNKKNAYTIADNGDMVRVDVFCKVDKKGKNQYFIVPIYAWQVAENILPDIDCKGYRIDDSYTFCFSLHKYDLIAFQKDEKSKVEFAYYINCDSSNGRFYLAWHDKGSKEQQFRISTQNLVLMQKYQIDELGKEIRPCRLKKRPPVC

SEQ ID NO: 18870 - protein, 1077 aa, unidentified
  REGION 1..1077: note = Cas Enzyme sequence
MQQKPQRYILGLDLGIASVGWACVWADENEHPTGLLDCGVRTFERAEVPKTGDSLALARRQARSVRRLIRRRAHRLLRLRRLLKREGVLLSADFNENGLVRGLPIDAWALRVAGLDRKLSNKEWAAVLLHLVKHRGYLSQRKNETQSKDKELGRLLAGVNGNREALQNRSDEYRTAAELAVKKFAAENNGSLRNKGGDYSHTFDRKDLQRELHLLFERQRALDNPFTSSEMEAAVDELLMKQRSALQGEAVLKMLGRCTFEPSEYKAAKNTYSAERFVWLTKLNNLRIQYNGEERALSEAERRLLLDEPYQKAKLTYKQVRTILELPESAVFKGLRYGHGEDGLKAESGTLMEMKAYHAVRKALKDAGLEGEWENRIRNPELLDAIGTAFSLYKTDEDIRANLAAFRLSENVLEALLAGLNFDKFVHLSLKALAKILPLMEQGMRYDEACKEAYGDHYGAKEQEDHRLLPPFVADDIRNPVVFRTLTQARKIVNEIVRRYGSPLRVHIETGREVGKSFSDRKEIEKRQEENRKERERAAAHFKELFPNFAGEPKAQDILKLRLYEQQHGKCLYSGKEIDLRRLPEKGYVEIDHALPFSRTWDDSFNNKVLVLGKENQDKRNRTPYEYLDGKGNSGAWRAFAERVSGCRFPYAKKQRLLTQKLDEKTEQGFLERNLNDTRYVARFLCQFIEEKMHLEGAGKKRVFASNGQITALLRGFWGLKKVREENDRHHALDAVVVACSSVSMQQKITRHFRYREELEHIDRETGEVIHGFPQPWEFFRQEVMTRVFSDDPVSELAEKLDSRPEAVHEFVTPLFVSRAPHRKVTGQGHLETIRSAKRLDEKISVVKLPLTQLKTKDIERIVGYPNREPALYDALAARLAAFKDDPAKAFSEPFYKTGKDGKCGVLVKAVRVENVQKSGLLVRKDESGKMQGVADNATMVRVDVFGKNGKNYLVPVYAWQVEKGELPNRAVVAYADEEDWDEMDDSFEFKFSLYPNDLVEVVTKKDKFFGYYSGFNRATGAINIKEHDLSKSKVKNGVYEGIGVKTAQSFQKYQVDTLGKTIRLCKPEKRMGFKKK

SEQ ID NO: 18871 - protein, 995 aa, unidentified
  REGION 1..995: note = Cas Enzyme sequence
LKREGVLSAADFDENGLVRGLPIDAWALRVAGLDRKLSNKEWAAVLLHLVKHRGYLSQRKNETQSKDKELGRLLAGVNGNREALQNRSDEYRTAAELAVKKFAAENNGSLRNKGGDYSHTFDRKDLQRELHLLFERQRALDNPFTSSEMEAAVDELLMKQRSALQGEAVLKMLGRCTFEPSEYKAAKNTYSAERFVWLTKLNNLRIQYNGEERALSEAERRLLLDEPYQKAKLTYKQVRTILELPESAVFKGLRYGHGEDGLKAESGTLMEMKAYHAVRKALKDAGLEGEWENRIRNPELLDAIGTAFSLYKTDEDIRANLAAFRLSENVLEALLAGLNFDKFVHLSLKALEKILPLMEQGMRYDEACKEAYGDHYGAKEQEDHRLLPPFVSDDIRNPVVFRTLTQARKIVNEIVRRYGSPLRVHIETGREVGKSFSDRKEIEKRQEENRKERERAAAHFKELFPNFAGEPKAQDILKLRLYEQQHGKCLYSGKEIDLRRLPEKGYAEIDHALPFSRTWDDSFNNKVLVLGAENQNKRNRTPYEYLDGKGNSGAWRAFAERVSGCRFPYAKKQRLLTQKLDEKTEQGFLERNLNDTRYVARFLCQFIEEKMHLEGAGKKRVFASNGQITALLRGFWGLKKVREENDRHHALDAVVVACSSVSMQQKITRHFRYREELEHIDRETGEVIHGFPQPWEFFRQEVMTRVFSDDPVSELAEKLDSRPEAVHEFVTPLFVSRAPHRKVTGQGHLETVRSAKRLDEKISVVKLPLTQLKTKDIERIVGYPNREPALYDALAARLAAFKDDPAKAFSEPFYKTGKDGKCGVLVKAVRVENVQKSGLLVRKDEGGKMQGVADNATMVRVDVFGKNGKNYLVPVYAWQVEKGELPNRAVVAYADEEDWDEMDDSFEFKFSLYPNDLVEVVTKKDKFFGYYSGFNRATGAINIKEHDLSKSKVKNGVYEGIGVKTAQSFQKYQVDTLGKTIRLCKPEKRMGFKKK

SEQ ID NO: 18872 - protein, 1077 aa, unidentified
  REGION 1..1077: note = Cas Enzyme sequence
MQQKPQRYILGLDLGIASVGWACVWSDENEHPTGLLDCGVRTFERAEVPKTGDSLALARRQARSVRRLIRRRAHRLLRLRRLLKREGVLSAADFDENGLVRGLPIDAWALRVAGLDRKLSNKEWAAVLLHLVKHRGYLSQRKNETQSKDKELGRLLAGVNGNREALQNRSDEYRTAAELAVKKFAAENNGSLRNKGGDYSHTFDRKDLQRELHLLFERQRALDNPFTSSEMEAAVDELLMKQRSALQGEAVLKMLGRCTFEPSEYKAAKNTYSAERFVWLTKLNNLRIQYNGEERALSEAERRLLLDEPYQKAKLTYKQVRTILELPESAVFKGLRYGHGEDGLKAESGTLMEMKAYHAVRKALKDAGLEGEWENRIRNPELLDAIGTAFSLYKTDEDIRANLAAFRLSENVLEALLAGLNFDKFVHLSLKALEKILPLMEQGMRYDEACKEAYGDHYGAKEQEAHRLLPPFVSDDIRNPVVFRTLTQARKIVNEIVRRYGSPLRVHIETGREVGKSFSDRKEIEKRQEENRKERERAAAHFKELFPNFAGEPKAQDILKLRLYEQQHGKCLYSGKEIDLRRLPEKGYAEIDHALPFSRTWDDSFNNKVLVLGAENQNKRNRTPYEYLDGKGNSGAWRAFAERVSGCRFPYAKKQRLLTQKLDEKTEQGFLERNLNDTRYVARFLCQFIEEKMHLEGAGKKRVFASNGQITALLRGFWGLKKVREENDRHHALDAVVVACSSVSMQQKITRHFRYREELEHIDRETGEVIHGFPQPWEFFRQEVMTRVFSDDPVSELAEKLDSRPEAVHEFVTPLFVSRAPHRKVTGQGHLETVRSAKRLDEKISVVKLPLTQLKTKDIERIVGYPNREPALYDALAARLAAFKDDPAKAFSEPFYKTGKDGKCGVLVKAVRVENVQKSGLLVRKDEGGKMQGVADNATMVRVDVFGKNGKNYLVPVYAWQVEKGELPNRAVVAYADEEDWDEMDDSFEFKFSLYPNDLVEVVTKKDKFFGYYSGFNRATGAINIKEHDLSKSKVKNGVYEGIGVKTAQSFQKYQVDTLGKTIRLCKPEKRMGFKKK

SEQ ID NO: 18873 - protein, 1019 aa, unidentified
  REGION 1..1019: note = Cas Enzyme sequence
RRRVRRRAHRLLRLRRLLKREGVLLSADFDENGLVRGLPIDAWALRVAGLDRKLNNKEWAAVLLHLVKHRGYLSQRKNETQSKDKELGRLLAGVNGNREALQNRSDEYRTAAELAVKKFAAENNGSLCNKGGDYSHTFDRKDLQRELHLLFARQRALGNPFTSSEMEAAVDELLMKQRSALQGEAVLKMLGRCTFEPSEYKAAKNTYSAERFVWLTKLNNLRIQYNGEERALSEAERRLLLDEPYQKAKLTYKQVRTILELPESAVFKGLRYGHGEDGLKAESGTLMEMKAYHAVRKALKDAGLEGEWENRIRNPELLDAIGIAFSLYKTDEDIRANLAAFRLPENVLEALLAGLNFDKFVQLSLKSLAKILPLMEQGMRYDEACKAAYGDHYGAKEQENHRLLPPFVADDIRNPVVFRTLTQARKIVNEIVRRYGSPLRVHIETGREVGKSFSDRKEIEKRQEENRKERERAAAHFKELFPNFAGEPKAQDILKLRLYEQQHGKCLYSGKKIDLRRLPEKGYVEIDHALPFSRTWDDSFNNKVLVLGKENQDKRNHTPYEYLDGKGNSETWRAFAERVSGCRFPYAKKQRLLTQKLDEKTEQGFLERNLNDTRYVARFLCQFIEEKMHLEGAGKKRVFASNGQITALLRGFWGLKKVREENDRHHALDAVVVACSSVSMQQKITRHFRYREELEHIDRETGEVIHGFPQPWEFFRQEVMTRVFSDDPVSELAEKLDSRPEAVHEFVTPLFVSRAPHRKVTGQGHKATISSAKRWDEEKISVIKLVLKPTKPGKGLKTKDIERIVGYPNREPALYEALTARLAAFNDDPAKAFAEPFYKTGKDGKRGALVKAMRVENVQKSGLLVRKDESGKMQGVADNETMVRVDVFGKNGKNYLVPVYAWQVEKGEVPNRAVVAYADEEDWDEMDDSFEFKFSLYPNDLVEVVTKKDKFFGYYSGFNRATGAINIKEHDLSKSKVKNGVYEGIGVKTAQSFQKYQVDTLGKTIRLCKPEKRMGFKKK

SEQ ID NO: 18874 - protein, 914 aa, unidentified
  REGION 1..914: note = Cas Enzyme sequence
LVAFENRETGEAVDFGVRLFSEWDPANNQSRREKRSGRRLRSRRKNRLQDMKKFLVDQGMIPSDYVFHLDPYALRVKGLSEKITDEELATVLYNLAKLRGSSLETVEDTDDTKSDDSLSTKNNLRINDALIKSGKYVCQIQQERLSEKGKLRGHINNFRTKDYVAELKQILSNQGKSKDFNDYVENLIVRRRDFSDGPGSQKSPTPYGRWLTKDQKEPIDLIEKMRGKCSYYPDQLRCAKMAYKADLFNLLNDLNNLSVKGEKLEREQKEQVIEYVNEKGSIKPKQLAKLLGLSDIDDISGFRIDKSDKPILTEFKGYTKVKKVLENSDLYHDHELVDQIIDVLTRDKVVERRANEIRKLSNKFSEEEIEALANLTQISGYHSMSAKAINEFNKEMLISPLNQMQIITNRGNQNDRFNKLKGMKEIHADDTAILSPVAKRAQREAMKVVNRLRELYGEFDSIVVETTRAKNSQEQKTKIKESQAFFEKEKKRAQQIVDENKYNLTVNAKLIQKLRLYTEQNCKTAYALMPIDLDLLISDPTAFEVDHIIPISISYDDSFSNKVLVTRWENQIKGNLTPLQAHKNHKFGEYSDLASYIANVNDLRKMNGMRYEKKKNLLLSDEDLTKFDTQKKFIARNIVDTAYAERVVLNTLQDYFRANEISTVVNTVKGNLTHMFRNKIHLDKERSDIDTGDAHHAIDALIIASLKVFRRFGEILDKRPETIIDEETGEVLEIIEDKKFFDPRYIEIVHKLSLIEKDVTKFSYKIDTKPNRQVADETIYSTRNINGEDLVVKKYKNIYEEKFVTLANDILENNVEKYLMYRNSPETFKYISDIILYYAKEYRNDEKLMKNGLFVKNPLNKYYEEHHEYLHKPSKHNNGPSIISMKYTDGRLGNKIDISKNYSVDTEKKKVVLQ

SEQ ID NO: 18875 - protein, 1073 aa, unidentified
  REGION 1..1073: note = Cas Enzyme sequence
MKKRNNGLVLGLDIGVTSVGYGIVNRETGEAVDFGVRLFSEWDPANNQSRREKRSGRRLRSRRKNRLQDMKKFLVDQGMIPSNYVFHLDPYALRVKGLSEKLTDEELATVLYNLAKLRGSSLETVEDTEEAKNNDILSSKNNLRINDALIKSGKYVCEIQQERLSEKGKVRGHINNFRTKDYVAELKQILSNQGKAVDFNDYVENLIVRRRDFSDGPGSQKSPTPYGRWLTKDQEEPIDLIEKMRGKCSYYPNQLRCAKMAYKADLFNLLNDLNNLSIKGEKLEREQKEQIIEYVNEKGSIKPKQLAKLLELNDIDDISGFRIDKSDKPILTEFKGYTKVKKVLENSGLYHDHELIDQIIDILTRDKVVERRANEIRKLSNKFSEEEIEALANLNQISGYHSMSAKAINEFNKEMLISPLNQMQIITNRGNQNDRFNKLKGMKEIHADDTAILSPVAKRAQREAMKVVNRLRELYGEFDSIVVETTRAKNSQEQKTKIKETQAFFEKEKKRAQQIVDENKYNLTVNAKLIQKLRLYTEQNCKTAYALIPIDLDLLISDPTAFEVDHIIPISISYDDSFSNKVLVTRWENQIKGNLTPLQAHKNHKFGEYSDLASYIANVNDLRKMNGMRYEKKKNLLLSDEDLTKFDTQKKFIARNIVDTAYAERVVLNTLQDYFRANEISTVVNTVKGNLTHMFRNKIHLDKERSDIDTGDAHHAIDALIIASLKVFRRFGEILDKRPETIIDEETGEVLEIIEDKKFFDPRYIEIVHKLSLIEKDVTKFSYKIDTKPNRQVADETIYSTRNINGKDLVVKKYKNIYEEKFVTLANDILENKVEKYLMYRNSPETFKYISDIVLNYAKEYREDEKLMKNGLFVKNPLNRYYEEHHEYLHKPSKHNNGPTIISMKYTDGRLGNKIDISKNYSVDTEKKKVVLQQISPYRTDFYYSPTEGYKFVTIRYSSVYYSSAQGLYVIDKDWYDSQKKIKKIDDSFEFCFSMHRNEIIRIKKEGEDIMWRFTATSNDETNRIEVKPIGYKINKQLMPSIGKKILLLEKYATDVCGNLYKVTNQELKLEFK

SEQ ID NO: 18876 - protein, 1073 aa, unidentified
  REGION 1..1073: note = Cas Enzyme sequence
MEKRNNGLVLGLDIGVTSVGYGIVNRETGEAVDFGVRLFSEWDPANNQNRRAKRSGRRLRSRRKNRLQDMKKFLVDQGMIPSNYVFHLEPYALRVKGLSEKLTDEELATVLYNLAKLRGSSLETVEDTEEVRNDDVLSSKNNLRINDALIKSGKYVCQIQQERLFAQGKLRGHINNFRTKDYVAELKQILSNQGKSKDFNEYVENLIVRRRDFSDGPGSQKSPTPYGRWLAKDQEEPIDLIEKMRGKCSYYPDQLRCAKMAYKADLFNLLNDLNNLSIKGEKLEREQKEQIIEYINEKGLIKPKQLAKLLELNDIDDISGFRIDKSDKPILTEFKGYTKVKKVLENSGLYHDHELVDQIIDILTRDKVVERRANEIRKLSNKFSEEEIEALANLTQISGYHSMSAKAINEFNKEMLISPLNQMQIITNRGNQNDRFNKLKGMKEIHADDTAILSPVAKRAQREAMKVVNRLRELYGEFDSIVVETTRAKNSQEQKTKIKETQAFFEKEKKRAQQIVDENKYNLTVNAKLIQKLRLYTEQNCKTAYALKPIDLDLLISDPTAFEVDHIIPISISYDDSFSNKVLVTRWENQIKGNLTPLQAHKNHKFGEYSDLASYIANVNDLRKMNGMRYEKKKNLLLSDEDLTKFDTQKKFIARNIVDTAYAERVVLNTLQDYFRANEISTVVNTVKGNLTHMFRNKIHLDKERSDIDTGDAHHAIDALIIASLKVFRRFGEILDKRPETIIDEETGEVLEIIEDKKFFDPRYIEIVHKLSMIEKDVTKFSYKIDTKPNRQVADETIYSTRNINGQDYVIRKYKNIYDETNLTLANDILENKVEKYLMYRNSPETFKYISDIVLHYAKEYRDDEKLMKNGLFVKNPLNRYYEEHHEYLRKPSKHNNGPAIISMKYIDGKLGNKIDISKNYSVDTEKKKVVLQQISAYRTDFYYSSTEGYKFVTVRYSSVYYSSAQGLYVIDKDWYESQKKVKKIDDSFEFCFSMYRNEIIRIKKEGEDMMWRFTATNDDLRNKIEVKPIGYKINKQLMPAIGKKILLLEKYATDVCGNLYKVTNQELKLEFK

SEQ ID NO: 18877 - protein, 1073 aa, unidentified
  REGION 1..1073: note = Cas Enzyme sequence
MEKRNNGLVLGLDIGVTSVGYGIVNRETGEAVDFGVRLFSEWDPANNQNRRTKRSGRRLRSRRKNRLQDMKKFLVDQRMIPSDYAFHLDPYALRVKGLSEKLTDEELATVLYNLAKLRGSSLETVEDTEEVKNDNVLSSKNNLKINDALIKSGKYICQIQQERLSEEGKLRGHINNFRTKDYVAELKQILSSQGKSKDFNDYVENLIIRRRDFSDGPGSQQSPTPYGRWLTKDQEEPIDLIEKMRGKCSYYPDQLRCAKMAYKADLFNLLNDLNNLSVKGEKLEREQKEQVIEYVNEKGSIKPKQLAKLLELKDIDEISGFRIDKSDKPILTEFKGYTKVKKVLENSGLYQDHELVDQIIDVLTRDKVVERRANEIRKLSNKFTEEEIEALANLTQISGYHSMSAKAINEFNKEMLISPLNQMQIITNRGNQNDRFNKLKGLKEIHADDTAVLSPVAKRAQREAMKVVNRLRELYGEFDSIVVETTRAKNSQEQKTKIKETQAFFEKEKKRAQQIVDENKYNLTVNAKLIQKLRLYTEQNCKTAYALMPIDLDLLISDPTAFEVDHIIPISISYDDSFSNKVLVTRWENQIKGNLTPLQAHKNHKFGEHSNLASYIANVNDLRKMNGMRYEKKKNLLLSDEDLTKFDTQKKFIARNIVDTAYAERVVLNTLQDYFRANEISTVVNTVKGNLTHMFRNKIHLDKERSDIDTGDAHHAIDALIIASLKVFRRFGEILDKRPETIIDEETGEVLEIIEDKKFFDPRYIEIVHKLSLIEKDVTKFSYKIDTKPNRQVADETIYSTRNINGEDLVVKKYKNIYEEKFVTLANDILENKVEKYLMYRNSPETFKYISDIVLHYAKEYREDEKLMKNGLFVKNPLNRYYEEHHEYLHKPSKHNNGPTIISMKYTDGRLGNKIDISKNYSVDTEKKKVVLQQISPYRTDFYYSPTEGYKFVTVRYSNVYYSSAQGLYVIDKDWYDSQKKVKKIDDSFEFCFSLHRNEIIRIKKEDEDMMWRFTATNNDETNRIEVKPIGYKINKQLQPSIGKKILLLEKYATDVCGNLYKVTNQELKLEFK

SEQ ID NO: 18878 - protein, 1073 aa, unidentified
  REGION 1..1073: note = Cas Enzyme sequence
MDKRNNGLVLGLDIGVTSVGYGIVNRETGEAVDFGVRLFSEWDPANNQSRREKRSGRRLRSRRKNRLQDMKKFLVDQGMIPSDYVFHLDPYALRVKGLSEKITDEELATVLYNLAKLRGSSLETVEDTDDTKSDDSLSTKNNLRINDALIKSGKYVCQIQQERLSEKGKLRGHINNFRTKDYVAELKQILSNQGKSKDFNDYVENLIVRRRDFSDGPGSQKSPTPYGRWLTKDQEEPIDLIEKMRGKCSYYPDQLRCAKMAYKADLFNLLNDLNNLSVKGEKLERDQKEQVIEYVNEKGSIKPKQLAKLLGLSDIDDISGFRIDKSDKPILTEFKGYTKVKKVLENSGLYHDHELVDQIIDVLTRDKVVERRANEIRKLSNKFSEEEIEALANLTQISGYHSMSAKAINEFNKEMLISPLNQMQIITNRGNQNDRFNKLKGMKEIHADDTVILSPVAKRAQREAMKVVNRLRELYGEFDSIVVETTRAKNSQEQKTKIKESQAFFEKEKKRAQQIVDENKYNLTVNAKLIQKLRLYTEQNCKTAYALIPIDLDLLISDPTAFEVDHIIPISISYDDSFSNKVLVTRWENQIKGNLTPLQAHKNHKFGEYSDLASYIANVNDLRKMNGMRYEKKKNLLLSDEDLTKFDTQKKFIARNIVDTAYAERVVLNTLQDYFRANEISTVVNTVKGNLTHMFRNKIHLDKERSDIDTGDAHHAIDALIIASLKVFRRFGEILDKRPETIIDEETGEVLEIIEDKKFFDPRYIEIVHKLSLIEKDVTKFSYKIDTKPNRQVADETIYSTRNINGEDLVVKKYKNIYEEKFVTLANDILENNVEKYLMYRNSPETFKYISDIILHYAKEYRDDEKLMKNGLFVKNPLNRYYEDHHEYLHKPSKHNNGPAIISMKYTDGRLGNKIDISKNYSVDTEKKKVVLQQISPYRTDFYYSPTEGYRFVTVRYSNVYYSSIQGLYVIDKDWYESQKQVKKIDSSFEFCFSMHRNEIIRIKTENEDTLWRYVATNDDKASAIEVKPIGYKVSKRLRPTIGKKILLLEKYATDVCGNLYKVTNQELKLEFK

SEQ ID NO: 18879 - protein, 1100 aa, unidentified
  REGION 1..1100: note = Cas Enzyme sequence
MKQIPYVLGLDIGITSVGWAVIQNDIHGEPIKIERLGVRIFDGAEQPKTGASLALPRRQARGARRIVRRRRHRKERIKKLICDSGILSSEEIELLFECGKFDEDVYSLRVSALDRLLTKEELVRLLIHFAQRRGYKSNSRSEEAKEEKETGKVKQAISANKQRMLEHGYRTVGEMLWKDELFHRVNPDGSVILAVHNTQEEYKTTVERSMLEEELRLIFSKQREFGSVWTTEAFEEQYIAIWGSQRNFDEGPGGNSKYGGAQIEKMLGKCTFEEEELRAPKASYTAEYFRLMQTVNNMKIVGHGMPAEFLSEEQRKIFVQAAMASPSLTYTQLRKKLGIAEDYFFNGLFYGDKTAVQVEKKELKLMPFYHELRKALNKVEKNAIAQLSQEQMDEIARIITLYKSDDNRVTKLKERGIPEKFYPALLELSASKASHLSLKAMRKLLPYLEQGETYDKACKAVYGNHDGRCGDTQRKQRLSVMDAGEINNPVVLRAVSQSVKVINAIVREYGAPEIVRVELAREMGKNLDMRNQMKNRQTKNAERNEALRKQIEEIKHDTPTGQDIVKLKLFQEQNGVCLYSGKNLDVSRLFEAGYVDVDHIIPYSISFDDSYNNKVLVLASENRQKGNRIPYEYMGQDVQKWHQFETLVGTQIRSYKKRKNLLARSIPNQDDFKRRNLVDTQYISRVVYNLINDHLEFAETGNYKKKTQTVNGAITAQIRKRLGIDKIRENGDLHHAADAAVIACVSPGMVQKITNYSKRCECAFTRAGYVDYETGEVMTKEAYDEKYAPKFPAPWTMFRKELEARLSDNPRAEIDLLKLATYENDEEIKPVFVSRMPNHKVTGAAHLETIRSGKKQGGTVTKTALSKLKLDKKTGEIVGYYNRESDELLYQALKAQLEKFGGDGEKAFTQPFYKPKHDGTPGPLVKKVKIFEKATLTVPTNQKKGVAANGSMIRVDVFHVEKDGYYFVPVYVSDTVAKELPNRAVVANKPYEQWKPMKESDFLFSLCAGDLIRICNNKPIKLKQAEGGTGNPELLKKEGLYYYNGLNISSGALHIQLHDRSYSQSSLGGKRLGLIEKYEVDILGNYRPVKLPEQRQRFKR

SEQ ID NO: 18880 - protein, 1084 aa, unidentified
  REGION 1..1084: note = Cas Enzyme sequence
MKYAIGLDIGIASVGYAVLALDHEENPWGIIRLGSRIFDVAENPKDGASLALPRREARSVRRRLRRHHHRLERIKNLLINNELITKDELLHLYDGNLSDVYELRVKALDYSVTNAELTRILLHLAQRRGFKSNRKSDANDKEAGQLLEAVSANTKRMQENHYRTVGEMFYKDDLFSKYKRNKGGTYLTTVHRDMIAAEAKAILEKQFDLGNDICTQDFIDKYLSILLSQRQFDEGPGEPSPYAGNQIANMIGKCTFEPNEYRAAKASYSFERFNLLQKVNHLRLLLEGKSIALDNEQRKKIIALAHDKADLRYSHIRKALGLDEKVLFNTITYNDDVSVIEKKTKFNFLQAYHQIKKVLAEDIQKLTTEQLDNISQILSTYKSDNKRTEELSALGLEKKIIDALLGINGLSKFAHLSLKALRKINPYLEEGKIYNEACAAAGYDFKAHANTQKTELLPAYKEEMDDITSPVARRAIAQSIKVINAIIREQKCSPVYINIELAREMAKGFDERTQIDKANKENQAKNERIMERIRTEFHKANPTGMDLIKLKLWEEQDGRSPYSQKAISINRLFEPGYVDIDHIVPYSISFDDSFKNKVLVFSEENRDKGNRLPIAYLQNKFGAKKAENFIIWVQSNIKDYKKRQKLLKREITEEDINKFKERNLQDTKTISRFLYNYINDYLLFAPSDTGKKKRVTSVNGTITAYLRKRWGINKIRANGDKHHAVDAVVIACTTDKMIKDLSSFSQYHELEYTRTDTESLLVNSLTGEILKRFPYPWEDFRPELMARLSDNPADALRKLNLIFYHGTDLSTIKPIFVSRMPRHKVTGAAHKATIKSARCLNNGIVICKTSLQNLKLDKEGEIANYYAPESDTILYNALKERLRAYDNKPAKAFAEPFYKPKADGTPGPLVKKVKVYEKSTLNVPVQQNTAVADNDSMVRVDVFHVKGDGYYLVPIYIADTLKKELPNKAIVAYKPYADWPVMDDSNFIFSLYPNDLIKFEHKNGVKFAKVNKDSSLSETFSTKSELVYYKGTNITVGSTAIITNDNSYTVKSLGVKTLSNLEKYQVDVLGNYTKVKKEVRKPFR

SEQ ID NO: 18881 - protein, 1084 aa, unidentified
  REGION 1..1084: note = Cas Enzyme sequence
MKYAIGLDIGIASVGYAVLALDHEENPWGIIRLGSRIFDVAENPKDGASLALPRREARSVRRRLRRHHHRLERIKNLLINNELITKDELLHLYDGNLSDVYELRVKALDYSVTNAELTRILLHLAQRRGFKSNRKSDANDKEAGQLLEAVSANTKRMQENHYRTVGEMFYKDDLFSKYKRNKGGTYLTTVHRDMIAAEAKAILEKQFDLGNDICTQDFIDKYLSILLSQRQFDEGPGEPSPYAGNQIANMIGKCTFEPNEYRAAKASYSFERFNLLQKVNHLRLLLEGKSIALDNEQRKKIIALAHDKADLRYSHIRKALGLDEKVLFNTITYNDDVSVIEKKTKFNFLQAYHQIKKVLAEDIQKLTTEQLDNIGQILSTYKSDNKRTEELSALGLEKKIIDALLGINGLSKFAHLSLKALRKINPYLEEGKIYNEACAAAGYDFKAHANTQKTELLPAYKEEMDDITSPVARRAIAQSIKVINAIIREQKCSPVYINIELAREMAKGFDERTQIDKANKEKQAKNERIMERIRTEFHKANPTGMDLIKLKLWEEQDGRSPYSQKAISINRLFEPGYVDIDHIVPYSISFDDSFKNKVLVFSEENRDKGNRLPIAYLQNKFGAKKAENFIIWVQSNIKDYKKRQKLLKREITEEDINKFKERNLQDTKTISRFLYNYINDYLLFAPSDTGKKKRVTSVNGTITAYLRKRWGINKIRANGDKHHAVDAVVIACTTDKMIKDLSSFSQYHELEYTRTDTESLLVNSLTGEILKRFPYPWEDFRPELMARLSDNPADALRKLNLIFYHGTDLSTIKPIFVSRMPRHKVTGAAHKATIKSARCLNNGIVICKTSLQNLKLDKEGEIANYYAPESDTILYNALKERLRAYDNKPAKAFAEPFYKPKADGTPGPLVKKVKVYEKSTLNVPVQQNTAVADNDSMVRVDVFHVKGDGYYLVPIYIADTLKKELPNKAIVAYKPYADWPVMDDSNFIFSLYPNDLIKFEHKNGVKFAKVNKDSSLSETFSTKSELVYYKGTNITVGSTAIITNDNSYTVKSLGVKTLSNLEKYQVDVLGNYTKVKKEVRKPFR

SEQ ID NO: 18882 - protein, 1084 aa, unidentified
  REGION 1..1084: note = Cas Enzyme sequence
MKYAIGLDIGIASVGYAVLALDHEENPWGIIRLGSRIFDVAENPKDGASLALPRREARSVRRRLRRHHHRLERIKNLLINTELITKDELLHLYDGNLSDVYELRVKALDYSVTNAELTRILLHLAQRRGFKSNRKSDANDKEAGQLLEAVSANTKRMQENHYRTVGEMFYKDDLFSKYKRNKGGTYLTTVHRDMIAAEARTILEKQFALGNDICTQDFIDKYLSILLSQRQFDEGPGEPSPYAGNQIANMIGKCTFEPNEYRAAKASYSFERFNLLQKVNHLRLLLEGKSIALDNEQRKKIIALAHDKADLRYSHIRKALGLDEKVLFNTITYNDDVSVIEKKTKFNFLQAYHQIKKVLAEDMQKLTTEQLDNIGQILSTYKSDNKRTEELSALGLEKKIIDALLGINGLSKFAHLSLKALRKINPYLEEGKNYNEACAAAGYDFKAHANTQKTELLPAYKEEMDDITSPVARRAIAQSIKVINAIIREQKCSPLYINIELAREMAKGFDERTQIDKANKENQAKNERIMERIRTEFHKANPTGMDLIKLKLWEEQDGRSPYSQKAISINRLFEPGYVDIDHIVPYSISFDDSFKNKVLVFSDENRDKGNRLPITYLQSKFGAKAAENFIIWVQSNIKDYKKRQKLLKREITEEDINKFKERNLQDTKTISRFLYNYINDYLLFAPSDTGKKKRVTAVNGTITAYLRKRWGINKIRANGDKHHAVDAVVIACTTDKMIKDLSSFSKYHELEYTHTDTESLLVNSLTGEILKRFPYPWEDFRPELMARLSDNPADALRKLNLIFYHGTDLSTIKPIFVSRMPRHKVTGAAHKATIKSARCLNNGIVICKTSLQNLKLDKEGEIANYYAPESDTILYNALKERLRAYDNKPAKAFAEPFYKPKADGTPGPLVKKVKVYEKSTLNVAVQQNTAVADNDSMVRVDVFHVKGDGYYLVPIYIADTLKKELPNKAIVAYKPYADWPVMDDSNFIFSLYPNDLIKFEHKNSVKFAKVNKESSLAETFSSKSEFVYYKTSNITTGAIGIITNDNTYVVKGLGVKRLSNLEKYQVDVLGNYTKVKKEIRRSFR

SEQ ID NO: 18883 - protein, 1084 aa, unidentified
  REGION 1..1084: note = Cas Enzyme sequence
MKYAIGLDIGIASVGYAVLALDHEENPWGIIRLGSRIFDVAENPKDGASLALPRREARSVRRRLRRHHHRLERIKNLLINTELITKDELLHLYDGNLSDVYELRVKALDYSVTNAELTRILLHLAQRRGFKSNRKSDANDKEAGQLLEAVSANTKRMQENHYRTVGEMFYKDDLFSKYKRNKGGTYLTTVHRDMIADEAKAILEKQFDLGNDICTQDFIDKYLSILLSQRQFDEGPGEPSPYAGNQIANMIGKCTFEPNEYRAAKASYSFERFNLLQKVNHLRLLLEGKSIALDNEQRKKIIALAHDKADLRYSHIRKALGLDEKVLFNTITYNDDVSVIEKKTKFNFLPAYHQIKKVLAEDIQKLTTEQLDNIGQILSTYKSDNKRTEELSALGLEKKIIDALLGINGLSKFAHLSLKALRKINPYLEEGKIYNEACAAAGYDFKAHANTQKTELLPAYKEEMDDITSPVARRAIAQSIKVINAIIREQKCSPVYINIELAREMAKGFDERTQIDKANKENQAKNERIMERIRTEFHKSNPTGMDLIKLKLWEEQDGRSPYSQKAISINRLFEPGYVDIDHIVPYSTSFDDSFKNKVLVFSDENRDKGNRLPIAYLQSKFGAKAAENFMIWVQSNIKDYKKRQKLLKREITEEDINKFKERNLQDTKTISRFLYNYINDYLLFAPSDTGKKKRVTAVNGTITAYLRKRWGINKIRANGDKHHAVDAVVIACTTDKMIKDLSSFSQYHELEYTHTDKESLIVNSLTGEILKRFPYPWEDFRPELMARLSDNPADALRKLNLIFYHGTDLSTIKPIFVSRMPRHKVTGAAHKATIKSARCLNNGIVICKTSLQNLKLDKEGEITNYYAPESDTILYNALKERLRAYDNKPAKAFAEPFYKPKADGTPGPLVKKVKVYEKSTLNVAVQQNTAVADNDSMVRVDVFHIKGKGYYLVPIYIADTLKKELPNKAIVASKPYADWSVMDDSNFIFSLYPNDLIKFEHRSFKVFNKVNKDSNLSDTFESKIQYAYFKSADISSASIRIITHDNTYFIKSLGVKTLSKLEKYQVDVLGNYNKVKKEVRKPFR

SEQ ID NO: 18884 - protein, 1084 aa, unidentified
  REGION 1..1084: note = Cas Enzyme sequence
MKYAIGLDIGIASVGYAVLALDHEENPWGIIRLGSRIFDVAENPKDGASLALPRREARSVRRRLRRHHHRLERIKNLLINTELITKDELLHLYDGNLSDVYELRVKALDYSVTNAELTRILLHLAQRRGFKSNRKSDANDKEAGQLLEAVSANTKRMQENHYRTVGEMFYKDDLFSKYKRNKGGTYLTTVHRDMIAAEARTILEKQFALGNDICTQDFIDKYLSILLSQRQFDEGPGEPSPYAGNQIANMIGKCTFEQNEYRAAKASYSFERFNLLQKVNHLRLLLEGKSIALDNEQRKKIIALAHDKADLRYSHIRKALGLDKKVLFNTITYNDDVSVIEKKTKFNFLQAYHQIKKVLAEDMQKLTTEQLDNIGQILSTYKSDNKRTEELSALGLEKKIIDALLGINGLSKFAHLSLKALRKINPYLEEGKNYNEACAAAGYDFRAHANTQKTELLPAYKEEMDDITSPVARRAIAQSIKVINAIIREQKCSPVYINIELAREMAKGFDERTQIDKANKENQAKNERIMERIRTEFHKANPTGMDFIKLKLWEEQDGRSPYSQKAISINRLFEPGYVDIDHIVPYSISFDDSFKNKVLVFSDENRDKGNRLPIAYLQSKFGAKAAENFIIWVQSNIKDYKKRQKLLKREITEEDINKFKERNLQDTKTISRFLYNYINDYLLFAPSDTGKKKRVTAVNGTITAYLRKRWGINKIRANGDKHHAVDAVVIACTTDKMIKDLSSFSKYHELEYMHTDTESLLVNSLTGEILKRFPYPWEDFRPELMARLSDNPADALRKLNLIFYHGTDLSTIKPIFVSRMPRHKVTGAAHKATIKSARCLNNGIVICKTSLQNLKLDKEGEIANYYAPESDTILYNALKERLRAYDNKPAKAFAEPFYKPKADGTPGHLVKKVKVYEKSTLNVAVQQNTAVADNDSMVRVDVFHIKGEGYYLVPIYIADTLKKELPNKAIVAYKPYADWPVMDDSNFIFSLYPNDLIKFEHRNGVKFAKVNKKSSLAETYLTKSELVYYKGTNITVGSTSIITNDNSYTVKSLGVKTLSNLEKYQVDVLGNYTKVKKEIRRPFR

SEQ ID NO: 18885 - protein, 1084 aa, unidentified
  REGION 1..1084: note = Cas Enzyme sequence
MKYAIGLDIGIASVGYAVLALDHEENPWGIIRLGSRIFDVAENPKDGASLALPRREARSVRRRLRRHHHRLERIKNLLINTELITKDELLHLYDGNLSDVYELRVKALDYSVTNAELTRILLHLAQRRGFKSNRKSDANDKEAGQLLEAVSANTKRMQKNHYRTVGEMFYKDDLFSKYKRNKGGTYLTTVHRDMIADEAKAILEKQFDLGNDICTQDFIDKYLSILLSQRQFDEGPGEPSPYAGNQIANMIGKCTFEPNEYRAAKASYSFERFNLLQKVNHLRLLLEGKSIALDNEQRKKIIALAHDKADLRYSHIRKALGLDEKVLFNTITYNDDVSVIEKKTKFNFLPAYHQIKKVLAEDIQKLTTEQLDNIGQILSTYKSDNKRTEELSALGLEKKIIDALLGINGLSKFAHLSLKALRKINPYLEEGKIYNEACAAAGYDFKAHANTQKTELLPAYKEEMDDITSPVARRAIAQSIKVINAIIREQKCSPVYINIELAREMAKGFDERTQIDKANKENQAKNERIMERIRTEFHKSNPTGMDLIKLKLWEEQDGRSPYSQKAISINRLFEPGYVDIDHIVPYSTSFDDSFKNKVLVFSDENRDKGNRLPIAYLQSKFGAKAAENFMIWVQSNIKDYKKRQKLLKREITEEDINKFKERNLQDTKTISRFLYNYINDYLLFAPSDTGKKKRVTAVNGTITAYLRKRWGINKIRANGDKHHAVDAVVIACTTDKMIKDLSSFSQYHELEYTHTDKESLIVNSLTGEILKRFPYPWEDFRPELMARLSDNPADALRKLNLIFYHGTDLSTIKPIFVSRMPRHKVTGAAHKATIKSARCLNNGIVICKTSLQNLKLDKEGEITNYYAPESDTILYNALKERLRAYDNKPAKAFAEPFYKPKADGTPGPLVKKVKVYEKSTLNVAVQQNTAVADNDSMVRVDVFHIKGKGYYLVPIYIADTLKKELPNKAIVASKPYADWSVMDDSNFIFSLYPNDLIKFEHRSFKVFNKVNKDSNLSDTFESKIQYAYFKSADISSASIRIITHDNTYFIKSLGVKTLSKLEKYQVDVLGNYNKVKKEVRKPFR

SEQ ID NO: 18886 - protein, 1084 aa, unidentified
  REGION 1..1084: note = Cas Enzyme sequence
MKYAIGLDIGIASVGYAVLALDHEENPWGIIRLGSRIFDVAENPKDGASLALPRREARSVRRRLRRHHHRLERIKNLLINTELITKDELLHLYDGNLSDVYELRVKALDYSVTNAELTRILLHLAQRRGFKSNRKSDANDKEAGQLLEAVSANTKRMQENHYRTVGEMFYKDDLFSKYKRNKGGTYLTTVHRDMIAAEAKAILEKQFDLGNDICTQDFIDKYLSILLSQRQFDEGPGEPSPYAGNQIANMIGKCTFEPNEYRAAKASYSFERFNLLQKVNHLRLLLEGKSIALDNEQRKKIIALAHDKADLRYSHIRKALGLDEKVLFNTITYNDDVSVIEKKTKFNFLQAYHQIKKVLAEDMQKLTTEQLDNIGQILSTYKSDNKRTEELSALGLEKKIIDALLGINGLSKFAHLSLKALRKINPYLEEGKIYNEACAAAGYDFKAHANTQKTELLPAYKEEMDDITSPVARRAIAQSIKVINAIIREQKCSPVYINIELAREMAKGFDERTQIDKANKENQAKNERIMERIRTEFHKSNPTGMDLIKLKLWEEQDGRSPYSQKAISINRLFEPGYVDIDHIVPYSISFDDSFKNKVLVFSDENRDKGNRLPIAYLQSKFGAKEAENFIIWVQSNIKNYKKRQKLLKREITEEDINKFKERNLQDTKTISRFLYNYINDYLLFAPSDTGKKKRVTAVNGTITAYLRKRWGINKIRANGDKHHAVDAVVIACTTDKMIKDLSSFSKYHELEYTHTDTESLLVNSLTGEILKRFPYPWEDFRPELMARLSDNPADALRKLNLIFYHGIDLSTIKPIFVSRMPRHKVTGAAHKATIKSARCLNNGIVICKTSLQNLKLDKEGEIANYYAPESDTILYNALKERLRAYDNKPAKAFAEPFYKPKADGTPGPLVKKVKVYEKSTLNVAVQQNTAVADNDSMVRVDVFHVKGDGYYLVPIYIADTLKKELPNKAIVAYKPYADWPVMDDSNFIFSLYPNDLIKFEHKNSVKFAKVNKESSLAETFSSKSEFVYYKTSNITTGAIGIITNDNTYVVKGLGVKRLSNLEKYQVDVLGNYTKVKKEIRRSFR

SEQ ID NO: 18887 - protein, 1084 aa, unidentified
  REGION 1..1084: note = Cas Enzyme sequence
MKYAIGLDIGIASVGYAVLALDHEENPWGIIRLGSRIFDVAENPKDGASLALPRREARSVRRRLRRHHHRLERIKNLLINTELITKDELLHLYDGNLSDVYELRVKALDYSVTNAELTRILLHLAQRRGFKSNRKSDANDKEAGQLLEAVSANTKRMQENHYRTVGEMFYKDDLFSKYKRNKGGTYLTTVHRDMIAAEARTILEKQFALGNDICTQDFIDKYLSILLSQRQFDEGPGEPSPYAGNQIANMIGKCTFDPNEYRAAKASYSFERFNLLQKVNHLRLLLEGKSIALDNEQRKKIIALAHDKADLRYSHIRKALGLDEKVLFNTITYNDEVSVIEKKTKFNFLQAYHQIKKVLAEDMQKLTTEQLDNIGQILSTYKSDNKRTEELSALGLEKKIIDALLGINGLSKFAHLSLKALRKINPYLEEGKIYNEACAAAGYDFKAHANTQKTELLPAYKEEMDDITSPVARRAIAQSIKVINAIIREQKCSPVYINIELAREMAKGFDERTQIDKANKENQAKNERIMERIRTEFHKSNPTGMDLIKLKLWEEQDGRSPYSQKAISINRLFEPGYVDIDHIVPYSISFDDSFKNKVLVFSDENRDKGNRLPIAYLQSKFGAKTAENFMIWVQSNIKDYKKRQKLLKREITEEDINKFKERNLQDTKTISRFLYNYINDYLLFAPSDTGKKKRVTAVNGTITAYLRKRWGINKIRANGDKHHAVDAVVIACTTDKMIKDLSSFSQYHELEYTHTDKESLIVNSLTGEILKRFPYPWEDFRPELMARLSDNPADALRKLNLIFYHGTDLSTIKPIFVSRMPRHKVTGAAHKATIKSARCLNNGIVICKTSLQNLKLDKEGEIANYYAPESDTILYNALKERLRAYDNKPAKAFAEPFYKPKADGTPGPLVKKVKVYEKSTLNVAVQQNTAVADNDSMVRVDVFHVKGDGYYLVPIYIADTLKKELPNKAIVAYKPYADWPVMDDSDFIFSLYPNDLIKFEHKNGVKFAKVNKESTLNDFYSTKSDIVYFKGCNINTGAITIINHENTYVVSSLGVKRLPSLEKYQADVLGNYTKVKKEVRKPFR

SEQ ID NO: 18888 - protein, 1104 aa, unidentified
  REGION 1..1104: note = Cas Enzyme sequence
MNNMNYSLGLDIGISSVGWAVLQNDINGEPNKIINLGSRIFDKAEQPKTGASLALPRREARSSRRRLRRHRHRLERIKHLFERAGIMSAEDIQSMYTNPSFEKSVYELRAEGLNELLNKEEWVRVLIHLAQRRGYKSNSTAEAAKDKETGKVKQAIADNAKRMLEKGYRTIGEMIWKDEQFRQKLPDGTSLLRTRNEPGNYLMTVERSALVSEIRMLFDFQRKFGSSWANAELENEYLNIYESQRSFDEGPGGNSPYKGSQIEKMIGTFKGEPRAAKATFTFEYFKLLCDINKIRLLGNGLPGEPLNPAQREALITLSFKSDKLTYAKIRKELGISEDFYFNTLYYGDKSITEQEKKGWSQLQSYHKIRLALEKAGKDSIKALTPSQLDDIGNILTLYKSDGMRREKLTEAEIPEILHNSLLELSFSKVGRLSLTVMKDMIPYLENGENFDKAYAAVCGEEVKNSGKAKKTRLSLNDMEPITNPVVRRAISQTIKVVNAVVREYGPPEVVRVELAREMGKNFDERKNIEKRQEENRARNERAGMQIEEIKGSRVTGQDIVKFKLWQEQGEICLYSGKHIDIASLYEAGYVDVDHIIPYSQSFDDSYANKVLVFAEENRQKGNRLPYEYFGADEKRWAEFETRVNLLIRDYNKRRKLLKKKVTEEELNAFMKRNLTDTQYITRQVYNLLNDNLACAESVNYKKHIQTVNGVITAYIRKRLGIDKIREDGDLHHAKDAAVIATISPGMIRKITEFSKMAERFYATSKGYYDIETRKYLTKEEFEKKYSPDFPPPWEGFRNELEMRLSDKPSDYLNAYKYPNYDSSEEVRPVFVSRMPNHKVTGAAHMETVRSAGKNGYTVTKTPLSALKMIDGEIDGLYNTYNHKNDIILYNALKERLLAYGGDAQKAFAEPFYKPKADGTPGPLVKKVKITEKSTINVPINHGLAANGAMVRIDIFYVDNEGYYLVPIYVSDTVKANLPNKAIVAHKPYEEWKEMCEKDFKFSLYSGDMINVVSNKGIELALNKGAKGEKRIYRKECLLYYAGTNISSAAMHVTTHDRRYEQISLGSKRLNKIEKYQVDVLGNFHPVTLPEKRLGFGKRRYNGVS

SEQ ID NO: 18889 - protein, 1091 aa, unidentified
  REGION 1..1091: note = Cas Enzyme sequence
MRYVLGLDIGITSVGWALLNLDRRRIEALGTRAFNAAEDPQTKAPLAEPRRLARSARRRLRRRAGRLRRAKELFLKYNLLTEDRLDKAFLTARNKVSPWQLRAEGLDRLLTGEEFARALFHIAKRRGFKSNRKVDRKSKEEGKMLEGIQQNRSILEEKGYRTVGEMFFKDEKFAQRKRNSYGVYLNTVERAMLEDEIRKLFQAQRDLGSKFASPEFEREFLDVFKWQLPFASGDAILEKVGLCTFLGHEGKKRAPKACWTAERFNLLCKINSLTWFEDGEQKRPDDKQRELILEMAYNQKKVTFKQIRNKLGLPESARFTGVTYASRKAGNIEEKLESEGKKDFCQLNGYHTLREELQRKGLWDRVKDNTDLLDELAYACTFYKTPEDVKQYLNERNIDSDIADVVAEMPGFSKVMHLSVEAMKRIIPHLEKGLVYSEACQEAGFNHSNPYPDAKHGLKLPPIDKDEIVNPVVLRALSQARKVVNAITRQWGPPVRVHIELGREIGKSAEERNRINNRIEENRKAREEEKEHFKEIFNGLEPNGEMLLKFRLYREQNGQCAYSQKEINLHRLLEPGYVEIDHILPYSRSYDDSLSNKVLVLCSENREKTDHTPFEWFGQDDKRWANFESWVNANIRDPRKRANLLRRKFDERDSNEWMNRNLNDTQYAARYFGSFIRRHLQFAEPDKEKSPVMCFSGHITALARGLWGLQKNRDEDDDLHHAQDAAVIAALTPGRIKTLTEYRKAQETGRVQEIVDFETGEVHEVVRGKRFKFPEPWKGFREEVEARLSDDPEGEIAKLNLPSYSEDPPQLRPVIVSRMPIRKLDGAIHAETIRSKRELDGKPVSVIRKRLVDLKPSDLDNLWDPKNNQKLYDAIRERMEQHGGDAKKAFAEELRKPTNSGKPGPVVRSVRLMEAQPSGIEVRGGIADNGRMVRTDVFRKKGKYYLVPVYVSHIKSGELPNKAIVAHKPESEWETIDSSFEFLFSLYPYDLVRMKVKGEEILGYYRGTHRRTGSIKLTLPNINDEEKGKSYGTRTAELMEKYFIDVLGNYYRVKREKRLGLAKHSRVESCSAEDRCRSAGDISGSRGDASS

SEQ ID NO: 18890 - protein, 1055 aa, unidentified
  REGION 1..1055: note = Cas Enzyme sequence
MNQVSNVPYRLGLDIGIASVGWSLIGANRIIDLGVRIFDRAETTDGESLNKVRRDSRLMRRRLRHRAIRLLRVSRLLKREGLITDTMLFSKQIPGTESPWRLRLEGLDRLLSPEEWARVIYHLCKHRGFWFQRKSEAENSEGGRVKQGLERTNSAMNEKSYRTAAEMMLGKFPDNQRNKRGSYEQALARELLAEELKTLFESQRKFGNPHASEAFEDKLLNQKTGWFWLQRPALSGAKMLGLIGKCTFEPAEFRAAKRSYSAERFVWLTRLLNIRISANGEIRPLSDAARNLALGLPYEKASLTWKQLKKHLVDKDLLDPYARFTGLNYRAAKDPEDAKLIELSGWHQIRKALDQAGLSSDWAALAIQPSLMDAIATILTIYKTDEEITAELKKIGLSDRVIEALLTLSFSDFIRLSTKALSRILPFMEQGQRYDEACVSAGYHHSVLQEQSESRYLPPLDDEAPRNPVVLRALNQARKVVNALIREYGSPASVHIEMARDLSHPLDERQKIQRNQEAYRDQNEKSKILFEEIANRRPSGRELEKWLLYHEQDGKCAYSLEPIYLERVINEPSYTEVDHILPYSRSFDDSRNNKVLVLTRENQRKGNQTPYEYLGGEHETEQWQRFRAYVTTNHKFRQAKRDRLLRKGFSKEEASSFKERNLNDTRYICRYFKNFVERNLALASDSKRCVVLSGQLTAFLRARWGLVKVREDNDRHHALDATVIAACDHQMVNKLAQYARRRELEMVKPGYVDRETGTELDAEALLQIERDFPKPWEHFHEDLVTRLSDNPGEGVRKLFVSRAPKRRSGGAAHKETIYAQPKRLKEQGGVTQKIALTSLTMANLDHLVDPGRNKQLYEAIRKRLEAFDGKADKAFAQPLYKLLKDGSPGPVVRAVKVEIDKLSGIPVRGGIAKNDTMLRVDIFSKSGKFYLVPVYVFHVSIYVQHKILPNRAIVAYKDEEEWTDIDNSFGFCFSLYPNDLAKIILKTDTWFGYYAGTDRATGAINIWVHDRDKNVGKDGLIRGIGVKTALSIEKFHVDVLGRIYKAKPETRHGLA

SEQ ID NO: 18891 - protein, 1084 aa, unidentified
  REGION 1..1084: note = Cas Enzyme sequence
MKNTLYGIGLDIGVASVGWAVVGLNGTGEPVGLHRLGVRIFDKAEQPKTGESLAAPRRMARGMRRRLRRKALRRADVYALLERSGLSTREALAQMFEAGGLEDIYALRTRALDEPVGKAEFSRILLHLAQRRGFKSNRRTASDGEDGRLLAAVNENRRRMAQGGWRTVGEMLYRHEAFALRKRNKADEYLSTVGRDMVAEEASLLFQRQRELGCAWATPELQAEYLSILLRQRSFDEGPGGNSPYGGNQVEKMVGRCTFEPDEPRAAKAAYSFEYFSLLQKLNHIRLAENGETRPLTQPQRQQLLSLAHKTPDVSLARIRKELALPETVQFNGVRCRANETLEESEKKEKFACLPAYHKMRKALDGVVKGRISSLSISQRDAAATALSLYKNEDTLRAKLTEAGFQAPEIDALAGLTGFSKFGHLSLKACRKLIPHLEQGLTYDQACSAAGYDFKGHGAGERAFTLPAAAPEMEQITSPVVRRAVAQTIKVVNGIIREMDASPAWVRIELARELSKTFGERQEMDRSMRENAAQNERLMQELRDTFHLLSPTGQDLVKYRLWKEQDGVCAYSLRRLDVERLFEPGYVDVDHIVPYSLSFDDRRSNKVLVLSSENRQKGNRLPLQYLQGKRREDFIVWTNSSVRDYRKRQNLLREKFSGDEAEGFRQRNLQDTQHMARFLYNYISDHLAFAQSEALGKKRVFAVSGAVTSHLRKRWGLSKVRADGDLHHALDAAVIACTTDGMIRRISGYYGHIEGEYLQDADGAGSQHARTKERFPAPWPRFRDELIVRLSEQPGEHLLDINPAFYCEYGTEHICPVFVSRMPRRKVTGPGHKETIKGAAAADEGLLTVRKALTELKLDKDGEIKDYYMPSSDTLLYEALKAQLRRFGGDGKKAFAEPFYKPKADGTPGPLVRKVKTIEKATLTVPVHGGAASNDTMVRVDVFLVPGDGYYWVPVYVADTLKPELPNRAVVAFKPYSEWKEMREEDFIFSLYPNDLVYVEHKSGLKFTLQNADSTLEKTWVPKASFAYFVGGDISTAAISLRTHDNAYGLRGLGIKTLKVLKKYQVDVLGNISPVHRETRQRFR

SEQ ID NO: 18892 - protein, 1026 aa, unidentified
  REGION 1..1026: note = Cas Enzyme sequence
MARGMRRRLRRKALRRADVYALLERSGLSTREALAQMFEAGGLEDIYALRTRALDEPVGKAEFSRILLHLAQRRGFKSNRRTASDGEDGRLLAAVNENRRRMAQGGWRTVGEMLYRHEAFALHKRNKADDYLSTVGRDMVAEEASLLFQRQRELGCAWATPELQAEYLSILLRQRSFDEGPGGDSPYGGNQVEKMVGRCTFEPDEPRAAKAAYSFEYFSLLQKINHIRLAENGETRPLTQPQRQQLLSLAHKTPDMSLARIRKELALPETVQFNGVRCRANETLEESEKKEKFACLPAYHKMRKALDGVVKGRISSLSISQRDAAATALSLYKNEDTLRAKLTEAGFQAPEIDALAGLTGFSKFGHLSLKACRKLIPHLEQGLTYDQACSAAGYDFKGHGAGERAFTLPAAAPEMEQITSPVVRRAVAQTIKVVNGIIREMDASPAWVRIELARELSKTFGERQEMDRSMRENAAKNERLMQELRDTFHLLSPTGQDLVKYRLWKEQDGVCAYSLQRLDVEQLFEPGYVDVDHIVPYSLSFDDRRSNKVLVLSSENRQKGNRLPLQYLQGKRREDFIVWTNSSVHDYRKRQNLLREKLSDDEAEGFRQRNLQDTQHMARFLYNYISDHLAFAQSEALGKKRVFAVSGAVTSHLRKRWGLSKVRADGDLHHALDAAVVACTTDGMIRRISGYYGHIEGEYFQDADGAGSQHARTKERFPAPWPRFRDELIVRLSEQPGEPLLDINPAFYCEYGTEHIRPVFVSRMPRRKVTGPSHKETVKGAAAADEGLLTVRKALTELKLDKDGEIKDYYMPSSDTLLYEALKAQLRRFGGDGKKAFAEPFYKPKADGTPGPLVRKVKTTEKATLTVPVHGGAASNDTMVRIDVFFMPGDGYYWVPLYVADTLKPELPNRAVVAHKPYSEWQEMREEDFVFSLYPNDLVYVEHKSELKFTVQNADSTLEKTRTQASAFVYFVSGGISGGTITVRTHDNSYGIPSLGLKTLKSLCKYQVDVLGNVFPVHKETRQKFR

SEQ ID NO: 18893 - protein, 1095 aa, unidentified
  REGION 1..1095: note = Cas Enzyme sequence
  REGION 1074..1077: note = misc_feature - Xaa can be any naturally occurring amino acid
MKNTLYGIGLDIGVASVGWAVVGLNGTGEPVGLHRLGVRIFDKAEQPKTGESLAAPRRMARGMRRRLRRKALRRADVYALLERSGLSTREALAQMFEAGGLEDIYALRTRALDEPVGKAEFSRILLHLAQRRGFKSNRRTASDGEDGRLLAAVNENRRRMAQGGWRTVGEMLYRHEAFALHKRNKADDYLSTVGRDMVAEEASLLFQRQRELGCAWATPELQAEYLSILLRQRSFDEGPGGNSPYGGNQVEKMVGRCTFEPDEPRAAKAAYSFEYFSLLQKLNHIRLAENGETRPLTQPQRQQLLSLAHKTPDISLARIRKELALPETVQFNGVRCRANETLEESEKKEKFACLPAYHKMRKALDGVVKGRISSLSISQRDAAATALSLYKNEDTLRAKLTEAGFQAPEIDALAGLTGFSKFGHLSLKACGKLIPHLEQGLTYDQACSAAGYDFKGHGAGERAFTLPAAAPEMEQITSPVVRRAVAQTIKVVNGIIREMDASPAWVRIELARELSKTFGERQEMDRSMRENAAQNERLMQELRDTFHLLSPTGQDLVKYRLWKEQDGVCAYSLRRLDVERLFEPGYVDVDHIVPYSLSFDDRRSNKVLVLSSENRQKGNRLPLQYLQGKRREDFIVWTNSSVRDYRKRQNLLREKLSGDEAEGFRQRNLQDTQHMARFLYNYISDHLAFAQSEALGKKRVFAVSGAVTSHLRKRWGLSKVRADGDLHHALDAAVIACTTDGMIRRISGYYGHIEGEYLQDADGAGSQHARTKERFPAPWPRFRDELIVRLSEQPAEPLLDINPEFYCEYGTEHIRPVFISRMPRRKVTGPGHKETIKGAAAADEGLLTVRKALTELKLDKDGEIKDYYMPSSDTLLYEALKAQLRRFGGDGKKAFAEPFYKPKADGTPGPLVRKVKTTEKATLTVPVHGGAASNDTMVRVDVFLVPGDGYYWVPVYTADTLKPELPNRAVAQGKPYSEWKEMREEDFIFSLYPNDLVYVEHKSGLKFTLQNADSTLEKTRTQTSAFVYFVGGSISTASITIRTHDNAYGIPSLGVKTLKTFHKYQVDVLGNVFXXXXAEIPLIHQKRRRLCPTDA

SEQ ID NO: 18894 - protein, 1084 aa, unidentified
  REGION 1..1084: note = Cas Enzyme sequence
MKNTLYGIGLDIGVASVGWAVVGLNDTGEPVGLHRLGVRIFDKAEQPKTGESLAAPRRMARGMRRRLRRKALRRADVYALLERSGLSTREALAHMFEAGGLEDIYALRTRALDEPVGKAEFSRILLHLAQRRGFKSNRRTASDGEDGRLLAAVNENRRRMAQGGWRTVGEMLYRHEAFALHKRNKADEYLSTVGRDMVAEEASLLFQRQRELGCAWATPELQAEYLSILLRQRSFDEGPGGNSPYGGNQVEKMVGRCTFEPDEPRAAKAAYSFEYFSLLQKINHIRLVENGETRPLTQQQRQQLLSLAHKTPDVSLARIRKELALPETVQFNGVRCRANETLEESEKKEKFACLPAYHKMRKALDGVVKGRISSLSISQRDAAATALSLYKNEDTLRAKLTEAGFQAPEIDALAGLTGFSKFGHLSLKACRKLIPHLEQGLTYDQACSAAGYDFKGHGAGERAFTLPAAAPEMEQITSPVVRRAVAQTIKVVNGIIREMDASPAWVRIELARELSKTFGERQEMDRSMRENAAQNERLMQELRDTFHLLSPTGQDLVKYRLWKEQDGVCAYSLRRLDVERLFEPGYVDVDHIVPYSLSFDDRRSNKVLVLSSENRQKGNRLPLQYLQGKRREDFIVWTNSSVRDYRKRQNLLREKLSGDEAEGFRQRNLQDTQHMARFLYNYISDHLAFAQSEALGKKRVFAVSGAVTSHLRKRWGLSKVRADGDLHHALDAAVIACTTDGMIRRISGYYGHIEGEYLQDADGAGSQHARTKERFPAPWPRFRDELIVRLSEQPGEHLLDINPGFYCEYGTEHIRPVFVSRMPRRKVTGPGHKETIKGAAAADEGLLTVRKALTELKLDKDGEIKDYYMPSSDTLLYEAIKAQLRRFGGDGKKAFAEPFYKPKADGTPGPLVRKVKTIEKATLTVPVHGGAASNDTMVRVDVFLVPGDGYYWVPVYTADTLKPELPNRAVVQGKPYSEWKEMREEDFIFSLYPNDLVYVEHKSGLKFTLQNADSTLEKTRTQTSAFAYFVSGSISTASITIRTHDNAYGIPSLGVKTLKTFHKYQVDVLGNVFPVHKETRQKFR

SEQ ID NO: 18895 - protein, 1084 aa, unidentified
  REGION 1..1084: note = Cas Enzyme sequence
MKNTLYGIGLDIGVASVGWAVVGLNGTGEPVGLHRLGVRIFDKAEQPKTGESLAAPRRMARGMRRRLRRKALRRADVYALLERSGLSTREALAQMFEAGGLEDIYALRTRALDEPVGKAEFSRILLHLAQRRGFKSNRRTASDGEDGRLLAAVNENRRRMAQGGWRTVGEMLYRHEAFALHKRNKADDYLSTVGRDMVAEEASILFERQRAMGCSWAAPELQAEYLSILLRQRSFDEGPGGNSPYGGNQVEKMVGRCTFEPDEPRAAKAAYSFEYFSLLQKLNHIRLAENGETRPLTQPQRQQLLSLAHKTPDISLARIRKELALPETVQFNGVRCRANETLEESEKKEKFACLPAYHKMRKALDGVVKGRISSLSISQRDAAATALSLYKNEDTLRAKLTEAGFQAPEIDALAGLTGFSKFGHLSLKACRKLIPHLEQGLTYDQACSAAGYDFKGHGAGERAFTLPAAAPEMEQITSPVVRRAVAQTIKVVNGIIREMDASPAWVRIELARELSKTFGERQEMDRSMRENAAKNERLMQELRDTFHLLSPTGQDLVKYRLWKEQDGVCAYSLRRLDVERLFEPGYVDVDHIVPYSLSFDDRRSNKVLVLSSENRQKGNRLPLQYLQGKRREDFIVWTNSSVRDYRKRQNLLREKLSGDEAEGFRQRNLQDTQHMARFLYNYISDHLAFAQSEALGKKRVFAVSGAVTSHLRKRWGLSKVRADGDLHHALDAAVIACTTDGMIRRISGYYGHIEGEYLQDADGAGSQHARTKERFPAPWPRFRDELIVRLSEQPGEHLLDINPGFYCEYGTEHIRPVFVSRMPRRKVTGPGHKETIKGAAAADEGLLTVRKALTELKLDKDGEIKDYYMPSSDTLLYEALKAQLRRFGGDSKKAFAEPFYKPKADGTPGPLVRKVKTIEKATLTVPVHGGAASNDTMVRVDVFLVPGDGYYWVPVYVADTLKPELPNRAVAQGKPYSEWKEMREEDFIFSLYPNDLVYAEHKSGLKFTLQNADSTLEKTRTQTSAFAYFVSGSISTASITIRTHDNAYGIPSLGVKTLKTFHKYQVDVLGNVFPVHKETRQKFR

SEQ ID NO: 18896 - protein, 1084 aa, unidentified
  REGION 1..1084: note = Cas Enzyme sequence
MKNTLYGIGLDIGVASVGWAVVGLNGTGEPVGLHRLGVRIFDKAEQPKTGESLAAPRRMARGMRRRLRRKALRRADVYALLERSGLSTREALAQMFEAGGLEDIYALRTRALDEPVGKAEFSRILLHLAQRRGFKSNRRTASDGEDGRLLAAVNENRRRMAQGGWRTVGEMLYRHEAFALHKRNKADDYLSTVGRDMVAEEASILFERQRAMDCSWAAPELQAEYLSILLRQRSFDEGPGGNSPYGGNQVEKMVGRCTFEPDEPRAAKAAYSFEYFSLLQKLNHIRLAENGETRPLTQPQRQQLLSLAHKTPDISLARIRKELALPETVQFNGVRCRANETLEESEKKEKFACLPAYHKMRKALDGVVKGRISSLSISQRDAAATALSLYKNEDTLRAKLTEAGFQAPEIDALAGLTGFSKFGHLSLKACRKLIPHLEQGLTYDQACSAAGYDFKGHGAGERAFTLPAAAPEMEQITSPVVRRAVAQTIKVVNGIIREMDASPAWVRIELARELSKTFGERQEMDRSMRENAAKNERLMQELRDTFHLLSPTGQDLVKYRLWKEQDGVCAYSLRRLDVERLFEPGYVDVDHIVPYSLSFDDRRSNKVLVLSSENRQKGNRLPLQYLQGKRREDFIVWTNSSVRDYRKRQNLLREKLSGDEAEGFRQRNLQDTQHMARFLYNYISDHLAFAQSEALGKKRVFAVSGAVTSHLRKRWGLSKVRADGDLHHALDAAVIACTTDGMIRRISGYYGHIEGEYLQDADGAGSQHARTKERFPAPWPRFRDELIVRLSEQPGEHLLDINPEFYCEYGTEHIRPVFVSRMPRRKVTGPGHKETIKGAAAADEGLLTVRKALTELKLDKDGEIKDYYMPSSDTLLYEALKAQLRRFGGDGKKAFAEPFYKPKADGTPGPLVRKVKTIEKATLTVPVHGGAASNDTMVRVDVFLVPGDGYYWVPVYVADTLKPELPNRAVVQGKPYSEWKEMREEDFIFSLYPNDLVYAEHKSGLKFTVQNAESTLEKTRTQTSAFVYFVGGSISTASITIRTHDNAYGIPSLGVKTLKTFHKYQVDVLGNVFPVHKETRQKFR

SEQ ID NO: 18897 - protein, 1084 aa, unidentified; identical to SEQ ID NO: 16152
  REGION 1..1084: note = Cas Enzyme sequence

SEQ ID NO: 18898 - protein, 1084 aa, unidentified
  REGION 1..1084: note = Cas Enzyme sequence
MKNTLYGIGLDIGVASVGWAVVGLNGTGEPVGLHRLGVRIFDKAEQPKTGESLAAPRRMARGMRRRLRRKALRRADVYALLERSGLSTREALAQMFEAGGLEDIYALRTRALDEPVGKAEFSRILLHLAQRRGFKSNRRTASDGEDGRLLAAVNENRRRMAQGGWRTVGEMLYRHEAFALHKRNKADDYLSTVGRDMVAEEASILFERQRAMGCSWAAPELQAEYLSILLRQRSFDEGPGGNSPYGGNQVEKMVGRCTFEPDEPRAAKAAYSFEYFSLLQKLNHIRLAENGETRPLTQPQRQQLLSLAHKTPDISLARIRKELALPETVQFNGVRCRANETLEESEKKEKFACLPAYHKMRKALDGVVKGRISSLSISQRDAAATALSLYKNEDTLRAKLTEAGFQAPEIDALAGLTGFSKFGHLSLKACRKLIPHLEQGLNYDQACTAAGYDFKGHGAGERAFTLPAAAPEMEQITSPVVRRAVAQTIKVVNGIIREMDASPAWVRIELARELSKTFGERQEMDRSMRENAAQNERLMQELRDTFHLLSPTGQDLVKYRLWKEQDGVCAYSLRRLDVERLFEPGYVDVDHIVPYSLSFDDRRSNKVLVLSSENRQKGNRLPLQYLQGKRREDFIVWTNSSVRDYRKRQNLLREKLSGDEAEGFRQRNLQDTQHMARFLYNYISDHLAFAQSEALGKKRVFAVSGAVTSHLRKRWGLSKVRADGDLHHALDAAVIACTTDGMIRRISGYYGHIEGEYLQDADGAGSQHARTKERFPAPWPRFRDELIVRLSEQPGEHLLDINPGFYCEYGTEHIRPVFVSRMPRRKVTGPGHKETIKGAAAADEGLLTVRKALTELKLDKDGEIKDYYMPSSDTLLYEAIKAQLRRFGGDGKKAFAEPFYKPKADGTPGPLVRKVKTTEKATLTVPVHGGAASNDTMVRVDVFLVPGDGYYWVPVYVADTLKPELPNRAVVQGKPYSEWKEMREEDFIFSLYPNDLVYVEHKSGLKFTLQNADSTLEKTRTQTSAFAYFVSGSISTASITIRTHDNAYGIPSLGVKTLKTFHKYQVDVLGNVFPVHKETRQKFR

SEQ ID NO: 18899 - protein, 1084 aa, unidentified
  REGION 1..1084: note = Cas Enzyme sequence
MKNTLYGIGLDIGVASVGWAVVGLNGTGEPVGLHRLGVRIFDKAEQPKTGESLAAPRRMARGMRRRLRRKALRRADVYVLLERSGLSTREALAQMFEAGGLEDIYALRTRALDEPVGKAEFSRILLHLAQRRGFKSNRRTASDGEDGRLLAAVNENRRRMAQGGWRTVGEMLYRHEAFALHKRNKADDYLSTVGRDMVAEEASILFERQRAMGCSWAAPELQAEYLSILLRQRSFDEGPGGNSPYGGNQVEKMVGRCTFEPDEPRAAKAAYSFEYFSLLQKLNHIRLAENGETRPLTQPQRQQLLSLAHKTPDISLARIRKELALPETVQFNGVRCRANETLEESEKKEKFACLPAYHKMRKALDGVVKGRISSLSISQRDAAATALSLYKNEDTLRAKLTEAGFQAPEIDALAGLTGFSKFGHLSLKACRKLIPHLEQGLTYDQACSAAGYDFKGHGAGERAFTLPAAAPEMEQITSPVVRRAVAQTIKVVNGIIREMDASPAWVRIELARELSKTFGERQELDRSMRENAAQNERLMQELRDTFHLLSPTGQDLVKYRLWKEQDGVCAYSLRRLDVERLFEPGYVDVDHIVPYSLSFDDRRSNKVLVLSSENRQKGNRLPLQYLQGKRREDFIVWTNSSVRDYRKRQNLLREKLSGDEAEGFRQRNLQDTQHMARFLYNYISDHLAFAQSEVLGKKRVFAVSGAVTSHLRKRWGLSKVRADGDLHHALDAAVIACTTDGMIRRISGYYGHIEGEYLQDADGAGSPHARTKERFPAPWPRFRDELIVRLSEQPGEHLLDINPEFYCEYGTEHIRPVFVSRMPRRKVTGPGHKETIKGAAAADEGLLTVRKALTELKLDKDGEIKDYYMPSSDTLLYEALKAQLRRFGGDGKKAFAEPFYKPKADGTPGPLVRKVKTIEKATLTVPVHGGAASNDTMVRVDVFLVPGDGYYWVPIYVADTLKPELPNRAVVAHKPYSEWQEMREEDFVFSLYPNDLVYVEHKSGLKFTVQNADSTLEKTRTQASAFVYFVSGGISGGTITVRTHDNSYGIPSLGLKTLKSLCKYQVDVLGNVFPVHKETRQKFR

SEQ ID NO: 18900 - protein, 1084 aa, unidentified
  REGION 1..1084: note = Cas Enzyme sequence
MKNTLYGIGLDIGVASVGWAVVGLNGTGEPVGLHRLGVRIFDKAEQPKTGESLAAPRRMARGMRRRLRRKALRRADVYALLERSGLSTREALAQMFEAGGLEDIYALRTRALDEPVGKAEFSRILLHLAQRRGFKSNRRTASDGEDGRLLAAVNENRRRMAQGGWRTVGEMLYRHEAFALHKRNKADDYLSTVGRDMVAEEASLLFQRQRELGCAWATPELQAEYLSILLRQRSFDEGPGGNSPYGGNQVEKMVGRCTFEPDEPRAAKAAYSFEYFSLLQKLNHIRLAENGETRPLTQPQRQQLLSLAHKTPDISLARIRKELALPETVQFNGVRCRANETLEESEKKEKFACLPAYHKMRKALDGVVKGRISSLSISQRDAAATALSLYKNEDTLRAKLTEAGFQAPEIDALAGLTGFSKFGHLSLKACRKLIPHLEQGLTYDQACSAAGYDFKGHGAGERAFTLPAAAPEMEQITSPVVRRAVAQTIKVVNGIIREMDASPAWVRIELARELSKTFGERQELDRSMRENAAQNERLMQELRDTFHLLSPTGQDLVKYRLWKEQDGVCAYSLRRLDVERLFEPGYVDVDHIVPYSLSFDDRRSNKVLVLSSENRQKGNRLPLQYLQGKRREDFIVWTNSSVRDYRKRQNLLREKLSGDEAEGFRQRNLQDTQHMARFLYNYISDHLAFAQSEALGKKRVFAVSGAVTSHLRKRWGLSKVRADGDLHHALDAAVIACTTDGMIRRISGYYGHIEGEYLQDADGAGSQHARTKERFPAPWPRFRDELIVRLSEQPAEPLLDINPEFYCEYGTEHIRPVFVSRMPRRKVTGPGHKETIKGAAAADEGLLTVRKALTELKLDKDGEIKDYYMPSSDTLLYEALKAQLRRFGGDGKKAFAEPFYKPKADGTPGPLVRKVKTTEKATLTVPVHGGAASNDTMVRVDVFLVPGDGYYWVPVYTADTLKPELPNRAVVQGKPYSEWKEMREEDFIFSLYPNDLVYAEHKSGLKFTVQNADSTLEKTRTQTSAFVYFVGGSISTASITIRTHDNAYGIPSLGVKTLKTFHKYQVDVLGNVFPVHKETRQKFR

SEQ ID NO: 18901 - protein, 1084 aa, unidentified
  REGION 1..1084: note = Cas Enzyme sequence
MKNTLYGIGLDIGVASVGWAVVGLNGTGEPVGLHRLGVRIFDKAEQPKTGESLAAPRRMARGMRRRLRRKALRRADVYALLERSGLSTREELAQMFEAGGLEDIYALRTRALDEPVGKAEFSRILLHLAQRRGFKSNRRTASDGEDGRLLAAVNENRRRMAQGGWRTVGEMLYRHEAFALHKRNKADDYLSTVGRDMVAEEASLLFQRQRELGCAWATPELQAEYLSILLRQRSFDEGPGGDSPYGGNQVEKMVGRCTFEPDEPRAAKAAYSFEYFSLLQKINHIRLAENGETRPLTQPQRQQLLSLAHKTPDISLARIRKELALPETVQFNGVRCRANETLEESEKKEKFACLPAYHKMRKALDGVVKGRISSLSISQRDAAATALSLYKNEDTLRAKLTEAGFQAPEIDALAGLTGFSKFGHLSLKACRKLIPHLEQGLTYDQACSAAGYDFKGHGAGERAFTLPAAAPEMEQITSPVVRRAVAQTIKVVNGIIREMDASPAWVRIELARELSKTFGERQEMDRSMRENAAKNERLMQELRDTFHLLSPTGQDLVKYRLWKEQDGVCAYSLRRLDVERLFEPGYVDVDHIVPYSLSFDDRRSNKVLVLSSENRQKGNRLPLQYLQGKRREDFIVWTNSSVRDYRKRQNLLREKFSGDEAEGFRQRNLQDTQHMARFLYNYISDHLAFAQSEALGKKRVFAVSGAVTSHLRKRWGLSKVRADGDLHHALDAAVIACTTDGMIRRISGYYGHIEGEYLQDADGAGSQHARTKERFPAPWPRFRDELIVRLSEQPAEPLLDINPEFYCEYGTEHIRPVFVSRMPRRKVTGPGHKETIKGAAAADEGLLTVRKALTELKLDKDGEIKDYYMPSSDTLLYEALKAQLRRFGGDGKKAFAEPFYKPKADGTPGPLVRKVKTIEKATLTVPVHGGAASNDTMVRVDVFLVPGDGYYWVPVYVADTLKPELPNRAVVAFKPYSEWKEMREEDFIFSLYPNDLVYAEHKSGLKFTVQNADSTLEKTWVPKASFAYFVGGDISTAAISLRTHDNAYGLRGLGIKTLKVLKKYQVDVLGNISPVHRETRQRFR

SEQ ID NO: 18902 - protein, 1084 aa, unidentified
  REGION 1..1084: note = Cas Enzyme sequence
MKNTLYGIGLDIGVASVGWAVVGLNGTGEPVGLHRLGVRIFDKAEQPKTGESLAAPRRMARGMRRRLRRKALRRADVYALLERSGLSTREALAQMFEAGGLEDIYALRTRALDEPVGKAEFSRILLHLAQRRGFKSNRRTASDGEDGRLLAAVNENRRRMAQGGWRTVGEMLYRHEAFALHKRNKADDYLSTVGRDMVAEEASILFERQRAMGCSWAAPELQAEYLSILLRQRSFDEGPGGNSPYGGNQVEKMVGRCTFEPDEPRAAKAAYSFEYFSLLQKLNHIRLAENGETRPLTQPQRQQLLSLAHKTPDISLARIRKELALPETVQFNGVRCRANETLEESEKKEKFACLPAYHKMRKALDGVVKGRISSLSISQRDAAATALSLYKNEDTLRAKLTEAGFQAPEIDALAGLTGFSKFGHLSLKACRKLIPHLEQGLTYDQACSAAGYDFKGHGAGERAFTLPAAAPEMEQITSPVVRRAVAQTIKVVNGIIREMDASPAWVRIELARELSKTFGERQEMDRSMRENAAQNERLMQELRDTFHLLSPTGQDLVKYRLWKEQDGVCAYSLRRLDVERLFEPGYVDVDHIVPYSLSFDDRRSNKVLVLSSENRQKGNRLPLQYLQGKRREDFIVWTNSSVRDYRKRQNLLREKLSGDEAEGFRQRNLQDTQHMARFLYNYISDHLAFAQSEALGKKRVFAVSGAVTSHLRKRWGLSKVRADGDLHHALDAAVIACTTDGMIRRISGYYGHIEGEYLQDADGAGSQHARTKERFPAPWPRFRDELIVRLSEQPAEPLLDINPGFYCEYGTEHIRPVFISRMPRRKVTGPGHKETIKGAAAADEGLLTVRKALTELKLDKDGEIKDYYMPSSDTLLYEALKAQLRRFGGDGKKAFAEPFYKPKADGTPGPLVRKVKTTEKATLTVPVHGGAASNDTMVRVDVFLVPGDGYYWVPVYVADTLKPELPNRAVAQGKPYSEWKEMREEDFIFSLYPNDLVYAEHKSGLKFTLQNADSTLEKTRTQTSAFAYFVSGSISTASITIRTHDNAYGIPSLGVKTLKTFHKYQVDVLGNVFPVHKETRQKFR

SEQ ID NO: 18903 - protein, 1091 aa, unidentified
  REGION 1..1091: note = Cas Enzyme sequence
MTERGTIMKNTLYGIGLDIGVASVGWAVVGLNGTGEPVGLHRLGVRIFDKAEQPKTGESLAAPRRMARGMRRRLRRKALRRADVYALLERSGLSTREALAQMFEAGGLEDIYALRTRALDEPVGKAEFSRILLHLAQRRGFKSNRRTASDGEDGRLLAAVNENRRRMAQGGWRTVGEMLYRHEAFALHKRNKADDYLSTVGRDMVAEEASLLFQRQRELGCAWATPELQAEYLSILLRQRSFDEGPGGDSPYGGNQVEKMVGRCTFEPDEPRAAKAAYSFEYFSLLQKINHIRLAENGETRPLTQPQRQQLLSLAHKTPDMSLARIRKELALPETVQFNGVRCRANETLEESEKKEKFACLPAYHKMRKALDGVVKGRISSLSISQRDAAATALSLYKNEDTLRAKLTEAGFQAPEIDALAGLTGFSKFGHLSLKACRKLIPHLEQGLTYDQACSAAGYDFKGHGAGERAFTLPAAAPEMEQITSPVVRRAVAQTIKVVNGIIREMDASPAWVRIELARELSKTFGERQEMDRSMRENAAKNERLMQELRDTFHLLSPTGQDLVKYRLWKEQDGVCAYSLQRLDVEQLFEPGYVDVDHIVPYSLSFDDRRSNKVLVLSSENRQKGNRLPLQYLQGKRREDFIVWTNSSVHDYRKRQNLLREKLSDDEAEGFRQRNLQDTQHMARFLYNYISDHLAFAQSEALGKKRVFAVSGAVTSHLRKRWGLSKVRADGDLHHALDAAVVACTTDGMIRRISGYYGHIEGEYFQDADGAGSQHARTKERFPAPWPRFRDELIVRLSEQPGEPLLDINPAFYCEYGTEHIRPVFVSRMPRRKVTGPSHKETVKGAAAADEGLLTVRKALTELKLDKDGEIKDYYMPSSDTLLYEALKAQLRRFGGDGKKAFAEPFYKPKADGTPGPLVRKVKTTEKATLTVPVHGGAASNDTMVRIDVFFMPGDGYYWVPLYVADTLKPELPNRAVVAHKPYSEWQEMREEDFVFSLYPNDLVYVEHKSELKFTVQNADSTLEKTRTQASAFVYFVSGGISGGTITVRTHDNSYGIPSLGLKTLKSLCKYQVDVLGNVFPVHKETRQKFR

SEQ ID NO: 18904 - protein, 1084 aa, unidentified
  REGION 1..1084: note = Cas Enzyme sequence
MKNTLYGIGLDIGVASVGWAVVGLNGTGEPVGLHRLGVRIFDKAEQPKTGESLAAPRRMARGMRRRLRRKALRRADVYALLERSGLSTREALAQMFEAGGLEDIYALRTRALDEPVGKAEFSRILLHLAQRRGFKSNRRTASDGEDGRLLAAVNENRRRMAQGGWRTVGEMLYRHEAFALHKRNKADDYLSTVGRDMVAEEASILFERQRAMGCSWAAPELQAEYLSILLRQRSFDEGPGGNSPYGGNQVEKMVGRCTFEPDEPRAAKAAYSFEYFSLLQKINHIRLAENGETRPLTQPQRQQLLSLAHKTPDISLARIRKELALPETVQFNGVRCRANETLEESEKKEKFACLPAYHKMRKALDGVVKGRISSLSISQRDAAATALSLYKNEDTLRAKLTEAGFQAPEIDALAGLTGFSKFGHLSLKACRKLIPHLEQGLTYDQACSAAGYDFKGHGAGERAFTLPAAAPEMEQITSPVVRRAVAQTIKVVNGIIREMDASPAWVRIELARELSKTFGERQELDRSMRENAAQNERLMQELRDTFHLLSPTGQDLVKYRLWKEQDGVCAYSLRRLDVERLFEPGYVDVDHIVPYSLSFDDRRSNKVLVLSSENRQKGNRLPLQYLQGKRREDFIVWTNSSVRDYRKRQNLLREKLSGDEAEGFRQRNLQDTQHMARFLYNYISDHLAFAQSEALGKKRVFAVSGAVTSHLRKRWGLSKVRADGDLHHALDAAVIACTTDGMIRRISGYYGHIEGEYLQDADGAGSQHARTKERFPAPWPRFRDELIVRLSEQPGEHLLDINPGFYCEYGTEHIRPVFVSRMPRRKVTGPGHKETIKGAAAADEGLLTVRKALTELKLDKDGEIKDYYMPSSDTLLYEAIKAQLRRFGGDGKKAFAKPFYKPKADGTPGPLVRKVKTIEKATLTVPVHGGAASNDTMVRVDVFLVPGDGYYWVPVYTADTLKPELPNRAVVQGKPYSEWKEMREEDFIFSLYPNDLVYVEHKSGLKFTLQNADSTLEKTRTQTSAFAYFVSGSISTASITIRTHDNAYGIPSLGVKTLKTFHKYQVDVLGNVFPVQKETRQKFR

SEQ ID NO: 18905 - protein, 925 aa, unidentified
  REGION 1..925: note = Cas Enzyme sequence
MAQGGWRTVGEMLYRHEAFALHKRNKADDYLSTVGRDMVAEEASILFERQRAMGCSWAAPELQAEYLSILLRQRSFDEGPGGNSPYGGNQVEKMVGRCTFEPDEPRAAKAAYSFEYFSLLQKLNHIRLAENGETRPLTQPQRQQLLSLAHKTPDISLARIRKELALPETVQFNGVRCRANETLEESEKKEKFACLPAYHKMRKALDGVVKGRISSLSISQRDAAATALSLYKNEDTLRAKLTEAGFQAPEIDALAGLTGFSKFGHLSLKACRKLIPHLEQGLTYDQACSAAGYDFKGHGAGERAFTLPAAAPEMEQITSPVVRRAVAQTIKVVNGIIREMDASPAWVRIELARELSKTFGERQEMDRSMRENAAQNERLMQELRDTFHLLSPTGQDLVKYRLWKEQDGVCAYSLRRLDVERLFEPGYVDVDHIVPYSLSFDDRRSNKVLVLSSENRQKGNRLPLQYLQGKRREDFIVWTNSSVRDYRKRQNLLREKLSGDEAEGFRQRNLQDTQHMARFLYNYISDHLAFAQSEALGKKRVFAVSGAVTSHLRKRWGLSKVRADGDLHHALDAAVIACTTDGMIRRISGYYGHIEGEYLQDADGAGSQHARTKERFPAPWPRFRDELIVRLSEQPGEHLLDINPGFYCEYGTEHIRPVFVSRMPRRKVTGPGHKETIKGAAAADEGLLTVRKALTELKLDKDGEIKDYYMPSSDTLLYEAIKAQLRRFGGDGKKAFAKPFYKPKADGTPGPLVRKVKTIEKATLTVPVHGGAASNDTMVRVDVFLVPGDGYYWVPVYTADTLKPELPNRAVVQGKPYSEWKEMREEDFIFSLYPNDLVYVEHKSGLKFTLQNADSTLEKTRTQTSAFAYFVSGSISTASITIRTHDNAYGIPSLGVKTLKTFHKYQVDVLGNVFPVQKETRQKFR

SEQ ID NO: 18906 - protein, 1084 aa, unidentified
  REGION 1..1084: note = Cas Enzyme sequence
MKNTLYGIGLDIGVASVGWAVVGLNGTGEPVGLHRLGVRIFDKAEQPKTGESLAAPRRMARGMRRRLRRKALRRADVYALLERSGLSTREALAQMFEAGGLEDIYALRTRALDEPVGKAEFSRILLHLAQRRGFKSNRRTASDGEDGRLLAAVNENRRRMAQGGWRTVGEMLYRHEAFALHKRNKADDYLSTVGRDMVAEEASILFERQRAMGCSWAAPELQAEYLSILLRQRSFDEGPGGNSPYGGNQVEKMVGRCTFEPDEPRAAKAAYSFEYFSLLQKLNHIRLAENGETRPLTQPQRQQLLSLAHKTPDMSLARIRKELALPETVQFNGVRCRANETLEESEKKEKFACLPAYHKMRKALDGVVKGRISSLSISQRDAAATALSLYKNEDTLRAKLTEAGFQAPEIDALAGLTGFSKFGHLSLKACRKLIPHLEQGLNYDQACTAAGYDFKGHGAGERAFTLPAAAPEMEQITSPVVRRAVAQTIKVVNGIIREMDASRAWVRIELARELSKTFGERQEMDRSMRENAAQNERLMQELRDTFHLLSPTGQDLVKYRLWKEQDGVCAYSLRRLDVERLFEPGYVDVDHIVPYSLSFDDRRSNKVLVLSSENRQKGNRLPLQYLQGKRREDFIVWTNSSVRDYRKRQNLLREKLSGDEAEGFRQRNLQDTQHMARFLYNYISDHLAFAQSEALGKKRVFAVSGAVTSHLRKRWGLSKVRADGDLHHALDAAVIACTTDGMIRRISGYYGHIEGEYLQDADGAGSQHARTKERFPAPWPRFRDELIVRLSEQPGEHLLDINPGFYCEYGTEHIRPVFVSRMPRRKVTGPGHKETIKGAAAADEGLLTVRKALTELKLDKDGEIKDYYMPSSDTLLYEAIKAQLRRFGGDGKKAFAEPFYKPKADGTPGPLVRKVKTTEKATLTVPVHGGAASNDTMVRVDVFLVPGDGYYWVPVYVADTLKPELPNRAVVQGKPYSEWKEMREEDFIFSLYPNDLVYVEHKSGLKFTLQNADSTLEKTRTQTSAFAYFVSGSISTASITIRTHDNAYGIPSLGVKTLKTFHKYQVDVLGNVFPVHKETRQKFR

SEQ ID NO: 18907 - protein, 1080 aa, unidentified
  REGION 1..1080: note = Cas Enzyme sequence
MLSYGIGLDIGIASVGWAVVALDNNELPYGIINMGSRIFDAAENPKDGASLALPRREARSMRRRLRRHRHRNERIRAMLVRRGILTQGSLDTLFDGQLEDIYALRVRALDQSVTAEEFARILIHLSQRRGFRSNRKAEASKEDGELLSAVSKNAERMRENGYRTAAEMFMKSEEYSEHKRNKGNSYISTVSRSMVEAEAKMIFAAQRSFGMSFASEETEGEYLSILLSQRSFDEGPGGDSPYGGNQIEKMIGKCTLEPDELRAAKASYSFEYFNLLTRINNIRIVEGGASVPLDNAQRALIVELAHKTEALDFAKLRKELELSPSQTFNLVYYRADETQEASERKQKFSFLRAYHELRRAFDKLSKGYINGMSREKRNAIAYALTAYKTEKSIRTGLENAGLTEDELNTALTIGSFSKFGHLSVKACDKLIPYLEQGMKYNDACAAAGYNFKAHDGEKRSRLLHITSDDMEPITSPVVRRAVSQTVKVINAIIRERGCSPTFVNIELAREMAKDFQERGRLKKEMDANASQNERVMEQIRELGKTQPTGQDLLKYLLWQEQDGRCAYSLKSIPIENLFDDGYAEIDHIIPYSISFDDSRRNKVLVLSKENREKSNRLPLQYLSGKRRDDFIVWVNTAVRDQKKRRNLLKEEISDADRSRFIERNLQDTKTMSSFLMNYLNDNLEFAPSDRRKKRVTAVNGAVTSYLRKRWGIRKLRANGDTHHAVDALVIACTTDSLIQRVSRYSRWHESSTVEVDPETGEVIERFPYPWPQFRKELEGRLTSDPMKNLRELNLPLYGDSEVPLRPLFVSRMPRRKVTGAAHKETIKSPAALDDGFLVVKKPLTELKLDKDGEISNYYMPQSDRLLYEALKRQLSAHGGDGKKAFTEPFHKPKSDGTPGPVVNKVKICEPSTMSVPILGGSGAADNDSMVRVDVFRVEGEGYYFVPIYVADTLKPELPNRACVAFKPYDQWKVMDDSNFIFSLYPNDLFKATSRRMLSLKLSQKDSTLPPEYCVKSEYLYFKSAGISTACFTAINHDNSYKISSLGIKTLENLEKYTVDVLGTYHAVGKETRQPFYKKRG

SEQ ID NO: 18908 - protein, 1080 aa, unidentified
  REGION 1..1080: note = Cas Enzyme sequence
MLSYGIGLDIGIASVGWAVVALDNNELPYGIINMGSRIFDAAENPKDGASLALPRREARSMRRRLRRHRHRNERIRAMLVRRGILTQGSLDTLFDGQLEDIYALRVRALDQSVTAEEFARILIHLSQRRGFRSNRKAEASKEDGELLSAVSKNAERMRENGYRTAAEMFMKSEEYSEHKRNKGNSYISTVSRGMVEAEAKMIFAAQRSFGMSFASEETEGEYLSILLSQRSFDEGPGGDSPYGGNQIEKMIGKCTLEPDELRAAKASYSFEYFNLLTRINNIRIVEGGASVPLDNAQRALIVELAHKTEALDFAKLRKALELSPSQTFNLVYYRADETQEASERKQKFSFLRAYHELRRAFDKLSKGYINGMSREKRNAIAYALTAYKTEKSIRTGLENAGLTEDELNTALTIGSFSKFGHLSVKACDKLIPYLEQGMKYNDACAAAGYNFKAHDGEKRSRLLHITSDDMEPITSPVVRRAVSQTVKVINAIIRERGCSPTFVNIELAREMAKDFQERGRLKKEMDANASQNERVMEQIRELGKTQPTGQDLLKYLLWQEQDGRCAYSLKSIPIENLFDDGYVEIDHIIPYSISFDDSRRNKVLVLSKENREKSNRLPLQYLSGKRRDDFIVWVNTAVRDQKKRRNLLKEEISDADRGKFIERNLQDTKTMSSFLMNYLNDNLEFAPSDKRRKRVTAVNGAVTSYLRKRWGIRKLRANGDTHHAVDALVIACTTDSLIQRVSRYSRWHESSTVEVDPETGEVIDRFPYPWPQFRKELEGRLTSDPMKNLRELNLPLYGDSEVPLRPLFVSRMPRRKVTGAAHKETIKSPAALDDGFLVVKKPLTELKLDKDGEISNYYMPQSDRLLYEALKRQLSAHGGDGKKAFTEPFHKPKSDGTPGPVVNKVKICEPSTMSVPILGGSGAADNDSMVRVDVFRVEGEGYYFVPIYVADTLKPELPNRACVAFKPYDQWKVMDDSNFIFSLYPNDLFKATSRKTLTLKLSQPDSTLPPEYCAKSELMYFKSAGISTASFTAINHDNSYKISSLGIKTLENLEKYTVDVLGTYHAVGKETRQPFYKKRG

SEQ ID NO: 18909 - protein, 1103 aa, unidentified
  REGION 1..1103: note = Cas Enzyme sequence
MDPKELKYVVGLDIGITSVGWATLLLDSQDEPVRILDLNSRIFDKAEVPKTGASLAAPRRMARGVRRRLRRRKFRLHRVRQYILRHHILDKAGLECLYKPKTDIDIFALRTAGLDRLLEPEEWARILLYMAKHRGFKSNRKSTAVAGGDDGVMLKAIQQNKEVLSKYRSVGEMFDKDEKFSDHKRNKGGSYEFTVARSMLVDEIKLLFEKQRDFGLVFAEKDAEEEYIELFSAQRNFDEGPGGDSPYGGNQIEKMIGLCTFEGKNGEKRAPKASYAFMATNLWQKINQIRIIEKGTERPLTAEEAGKIDEKAWKKEAMTYKDIRSEISLGDEASFKGLPYKWTETDKEETESKAKFSWVKEYHTLRKVLDKVEKNRILQLSHDDIDNIAYIFSVYKNDDKIREALEGTDLDSKDIDVLIENLGTFSKFGHLSLKACYKILPYLEQGMVYSDACTAAGYDFRESAKGSIADIPNPVVKRAISQTMKVLKAIKQKYGCPPVEIHIEMARELAKSFDERQKMTKSIEENQSHNERIKERLQKEFNVPYPSGKDIVKLKLYEEQNETCAYSQKHIDAAKLFHDSNYAEVDHIIPYSRSFDDTYNNKVLVLTAENRQKGNRTPMEYLSGDEARKKQFVAWVKSDIKKPRKRENLLREKFTADAENDWKARHLQDTQYISRFMLNYLQNNYELTPGNTDRRRRIIPVNGAVTAYVRKRLGISKIRENGDLHHAVDAAVIAAVTQGVVNSVSRYSKRHELQYHVDEHGNCVDLVTGELMGDAFKENHKIKGFPEPWPQFRAELEARVSENAAEAIRILNLPTYSPDEEIKTPFVSRMVRHKTTGQAHEDTVRGKSNVADNVYVKKVALTELKLKDGEIEGYYNPSSDRLLYEALKKRLEQFDGKGKDAFKEPFHKPKSDGSPGPIVKKCKVLDKINLAVQVHGGNGATSNANGSMIRVDIFKVQEKNGKHSYYSVPIYVADTVKAELPKKAVYRRPYDEWPEMKEADFAFSLYPNDVVYIGGKEIKMNVMPGCTLESEKSMRDEVLYFKGLDIATGTIRVVNHDGTYKQKSLGIKQLPIIEKYEVSVLGDLVKAMYSPRETFKHKAQRAK

SEQ ID NO: 18910 - protein, 1072 aa, unidentified
  REGION 1..1072: note = Cas Enzyme sequence
MYRLGLDIGTTSVGWAVLNTNNDAEPNRIIDLGVRIFDAAENPKDGSSLAAPRRDARGARRRNRRHRHRMERIKALLVNSSVLTKEELKDLYNKKELIDIYQVRYEALDRALTNEEFARLLIHIAQRRGFKSNRKNEDKKSDSGKLVTATTENTEYMASKGYRTVGEMLYLDEKFAHNKRNKGGDYSNTFLRSQLTEEVVIIFNQQKLFGNRFADDVLLTKYTEILLSQRDFDQGPNEPSPYAGNQIEKMVGECTFEKGEKRASKATYSFEYFNLLQKINAIRIQSPEGKRTLTADERNRIVELCHKTEKVEYRHLRNAIPLESYEQFANLSYGDKTTEEVEKTKFQYLNAYHDMRKVFDKLSKGHISNISVKQRDAIATALTYYKTDEKIISALADIELSQEELNVVLELKNYSKFGNLSVKALNKIIPYLEQGYTYDKACGLVGYDFRGHTDSYKSKYLPKLPDDIYDITSPVVKRAVNQTIKVVNEIIRRYGSPAAVNIELAREMSRSFNDRKEIEKAQKENADNNQKIREEIKDTFKILSPTGQDIIKYRLWKEQQETCLYTNSPIKAELLFSPGYCEIDHIIPYSISFDDSYSNKVLVMAYANREKGNRLPLQYVKSKDDFIGLVNAFIKNKAKKQKLLKEYISVEDENQIKQRSLQDTQFITRFMLNYIRDNLEFDSAYSGKVKVQAVNGAVTAYMRKRWGISKFREDTDKHHCIDAVVVACITPGIIQKVTRYSKRKENYYNDRDIELNNERFPLPWHEFKDEIDARTIANPAALLAEINLPNYMGVDIEKIRPIFVSRMTKKKTSGQAHKETIRAWRDVTIDGRTEKKTVTKTALQNLKLDKNNEIVNYYNPSSDRLLYELLRDKLIAAGGNGKKAFPDGYILKPAPKGGVQSKVQKVKIYDTSSLNVSVNDGVAANGDMVRIDLYKVEGDGYYFVPIYVADLIKEKLPNKASVAAKSYAEWKEMKDEDFLWSVYPNDLLYIEHKKEMKFTKVFKDARINNEMFANKVFVYYNSADISTGSIKIITDDNGYMIRGLGIKTISNIQKYHVDVLGNKYKAEKESRK

SEQ ID NO: 18911 - protein, 1068 aa, unidentified
  REGION 1..1068: note = Cas Enzyme sequence
VYRLGLDIGTTSVGAAILNIDHYGEPNRIIDMHVRTFEAAENPNDGSSLAAPRREARGARRRNRRHKHRLDRIKALIQSEGIYTKEKLDSLYHAKGNILMDIYQIRYESLERKLNNEELTRLLIHFAQRRGFKSNRKNEKKGSDEGKLLAATADNEKYLKEKGYRTVGEMLWKDERFAENKRNKGGDYSNTFLRSQLKEEIGIIFEKQKAFGSLYVTDAFSEKYLEILFSQRAFEEGPGGESPYAGNQIEKMVGKCPFEKEEKRASKATYTFELFNLWQKMNSIGILQDGIKRRLTDDERNKLFALCHKTEKVDYKRIRKELEMGQDALFSNLTYGRKEVEEVEAAKFQYLPVYHEMRKAFDKISKNHILQISNTQRDLIGTAITYYKTDDKIQQALLEGNFSKEEINAILGMKNFSKFGSLSVKAMQKVIPYLEKGLTYDKACEQAGYDFRAHSVAEKKKYLPKLPGDTYDITSPVVKRAINQTIKVVNEIIKRHGSPAAVNIELAREMSKSFKDRKRIEKEQNDNAAQNQRIYDEIKDTFHVAQPSGQDIVKYKLWQEQDCKCVYTGQPIKAENLFVPGYYEVDHIIPYSISFDDSYTNKVLVLTKANRDKGNRIPMQYVADKEEYEIRVNTLIKNRAKREKLLKPILTEEDIGEMKQRSLQDTQFITRFMMNYIKDYLLFDEAYDRKQRVTAVNGRVTAYMRKRWGINKVREDGDLHHSVDAVVVACITPGIVRTVTEYAKREENRYLNKDDAVMREKFPMPWPEFSTELDIRTCKEPKEMLRKVSLANYQDVDIDSIKPIFVSRMTKKKVTGQAHKETIRAYREVDGKMRTVTKTPIQELKLDKDGEIEGYYNPSSDILLYELLRSRLKEAGGNGKKAFPEGFVYKPTPNGGVAPKVKKVKIYDVSNLNIPVNHGVAANGNMVRIDLYYVEGEGYYFIPIYISDLIKKELPKKACVPHKEYHDWKNMKDEDFLYSIYPNDLLYIKSSTPKKFTKKKGEKKDSFEAEEAFVYYREAKISGATITVVTHDNNYTIQSLGVKTLSRIEKYHVDVLGNKYKAAVEERK

SEQ ID NO: 18912 - protein, 1070 aa, unidentified
  REGION 1..1070: note = Cas Enzyme sequence
VYRLGLDIGTTSVGAAILNIDHYGEPNRIIDMHVRTFEAAENPNDGSSLAAPRREARGARRRNRRHKHRLDRIKALIQSEGIYTKEKLDSLYHAKGNVLMDIYQIRYESLERKLNNEELTRLLIHFAQRRGFKSNRKNEKKGSDEGKLLAATADNEKYLKEKGYRTVGEMLWKDERFAENKRNKGGDYSNTFLRSQLKEEIGIIFEKQKAFGSLYVTDAFSEKYLEILFSQRAFEEGPGEESPYAGNQIEKMVGKCTFEKEEKRASKATYTFELFNLWQKINSIGILQDGMKRRLTDDERNKLFALCHKTEKIDYKRIRKELELGQDALFSNLTYGQKEVEEVEAAKFQYLPVYHEMRRAFDKISKNHVLQISNTQRDLIGTAITYYKTDDKIQQALLEGKFSKEEINAILGMKNFSKFGSLSVKAMQKVIPYLEKGLTYDKACEQAGYDFRAHNVAEKKKYLPKLPQNTYDITSPVVKRAINQTIKVVNEIIKRHGSPAAVNIELAREMSKAFRDRKRIEKEQNDNAAQNQRIYDEIKDTFHVVQPSGQDIVKYKLWQEQDCKCVYTGQPIKAENLFVPGYYEVDHIIPYSISFDDSYTNKVLVLTKANRDKGNRIPMQYVADKEEYEIRVNTLIKNRAKREKLLKPILTEEDMGEMKQRSLQDTQFITRFMMNYIKDYLLFDEAYDRKQRVTAVNGRVTAYMRKRWGINKVREDGDLHHSVDAVVVACITPGIVQTVTEYAKREENRYLNKDDAAMRERFPMPWPEFSTELDIRTCKEPKEMLRKVSLANYQDVDIDSIKPIFVSRMTKKKVTGQAHKETIRAYREVDGKMRTVTKTSIQELKLDKDGEIEGYYNPSSDILLYELLRSRLKEAGGNGKKAFPEGFVYKPTPNGGVAPKVKKVKICAVSNLNVSVNHGVAANGDMVRIDLYYVEGEGYYFIPIYISDLMKEELPKKACVSNKEYHDWKNMKDEDFLYSIYPNDLLYIKSSTPKKFTKNIQKGKENDSFEAEEAFVYYIKAGIGTGSITVVTHDNNYTIKSLGIKTLNCIEKYHVDVLGNKYKAAVEERK

SEQ ID NO: 18913 - protein, 1061 aa, unidentified
  REGION 1..1061: note = Cas Enzyme sequence
MHTLPYTLGLDIGIASVGAALLSDESILGMHVRTFSAAETDKEGDPLNKIRREARSARRRIRRRAHRLLRLRRLLKRTGLISDTSLEVLKTSKTPWQLRSEGLDRLLSPSELAAALYHIVKHRGFQSNRKAELKTDAKAGQMLSGVSANQQLMRDKSYRTIAEMVCKDDAFKDHKRNKGGSYRNTFARSDLADELKTLLKKQREYDNPLATPELEEAVHTLLMARRPVFKDDDIEKLVGFCTFEHGEKRAPKAAFSSERFIWLGKLNNLRLIYPGEQRSLTPEERSQIINLPFTQASVKFSQIRKKLDLPEYVRFNLVRYKPGEETSKSETATFFEAKAFHELRKTYRESGISELWERDQHDPQRLDQIATAIAVYRDDERIRNELSPHTIENEVVEAVLNCDFTQFINLSLKALNKILPYMEQGQRYDEACTSAGYQHHSPQQNEEKSGRIPPPDKNVIRNPVVYRSLNQARKLINAITKRYGAPAAIHLEMARDLSKPFSERKSIEREQEKYRKQKVQLRNEYIEHFGTEPNGLNLLKFRLYKEQDAQCAYTQKALDLSRLNEAGYVEVDHILPYSRSYDDSLLNKTLVLTEANRDKGNRTPFEFMGGDDQSQHWQKFVRWVQMNPKIRQAKRNRYLRKDFSEKAAREFRDRHLNDTRYIGRELKAMIESHVQWHPDSKSKDCCVVLSGQLTALLRGRWGFNKDRAAGDLHHAVDAAVVAAATRGMIQRMARHSKFHELKNVRTSYADPDTGEVVNLAAARDLEKHFPLPWDNFRNDTLAYLNPSAISADESAQEGHRGVRVSRAPTRRKLGAAHQETIRSKGKDNILLEQGLSAVKTPLSKLTLKNIENMVGYEDPRNAALVKVLRERLEAFGGDGAKAFAPNQPPVYKPSKPGKQAPEIRSVKMASKSKGALHVREGLADSGRMIRIDIYETKNGYVGVPIYVSDKARSKLPKAYPKKGEDRANWPEVDTNDNFLFSLYSTDWIEAKTKKETIAGYVKSYDIFDGRLLVYAHDNKKVVRKLTLSALADLQKLHVSILGDLYKGGTPKCSPLRKGQEL

SEQ ID NO: 18914 - protein, 1165 aa, unidentified
  REGION 1..1165: note = Cas Enzyme sequence
MLVKQSSSEKLTIGLDIGIASVGWAVLGESRIIDLGVRCFDKAETAKEGESLNLSRRMARLMRRRLRRRAWRLTKLARLLKREGLIADVATLKQQPSKGFITPNLWQLRVDALDRQLNDEAWARVIYHLCKHRGFHWISKAEAKAADSDKEGGKVKQGLAGTKRLMQEKNYRTAAEMVLAEFPDAQRNKQGEYSKALSRELLCEELEELFKQQRKYGNPQAGEQLETLILGNGDQKNGLFWEQHPALSGKALLKMLGKCTFEKDEYRAPKASFTAERHVLLTRINNLRIIDDGKTRALSDEERRIALWQPYQQVSDFTYKQLGSALVKAGYLVKDGYKFVGLAYPSEVQKAEKAKNPETQTLAKVPAWQELKKTLKVADLVREWESMANAALDGRSELLDQIAWVLSVYKEDDEVAHELGNLDLLNKDKMIDALQFVRFDKFSNLSLAALYKIVPEMEKGLRYDEACNVAGYQPSLPEFQDDSTKVKYLPPFYTGRDKDGRLVFNEDMDIPRNPVVLRALNQTRKVVNALVRKHGSPHAVHIEMARDLSRPFDERRKISGEQEKYRTRNQEDRATFASHFNIMNAPKGRDFEKWQLYREQQGKCAYSLNPIDLNRLIEAGYVEVDHALPYSRSFDDSKNNRVLVFTAENRNKGNQTPYEYLDGKNGSERWRLFEAFVSGKTAYRQAKRSRLLRKDFGEDEAKGFRDRNLNDTRYICRFFMNYVEKYLQLHEESNAKRCVVVSGQLTSFLRFRWGIVKVRSDSDRHHALDAAVVAACSHGMVKRLSDYSRRRELQEARNAIDMATGEIVNPAMLDKLEAHFPAPWGNFRDELLSRLNIDDPAALRAAIERLGSYPVEDLNGLYPLFVSRAPKRRNSGAAHKETIYAQPEALKEKGSVTQKVAVTNLKSADVDKLIDPHRNKKLYDYLRTWLEGKDTREKEAKAIEAGAGRGKDKRDLTAVEKAEIEKLRALPRKPDKQGDPTGPIVRTVTMVIDKLSGISVRGGVAKNDTMLRVDVFRHKTNDKFHLVPVYVHHAVTGLPNRAIVQSKSEDKWTEMDENHAFLFSLYSNDLVQITHKNGETMMGYYRSCHSGTGAVSIALHDRHAFGDKTTSKRLYEKNPSKTLPNDKRGLIESIGVKTAANVEKYNVDVLGNIYPALPEQRCDLA

SEQ ID NO: 18915 - protein, 1168 aa, unidentified
  REGION 1..1168: note = Cas Enzyme sequence
MESIRFIDMNANIISKSQRNENLGTLTFGFDIGIASVGWAVLNETRVVALGVRAFDKAETAKEGDSLNLVRRSARLMRRRLRRRAWRLTRLGRLLKRFGVIENADYFKTQPGHTDSAWNLRIAALDRRLTSEEWARVLYHLCKHRGFYWVSRAEEAKAEGDATGEAGKVKKNLAATAKLMATHGYRTAAQMVLAEFPDAQRNKQGEYTKALSRILLGEELNTLFEAQRSFGSQYASPTLELEILGTGDKKSGLFWLQKPSLTGNKLLEMLGHCTFEKSEYRAAKASFTAERHVWLTRLNNVRITVDGKSRPLNDAERAVALLLPYKSGEKFTYKNLRTALVAAGLDTTFKFTGFSYPSAQQIEEKKAKNPEDDVMVKLSAWHELRLKLNRAGLESEWLQISTPALDGDASLLDQIGWVLSVYKEDEEVKNELSKLLLPGGETTINALLTIRFDKFHALSLTALRKIVPFMESGLRYDEAVAKIPEYGHHSQLYKVGKGSHRLLPPLYKERDKTGKLILNEDLDVPRNPVVLRSINQSRKVLNALVKEYGSPSAVHIELARDLSRPFDERKKIKTEQDAFRDRNDKDRDEFASHPQFASYMQANGKPKGKDFEKWRLYNEQQGKCAYSLEGFDLNRLLEPGYVEVDHALPYSRSFDDSKNNKVLVFAKVNRDKGNLTPYEYLDGKNDSQVWRDFVGFAQGNKAWRQAKLGRLLRKDFGKDESQEFRDRNLNDTRYIAKFFKNYVEQYLKLEKQADGSQAQRCVVLSGQLTAFLRARWGFIKIREESDRHHALDAVVIAACSHSMVKKLSDYSRNKELAQVKEGFVDMETGEIVNPAMFTQLNAHFPAPWPDFRDEVVDRLKIDDPALLSIAMQRLSKYPAEALEQLKPLFVSRAPQRRNSGAVHKDTIYAQPERLKKQGGVTQKVALSSLSLKDIDKLAEPHRNVKLYEAIRVWLGTRDANEKRAKEIEASAGRGKDKRALTSQERAEIDTLRALPRKPTNDSTQIGPIIRTVTMDVDKLSGIPIRGGIAKNDTMLRVDVFTKAGKFHIVPVYIHHLVSGLPTHAVVANKDETEWTLIDDGFTFCFSLCPNDFVRVQQNGKPKIEGYFAGCDRSTGNLSFWSHDRSETVGKDGLIRSIGVKTALSLEKFDVDVLGNIYPAKPEERRGLA

SEQ ID NO: 18916 - protein, 1079 aa, unidentified
  REGION 1..1079: note = Cas Enzyme sequence
MNQITQKQATLEIPSYTLGLDIGIASVGAALLGKDKILGLHVRTFDRAETAKDGVSLNLIRRESRLTRRRIHRRSHRLAMFRRFFHRLGAIDSPTTEAFNSTESPWQLRALGLDQVLESKQWVSALYHILKHRGFQSNRKSEVKSDEKAGQMLSGVTRNRQILTKSGLRTIGELIATHPDFTQAKRNKGGDYSHTVSRDDLVIELGLLFKCQRELGNIYATDVVEAKVNELILNRQPTLSGERLLNMLGNCTFEPQEHRAPKASFSAEQFVWFTKLNNLRIIGDGESIGLTNEQRNLIIEMPFSQAKLTYKQVRKALNLNDDHKFNSLNYQTGDSAKNPEVASLFEAKAYHAIRKAYIGAGLALEWDKDKNNELTLNNITYALSVFKDDSESSAWLLEQGVSKPIIEAVLDLSFSEFIRLSNKALNNILPHMRDGQRYDEAVISAGYQHHSHFGSDEKSKYLPQFDDDFTTNPVVARALNQARKLVNAIVKKYGSPTAVHIELARDLSRSLRDRQTITKDQDAYQKAKAKDITAFEELFNFTPKGVDLAKWRLYREQNGQCAYTQVPLAPYGDISQLFAPGQVEIDHALPYSRSFNNSMNNKVLVLTVENRNKANRTPFEYLNGARESSAWRNFEAWVKSNKSYRIGKKNNLLRKNFGSEAAQEFRERHLNDTRYICKAFKSFIEQHLLLSGDVKQQRCVVVSGQLTAYLRARWGLLKVREDGDLHHALDAAVVAACSRSMVKRLSDYSRKGELEHAKSQLPDPETGEIVDIAALRKLERQFPMPWTVFRDELKAKLSDSPQKPISEKLWLAHLLEDNVQPVRVSRAPTRRGLGAAHQETIRSAKQIDQQLSHVKTPLTNLRLKDLPNIVGYEDPRNQTMIEAIKERLAEHSDKGDKAFAYPLYKPGKNGSQGPLIRSVKLISVQKSGIAIRHGIANNGDMVRTDVFTDGKKYFLVPVYVADAAQKELPDRAVSSGKAESEWTAMDEKHQFLFSLHKNDWVYVQGKPKTKPFAGYYAGLDRSTGAIHLWSHDRNQAEGKQGLYRSIGVKSAGSFTKYHVDLLGGLHKVTEESRQPLGKQ

SEQ ID NO: 18917 - protein, 1068 aa, unidentified
  REGION 1..1068: note = Cas Enzyme sequence
MTISGFTKEQIQEAGGYTLGLDVGIASVGAALLMDDRILGLHVRAFDAGEKRTRKGITPLNSERQEARSTRRRLRRRRHRLLRLRRLFKRAGIMPDTAPEALSLLKCPWQLRAEGLDRRLLPDEWACALYHIVKHRGFQSTRKSEIYDTNNNDNGKMLSSIAENQEIMSEQDYRTVGEMVLKDSRFAASKRNKQGSYSHTLSRDDIAQELHKLFDWQRRFGNVFANERLEEDVYELLMQRRPALTEAMMLDMIGRCTFEPSEYRAPKHSYTSERFVWMTKLNNLRICGNGDRRAITKEERDILIDLPFTTQKVTYNQIRKKINLSADLRFNLNYPSGSASDKNKTESSTMFEAKGFHKLKDAYKKSDLESRWSIDCQNPIRLDDIGYALTVFKEDKPAIEWLSQRGVDSNVIEAILSVSFDSFLNLSLKAIYEILPLMEKGMRYDEAVSESRYGHSDTFTNRKKTGYIPQFSRNAFTNPVVSRSLNQARKLINAIIREYGAPHTIHIELARGLSLPPSDRENIVKMQDKYQKEKLNDIEDFKKEFGPEPSGSDLEKWRLYREQDGKCIYSGKGIDTNRLFEHGYVQIDHALPYSRSLCNAKSNKVLVLTKENQDKGNRTPYEYLGGADNSTAWQYFVATVNSNPKYRQSKRQTLLRKDFDKHEKGFRDRNLHDTGYIGKALKSMIETHLQLDGGCVVVSGQLTSFLRAKWGLIKIRGDGDKHHALDAAVVAACSRGMVKRLSDYSRRKELKDARNGFTDPASGEVVDIVAARKLESEFPKPWRLFREELEARLSQVPSEGLMLLDHYTPEQAAAVEPIRVSRPVRRRSTGQAHKETIYSFRSDEKGYVTDRKKLVELKVKDLPNIIGYDDPRNKPLIDAIETRLLMHGDDGKKAFEDPLYKPSANGNPGPIVRSVKVARKLPSPIPIRKGAAENGSILRTDVFEKNGGFYLVPVYVHHCAKGVLPMKASTVGKMEDDWDVIDDTFEFMFSLYPNDWVVIKKRNEVVSGYYSSMNRAIAQLEISSHDMNGSKFHGVKTARDLTKYHVDILGRIFPVSNEIRKPPSKEFE

SEQ ID NO: 18918 - protein, 1084 aa, unidentified; identical to SEQ ID NO: 18898
  REGION 1..1084: note = Cas Enzyme sequence

SEQ ID NO: 18919 - protein, 1084 aa, unidentified
  REGION 1..1084: note = Cas Enzyme sequence
MKNTLYGIGLDIGVASVGWAVVGLNGTGEPVGLHRLGVRIFDKAEQPKTGESLAAPRRMARGMRRRLRRKALRRADVYVLLERSGLSTREALAQMFEAGGLEDIYALRTRALDEPVGKAEFSRILLHLAQRRGFKSNRRTASDGEDGRLLAAVNENRRRMAQGGWRTVGEMLYRHEAFALHKRNKADDYLSTVGRDMVAEEASILFERQRAMGCSWAAPELQAEYLSILLRQRSFDEGPGGNSPYGGNQVEKMVGRCTFEPDEPRAAKAAYSFEYFSLLQKLNHIRLAENGETRPLTQPQRQQLLSLAHKTPDISLARIRKELALPETVQFNGVRCRANETLEESEKKEKFACLPAYHKMRKALDGVVKGRISSLSISQRDAAATALSLYKNEDTLRAKLTEAGFQAPEIDALAGLTGFSKFGHLSLKACRKLIPHLEQGLTYDQACSAAGYDFKGHGAGERAFTLPAAAPEMEQITSPVVRRAVAQTIKVVNGIIREMDASPAWVRIELARELSKTFGERQEMDRSMRENAAQNERLMQELRDTFHLLSPTGQDLVKYRLWKEQDGVCAYSLRRLDVERLFEPGYVDVDHIVPYSLSFDDRRSNKVLVLSSENRQKGNRLPLQYLQGKRREDFIVWTNSSVRDYRKRQNLLREKLSGDEAEGFRQRNLQDTQHMARFLYNYISDHLAFAQSEVLGKKRVFAVSGAVTSHLRKRWGLSKVRADGDLHHALDAAVIACTTDGMIRRISGYYGHIEGEYLQDADGAGSPHARTKERFPAPWPRFRDELIVRLSEQPGEHLLDINPEFYCEYGTEHIRPVFVSRMPRRKVTGPGHKETIKGAAAADEGLLTVRKALTELKLDKDGEIKDYYMPSSDTLLYEALKAQLRRFGGDGKKAFAEPFYKPKADGTPGPLVRKVKTIEKATLTVPVHGGAASNDTMVRVDVFLVPGDGYYWVPIYVADTLKPELPNRAVVAHKPYSEWQEMREEDFVFSLYPNDLVYVEHKSGLKFTVQNADSTLEKTRTQASAFVYFVSGGISGGTITVRTHDNSYGIPSLGLKTLKSLCKYQVDVLGNVFPVHKETRQKFR

SEQ ID NO: 18920 - protein, 1084 aa, unidentified
  REGION 1..1084: note = Cas Enzyme sequence
MKNTLYGIGLDIGVASVGWAVVGLNGTGEPVGLHRLGVRIFDKAEQPKTGESLAAPRRMARGMRRRLRRKALRRADVYALLERSGLSTREALAHMFEAGGLEDIYALRTRALDEPVGKAEFSRILLHLAQRRGFKSNRRTASDGEDGRLLAAVNENRRRMAQGGWRTVGEMLYRHEAFALHKRNKADEYLSTVGRDMVAEEASLLFQRQRELGCAWATPELQAEYLSILLRQRSFDEGPGGNSPYGGNQVEKMVGRCTFEPDEPRAAKAAYSFEYFSLLQKINHIRLVENGETRPLTQPQRQQLLSLAHKTPDVSLARIRKELALPETVQFNGVRCRANETLEESEKKEKFACLPAYHKMRKALDGVVKGRISSLSISQRDAAATALSLYKNEDTLRAKLTEAGFQAPEIDALAGLTGFSKFGHLSLKACRKLIPHLEQGLTYDQACSAAGYDFKGHGAGERAFTLPAAAPEMEQITSPVVRRAVAQTIKVVNGIIREMDASPAWVRIELARELSKTFGERQEMDRSMRENAAQNERLMQELRDTFHLLSPTGQDLVKYRLWKEQDGVCAYSLRRLDVERLFEPGYVDVDHIVPYSLSFDDRRSNKVLVLSSENRQKGNRLPLQYLQGKRREDFIVWTNSSVRDYRKRQNLLREKFSGDEAEGFRQRNLQDTQHMARFLYNYISDHLAFAQSEALGKKRVFAVSGAVTSHLRKRWGLSKVRADGDLHHALDAAVIACTTDGMIRRISGYYGHIEGEYLQDADGAGSQHARTKERFPAPWPRFRDELIVRLSEQPGEHLLDINPEFYCEYGTEHIRPVFVSRMPRRKVTGPGHKETIKGAAAADEGLLTVRKALTELKLDKDGEIKDYYMPSSDTLLYEALKAQLRRFGGDGKKAFAEPFYKPKADGTPGPLVRKVKTIEKATLTVPVHGGAASNDTMVRVDVFLVPGDGYYWVPIYVADTLKPELPNRAVVAHKPYSEWQEMREEDFVFSLYPNDLVYVEHKSGLKFTVQNADSTLEKTRTQASAFVYFVSGGISGGTITVRTHDNSYGIPSLGLKTLKSLCKYQVDVLGNVFPVHKETRQKFR

SEQ ID NO: 18921 - protein, 1090 aa, unidentified
  REGION 1..1090: note = Cas Enzyme sequence
MYPYAIGFDIGIASVGWAVVALDREDKPFGIINIGSRIFDAAEQPKTGNSLAAPRREARSVRRRLRRRQHRLARIHNLLVANGVLAQAELDSLFAGKLEDIYTLRVKALDSAVSPTEFARILLHIAQRRGFRSNRKSGTSKEDGELLSAVSANRALMVEKGYRTVGEMLLKDPKYGYSKRNKGGKYIATVGRDMVEEEVHALFTAQRRLGQSFASEDLENRYLEILLSQRSFDEGPGKGSPYAGNQIENKIGKCTFEPGEPRAARASYSFEYFNLLQKVNHLRLICGSESLPLSAVQRDELIALAHKTEYLTFSRIRKELSIPANTIFNAVSYKNADDCEAAEKKIKFCYLSAYHQMRSAFNKISKNHFDTLTRVQRNEIARVLSVYKTSANIRPRLAALGLSEAEIDIAETLSFSKTSHLSVKACDKLIPFLEKGMRYNEACAAAGYDFKSHSSIERTHLLHPTPEDLSDITSPVVRRAVSQTVKVLNAIIRQQGCSPTFINIELAREMAHDRRERDQIKNEMDANYARNEKLMERIRTEYGKENPTGQDLVKFKLWEEQRGECAYSQKHIRIEHLFDPDYAEVDHIIPYSLSFDDSYKNKVLVFAEENRNKGNRLPLQYLQGKRRDDFIVWVENSIRDYKKKQRLLKEAITPEDEKKFKERNLQDTKTMSRFLLNYIGDHLEFSAFSSGRKKHITAVNGAITSYMRKRWGIQKIRENGDLHHAVDALVIACTTDGMIQQVSRYAALRECEYVQTEEGNIAIARHTGEVLKRFPYPWPEFRQELEARLGDDPVRAVISQRFPVYANGDIPVRKLFVSRMPRRKVTGAAHKETIKSPKALNNGSVVVKRPLTDLKLDPKTGEIANYYMPQSDRLLYEALKEALQKHGGDGAKAFAQPFHKPKSDGTPGPIVNKVKLCEPTTLNVRVLKGAGVADNDSMVRIDVFHVENDGYYFVPIYIADTLKKELPNKACVAYKSYEQWKEMSDENFIFSLYPNDLIRVTHKTKLKLTKAQKESTLPNTYEAKQEMLYYISANINTAAIACRTHDSSYEIRSMGIKTLENLEKFTVDVLGEYHKVEKEPCMPFHRKRRK

SEQ ID NO: 18922 - protein, 1078 aa, unidentified
  REGION 1..1078: note = Cas Enzyme sequence
MKYGIGLDCGINSVGYCIMELNSDDEPKRIVRLNSRIFTEAENPKDGSSLAAPRREARGLRRRIRRHKHRLERIRALLVRENIVTQAELDNMFSGTLSDIYELRTAALDAPLNNIEFARVLINLAQRRGFKSNRKSEKSSSDKETGKLLSAIKKNKESIEVGGYRTVGEMLFKDERYAKHKRNKGEAYLNTVSRDMIEAEIHAVFASQRNFGMPFASEKIENEYTDIALSQRPFDLGPGEGPENCKSPYAGKQIKNMIGPCTFFPEEKRAVKASYSFQLFSLLQGINNITLVSSDSNTFPLSQRQRKILKDYCFKTANVTYASIRKVLQIPQEYTFKNITYTDDGIEKSEKKTKFQHLKPYHEMKKVLGSAIQTLTPEELDEIGEIFTFYKDETIIIKQLEETEIDKSLYDLLLQLPTFEKAGHISTKACKMIIPFLEEGKTYDKACECAGLNFKAHTNMQKQMLLPAKSDELNDVVNPVVRRAISQTIKVVNAIIREMGTSPTYINIELARELSKSKKERDEINKKYKLNQAENEKLKDEIIENFKIKPNGQDIIKLKLWCEQDGICPYTKTYIKYENLFDKGYAEIDHIIPYSLSFDDSFNNKVLTTATQNRQKGNRIPLEYLPESEKDGFRVWVNSNIRNHRKRQNLLKEHFTEADKKEFKSRNLNDTRYLNKLLLNYINDNLLFTDFYGGKKKHVTSVNGAVTGYIRKRWGISKIREDGDLHHAVDAAVIACVTQGMINRITAYSARNEAPYDLNTETGEIKERFPLPYPNFKKELEARTTIEDEKRLKSVLMSFSNYSYDDIEKAKPCFVSRTPHRKVTGAAHEETIRSGKVEGFTVSKTELTKLKLTNGEIEGYYEPESDTLLYNALLQRLNEFGGDAKAAFADEFHKPKADGTPGPVVKKVKTIKRSSSNVKARNKNGLGVADNGSMIRIDVFYVENEGYYFVPIYVAGTVKEMPNEACPFGKDKKKIMTDDDFLFSLYPNDLIKITAKKDMKFSLANKESGLPKNKYANEALVYFIKAGITTASITIETHDGAYSIPSCGIKSLVKLEKYTVDPLGNVSKVNREKRMYFK

SEQ ID NO: 18923 - protein, 1086 aa, unidentified
  REGION 1..1086: note = Cas Enzyme sequence
MIPYAIGFDIGITSVGWAVVALDSEDKPYGIINMGSRVFDAAEQPKTGASLAAPRREARSARRRLRRHQHRLERIRRLLLTENVISQAELDTLFAGKLEDIYTLRVKALDAPVLHTEFARILLHIAQRRGFRSNRKAETAKEDGELLAAVSKNRALMVEKGYRTVGEMLLQDPLYAASKRNKGGQYIATVGRDMVAEEVRAIFRTQRQLGQPFASEELESRYLDILLSQRSFDEGPGEGSPYAGSQIERMIGKCTLEDGEQRAAKATYSFEYFTLLQNINHLRLLRGGEGSPLTPAQREALIALAHKTKELNFSHIRRELAIPADTTFNAVYYKNTDDAEEAEKKTKFSYLKAYHQMRTAFNKLSKNHFDTLTRAQKNELGRVLSTYKTSAKIRAALLPAGLSDAELDIAETLSFSKFGHISVKACDKLIPFLEKGMKYDEACAAAGYDFKAHSGRERTQLLHPTPDDLADITSPVVRRAVAQTVKVLNAIIRERGCSPTFINLELAREVAQDFTERNQAKKSMDDNRARNERLMERIRAEYGKEHPTGQDLVKLKLWEEQHGECAYSQKHISIEHLFEPDYAEVDHIIPYSISFDDGYKNKILVLAEENRNKGNRLPLQYLQGKRREDFIVWVENTIRSTPKKQRLLKEKLTSEDEKQFKERNLQDTKTMARFLLNYIGDHLAFADFAAGRKKHITAVNGAVTSYMRKRWGISKIRENGDLHHAVDALVIACTTDGMIQQVSRYAALRECEYVQTEGGSLAVSVHTGEVLKSFPYPWPEFRRELEARLGDDPRRAVISQRFPVYLNNDIPVRKLFVSRMPRRKVTGAAHKETIKSPKALQDGVVVTKRPLTSLKLDKNGEIANYYMPQSDRLLYEALKAQLMKYGGDGAKAFTQPFHKPKSDGTPGPIVNKVKLCEPTTLHVPVLKGTGVADNDSMVRIDVFYVEGEGYYFVPIYIADTLKKELPSKACVAFKPYEDWKAMSDENFIFSLYPNDLMRVTHKNKLKLTKAQKESTLPDTYETKQELLYYISANINTAAIACRTHDAAYEIKSMGIKTLEKLEKFTVDVLGEYHKVEREPRMAFNRK

SEQ ID NO: 18924 - protein, 1086 aa, unidentified
  REGION 1..1086: note = Cas Enzyme sequence
MIPYAIGFDIGITSVGWAVVALDSEDKPYGIINMGSRVFDAAEQPKTGASLAAPRREARSARRRLRRHQHRLERIRRLLLTENMISQAELDTLFAGKLEDIYTLRVKALDAPVSHTEFARILLHIAQRRGFRSNRKAETAKEDGELLAAVSKNRALMAEKGYRTVGEMLLQDPLYAASKRNKGGQYIATVGRDMVAEEVRAIFRAQRQLGQPFASEELESRYLDILLSQRSFDEGPGEGSPYAGSQIERMIGKCTLEDGEQRAAKATYSFEYFTLLQNINHLRLLRGGEGSPLTPAQREALIALAHKTKELNFSHIRRELAIPADTTFNAVYYKNTDDAEEAEKKTKFSYLKAYHQMRTAFNKLSKNHFDTLTRAQKNELGRVLSTYKTSAKIRAALLPAGLSDAELDIAETLSFSKFGHISVKACDKLIPFLEKGMKYDEACAAAGYDFKAHSGRERTQLLHPTPDDLADITSPVVRRAVAQTVKVLNAIIRERGCSPTFINLELAREMAQDFTERNQAKKSMDDNRARNERLMERIRTEYGREHPTGQDLVKLKLWEEQHGECAYSQKHISIEHLFEPDYAEVDHIIPYSISFDDGYKNKILVLAEENRNKGDRLPLQYLQGKRREDFIVWVENTIRSTPKKQRLLKEKLTSEDEKQFKERNLQDTKTMARFLLNYIGDHLAFADFAAGRKKHITAVNGAVTSYMRKRWGISKIRENGDLHHAVDALVIACTTDGMIQQVSRYAALRECEYVQTEGGSLAVSVHTGEVLKSFPYPWPEFRRELEARLGDDPRRAVISQRFPVYLNNDIPVRKLFVSRMPRRKVTGAAHKETIKSPKALQDGVVVTKRPLTSLKLDKNGEIANYYMPQSDRLLYEALKAQLMKYGGDGAKAFTQPFHKPKSDGTPGPIVNKVKLCEPTTLHVPVLKGTGVADNDSMVRIDVFYVEGEGYYFVPIYIADTLKKELPSKACVAFKPYEDWKAMSDENFIFSLYPNDLMRVTHKNKLKLTKAQKESTLPDTYETKQEMLYYISANINTAAIACRTHDAAYEIKSMGIKTLEKLEKFTVDVLGEYHKVEREPRMAFNRK

SEQ ID NO: 18925 - protein, 1086 aa, unidentified
  REGION 1..1086: note = Cas Enzyme sequence
MIPYAIGFDIGITSVGWAVVALDSEDKPYGIINMGSRVFDAAEQPKTGASLAAPRREARSARRRLRRHQHRLERIRRLLLTENVISQAELDTLFAGKLEDIYTLRVKALDAPVLHTEFARILLHIAQRRGFRSNRKAETAKEDGELLAAVSKNRALMVEKGYRTVGEMLLQDPLYAASKRNKGGQYIATVGRDMVAEEVRAIFRTQRQLGQPFASEELESRYLDILLSQRSFDEGPGEGSPYAGSQIERMIGKCTLEDGEQRAAKATYSFEYFTLLQNINHLRLLRGGEGSPLTPAQREALIALAHKTKELNFSHIRRELAIPADTTFNAVYYKNTDDAEEAEKKTKFSYLKAYHQMRTAFNKLSKNHFDTLTRAQKNELGRVLSTYKTSAKIRAALLPAGLSDAELDIAETLSFSKFGHISVKACDKLIPFLEKGMKYDEACAAAGYDFKAHSGRERTQLLHPTPDDLADITSPVVRRAVAQTVKVLNAFIRERGCSPTFINLELAREVAQDFTERNQAKKSMDDNRARNERLMERIRAEYGKEHPTGQDLVKLKLWEEQHGECAYSQKHISIEHLFEPDYAEVDHIIPYSISFDDGYKNKILVLAEENRNKGNRLPLQYLQGKRREDFIVWVENTIRSTPKKQRLLKEKLTSEDEKQFKERNLQDTKTMARFLLNYIGDHLAFADFAAGRKKHITAVNGAVTSYMRKRWGISKIRENGDLHHAVDALVIACTTDGMIQQVSRYAALRECEYVQTEGGSLAVSVHTGEVLKSFPYPWPEFRRELEARLGDDPRRAVISQRFPVYLNNDIPVRKLFVSRMPRRKVTGAAHKETIKSPKALQDGVVVTKRPLTSLKLDKNGEIANYYMPQSDRLLYEALKAQLMKYGGDGAKAFTQPFHKPKSDGTPGPIVNKVKLCEPTTLHVPVLKGTGVADNDSMVRIDVFYVEGEGYYFVPIYIADTLKKELPSKACVAFKPYEDWKAMSDENFIFSLYPNDLMRVTHKNKLKLTKAQKESTLPDTYETKQELLYYISANINTAAIACRTHDAAYEIKSMGIKTLEKLEKFTVDVLGEYHKVEREPRMAFNRK

SEQ ID NO: 18926 - protein, 1092 aa, unidentified
  REGION 1..1092: note = Cas Enzyme sequence
MAYGIGLDIGIASVGYAVVALDTDENPWGIIRMGSRIFDAAENPKDGASLALPRREARSTRRRLRRHRHRIERIKNLFLRSGLLTGTDLDCLYQGQLEDIYALRVKALDEPVGKKELARILLHLAQRRGFKSNRKAESKEKEAGLLKAAVSENEKRMAENHYRTAGEMFLKDPAFSQYKRNKGGVYLTTVQRSMIAEEADIILQRQSELGNKIITRDFKEEYFSILLSQRQFDEGPGGNSPYGGNQIEKMIGICTFEDGTNGFPAEPRAAKACYSFEYFNLLQKVNHIRLLYKNESRFLDDGQRKKVIELAKTKADLNYSHIRKELGLGEEIKFNMLVYNADDIEKKTKFNFMPAYHQVKKALNAVAKGHIESYSTELLDEIGRILSTYKGDEKRTEELIKAGIAIPDVDELLKIGGLSKFGHLSLKALRKIIPFLEQGMSYDKACEAAGYNFRAHNKEKSMYLPAKAEELQDITNPVVRRAVAQTIKVVNAIIREQGESPIYVNIELAREMAKDFKERAKLTKENHENQAENERLLDRIRKEFGKSTPTGMDLVKLKLWKEQDGISPYSRKTIEVTRLFEPGYVDVDHIVPYSISFDDTYKNKVLVMSSENREKGNKLPIQYLAAKFGKDAVEAFKVWVVNSVKNYPKRQKLLKEKITEEDITGFKERNLQDTKYMARVLYNFINDRLLFAESEIGKKKRVRAVNGAITSYLRKRWGINKVRENGDKHHAVDALVIACTTDKMIQEISGYARGQELEYEPMDKESLLVDKSTGLILKRFPYPWEDFRKELMARMSDQPAEALQKLRLLYYQDKDITAIKPIFVSRMPRHKVTGAAHKATVKGARHLDEGIALYKTDLVNLKLDKNTGEIVDYYNPESDRLLYNALKTQLQKYNGDGKKAFAEPFYKPKADGTPGPLVKKVKCFEKTTLNVLVEDGTGAADNDSMVRVDVFKVEGDGYYLVPIYVADTLKETLPNKAIVAHKQYSQWKEMKEEDFLFSLYPNDLIRVQNKKDMVFTKSQKESNLPENYIAKDIIAYYKQTDISAGAIKIISNDDSYSLRGLGVKTLQRIEKYQVDVLGSYYKVKTEKRQLFH

SEQ ID NO: 18927 - protein, 1118 aa, unidentified
  REGION 1..1118: note = Cas Enzyme sequence
MRGMNYRIGLDIGITSVGWAVLSHDSNEEANRIVDLGVRTFDRAEVPDTGASLASERREARGTRRRLRRRRHRLDRVKKLFEDEGLISISNLESMFKTSKHANVYKIRYEALNGIINNEELAAILYHFAKHRGFKSNRKSEANNKEEGKLLKATNENKELLINSGYQTVGHMLYKDSKFRAKDWNGNEILMTRNKTDDYKNTILRDLLEEEIKIIFNKQREFGNRYTTKEFEHKYLEIFKSQRSFDQGPGNMPNGQPSPYGGNIIEKMLGKCTFEKDEERACRATYSFEYFCLLQGINNLKIIMPDTSIRRLTEDERRKLIELAFKSSSIDYSKLRSTIGLEEGSFFKNLDYGNKSINDVEKKAKFNYLKAYHEIRKKVEKVDKEIFQTFDINIIDYIARTLTVYKNDNTRILKLKEVNLSNEIIDELLNLNFSKTGNLSIKAIRKIIPFLEDGFIYNEACEMAGYDFKGSISGQKKKLLNTDILKDITNPVVCRAISQSIKVLNAIIRKYGSPQLICIELAREMSKNFEERKKIEKSMKENSEVNDKAKEYIKSLGVVSPTGHDIVKYKLWKEQNEICAYSGRHISVKDLFDKSVVDIDHIIPYSICFDDSYKNKVLVYADENRQKGNRLPYEYFGHDLEKWHKFEVFVNNIKDHKKRQRLLKQKLSKEEIEAFKERNLQDTKYITTQFYNYIRANLEFAESKKYSKRNVITVNGSITSYLRKNWGLIKMREENDKHHALDAVVVACTTSSMIQKISKYVKGRELKYSRFSEYQDKETGEILDLTKLSREEFDEIFGVKFPEPWYNFRKELEIRLSDRPYLYKDILYKLGYRDEEIKPIFVSRAPKRSVTGPAHLDTVRSPKLIDQGYVISKKNLKDLKWDKKNNEIIGYYNKKDDRLLYEALCERLKKYNYDAKKAFAEEFRKPKSDGSDGPIVKKVKIMEKQTLGVMVNNGDGVASNGDMVRIDIFKEDGKYYFVPIYVSDTIKQQLPNKACVANKNYNEWKEMKEENFIFSLYSRDLVIFKHKKGANAKTSLGDKIIVNEQPMYYIKAGISNAAITLESHDRSFEVVNLGIQSLEYIKKLQVDVLGNITEVKKEKRMRFPGMEGYYGVSESICV

SEQ ID NO: 18928 - protein, 1089 aa, unidentified
  REGION 1..1089: note = Cas Enzyme sequence
MKYAIGLDCGISSVGYAVMALDLKDEPCRIIKLNSRIFNAAENPKDGSSLALPRREARGGRRRTRRHRHRIERIKHLMLKSGLLNESELSTLFSGQLSDIYMLRTKALDEKVTNAEFARILINLAERRGFKSNRKSEAIDKETGRLLTAVSENEALMQKSGWRTVGEMLYKDEKFAKYKRNKGENYTNTVSRKMIENEAEQIFSAQRRLGNTFATEENEQLYLDILLSQRPFDVGPGEGNANSPSPYAGDQIFKMIGNCTLFPKEKRAAKATYSFQMFNIWQNINHITLSDESGNKTTLTDDERKKIYRLCRNTANVTYKRIRKELEIGREYTFNSISYGSKDAEEVESKAKFNYLNAYHDIRKALNKYEKNYIEKLTPDELDSIGTIFTVYKSDDKIIENLKKAGIDEALYDPLLDLKGFSKHGHISIKACKELLPYLQEGMTYDKACAAAGIDFKSHSRSEKGALLPANADELDDITNPVVRRSVSQTIKVINSIIREMGSSPVYINIELARDLSKSKSERNEIEAQNKTNRAENERVKERIINEFGIRYPTGQDIVKFKLWLEQDGICPYSQKPIKAEMLFSDGYVDIDHIIPYSISFDDSYNNKVLVFSAENRRKGNKLPLEYLSGKARDNFIVWVENNVKRFAKKRNLLKEKLSEADFSGFRERNLNDTRYLNRVLMNFITDHLEFAPYSEGRKRHVMSVNGRATDYMRKRWGIAKIRENGDLHHAADAAVIACVTQSNINKISLYSQQKETKYTEPGENGSAAFNINTGEVKDVFPLPYPEFRKELEYRLSDDPRHYLRMDPLGNYTSEEIEATKPAFVSRMVNRKVTGAAHEDTIRSGKEKGYKISKVPLSKLKLKNGEIENYYNPEDDRLLYEALKTRLEKFGGDGAKAFPAGFEFHKPKADGSDGPAVKKVKIKEKTSSWVNAQDGVADNGRMVRIDVFHVENDGYYFVPIYVADTVKPELPNLACVAGDKPWKPMDDRDFCFSLYANDLIKITAKKDMKLSLKFKESTLPKEKYGNEMLLYYVKAGINTASITVENHDGSYIISSLGIKTLNRIEKYTVDAIGNIHMVHHEKRMRFNKK

SEQ ID NO: 18929 - protein, 1087 aa, unidentified
  REGION 1..1087: note = Cas Enzyme sequence
MLRMKYAIGLDIGIASVGYAVLALDHEENPWGIIRLGSRIFDVAENPKDGASLALPRREARSVRRRLRRHHHRLERIKNLLINTELITKDELLHLYDGNLSDVYELRVKALDYSVTNAELTRILLHLAQRRGFKSNRKSDANDKEAGQLLEAVSANAKRMQENHYRTVGEMFYKDDLFSKYKRNKGGTYLTTVHRDMIAAEARTILEKQFALGNDICTQDFIDKYLSILLSQRQFDEGPGEPSPYAGNQIANMIGKCTFEPNEYRAAKASYSFERFNLLQKVNHLRLLLEGKSIGLDNEQRKKIIALAHEKADLRYSHIRKALGLDEKVLFNTITYNEAVTVIEKKTKFNFLPAYHQIKKALAEDMQKLTTEQLDNIGQILSTYKSDNKRTEELSVLGLEKKIIDALLGINGLSKFAHLSLKALRKINPYLEEGKIYNEACAAAGYNFKGHANTQKTELLPAYKEEMDDITSPVARRAIAQSIKVINAIIREQKCSPVYINIELAREMAKGFDERTQIDKTNKENQAKNERIMERIRTEFHKANPTGMDLIKLKLWEEQDGRSPYSQKAISINRLFEPGYVDIDHIVPYSISFDDSFKNKVLVFSEENRDKGNRLPIAYLQNKFGAKKAENFIIWVQSNIKDYKKRQKLLKREITEEDINKFKERNLQDTKTISRFLYNYINDYLLFAPSDTGKKKRVTAVNGTITAYLRKRWGINKIRANGDKHHAVDAVVIACTTDKMIKDLSSFSQYHELEYTRTDTESLLVNSLTGEILKRFPYPWEDFRPELMARLSDNPADALRKLNLIFYHGTDLSTIKPIFVSRMPRHKVTGAAHKATIKSARCLNNGIVICKTSLQNLKLDKEGEIANYYAPESDTILYNALKERLRAYDNKPAKAFAEPFYKPKADGTPGPLVKKVKVYEKSTLNVPVQQNTAVADNDSMVRVDVFHVKGDGYYLVPIYIADTLKKELPNKAIVAYKPYADWPVMDDSNFIFSLYPNDLIKFEHKNGVKFAKVNKDSSLSETFSTKSELVYYKGTNITVGSTAIITNDNSYTVKSLGIKTLSNLEKYQVDVLGNYTKVKKEVRKPFR

SEQ ID NO: 18930 - protein, 1079 aa, unidentified
  REGION 1..1079: note = Cas Enzyme sequence
MKYGIGLDCGINSVGYCIMELNSDDEPKRIVRLNSRIFTEAENPKDGSSLAAPRREARGLRRRIRRHKHRLERIRALLVRENIVTQAELDNMFSGTLSDIYELRTAALDAPLNNIEFARVLINLAQRRGFKSNRKSEKSSSDKETGKLLSAIKKNKESIEAGGYRTVGEMLFKDERYAKHKRNKGEAYLNTVSRDMIEAEIHAVFASQRNFGMPFANEKIENEYTDIALSQRPFDLGPGEGPENCKSPYAGKQIKNMIGQCTFFPEEKRAVKASYSFQLFSLLQGINNITLVSSDGNTFPLSQEQRKTLKDYCFKTANVTYASIRKVLQIPQEYTFKNITYTDDGIEKSEKKTKFQHLKPYHEMKKVLGSAIQTLTPEELDEIGEIFTFYKDETIIIKQLEETEIDKSLYDLLLQLPTFEKAGHISTKACKMIIPFLEEGKTYDKACECAGLNFKAHTNMQKQMLLPAKSDELNDVVNPVVRRAISQTIKVVNAIIREMGTSPTYINIELARELSKSKKERDEINKKHKINQAENEKLKDEISENGKEPNGQNIIKLKLWREQDGICPYTRTPIKYENLFDDGYAEIDHIIPYSLSFDNSFNNKILTTATQNRQKGNRIPLEYLPESEKDGFRVWVNSNIRNYRKRQNLLKEHFTEADKKEFKSRNLNDTRYLNKLLLNYINDNLLFTDFYNGKKKHVTSVNGAVTAYIRKRWSINKNREDGDLHHAVDAAVIACVTQGIINRITAYSARNEAPYDLNTETGEIKERFPLPYPNFKKELDARTTIEDEKRLKSVLMSFSNYSYDDVEKAKPCFVSRTPHRKVTGAAHEETIRSGKVEGFTVSKTELTKLKLTNGEIEGYYKTAHESDTLLYNALLQRLNEFGGDAKAAFADEFHKPKADGTPGPVVKKVKTIKRSSSNVKARNKNGLGVADNGSMIRIDVFYVENEGYYFVPIYVADTVKEMPNEACPFGKDKKKIMTDDDFLFSLYPNDLIKITAKKDMKFSLANKESGLPKNKYANEALVYFIKAGITTASITIETHDGAYSIPSCGIKSLVKLEKYTVDPLGNLSKVNREKRMYFK

SEQ ID NO: 18931 - protein, 1086 aa, unidentified
  REGION 1..1086: note = Cas Enzyme sequence
MIPYAIGFDIGITSVGWAVVALDSEDKPYGIINMGSRVFDAAEQPKTGASLAAPRREARCARRRLRRHQHRLERIRRLLLTENVISQAELDTLFAGKLEDIYTLRVKALDAPVSHTEFARILLHIAQRRGFRSNRKSETVKEDGELLAAVSKNRALMVEKGYRTVGEMLLQDPLYAASKRNKGGQYIATVGRDMVAEEVRAIFRAQRQLGQPFASEELESRYLDILLSQRSFDEGPGEGSPYAGSQIERMIGKCTLEDGEQRAAKATYSFEYFTLLQNINHLRLLRGGEGSPLTPAQREALIALAHKTKELNFSHIRRELAIPADTTFNAVYYKNADDAEEAEKKTKFSYLKAYHQMRTAFNKLSKNHFDTLTRAQKNELGRVLSTYKTSAKIRAALLPAGLSDAELDIAETLSFSKFGHISVKACDKLIPFLEKGMKYDEACAAAGYDFKAHSGRERTQLLHPTPDDLADITSPVVRRAVAQTVKVLNAIIRERGCSPTFINLELAREMAQDFTERNQAKKSMDDNRARNERLMERIRTEYGKEHPTGQDLVKLKLWEEQHGECAYSQKHISIEHLFEPDYAEVDHIIPYSISFDDGYKNKILVLAEENRNKGNRLPLQYLQGKRREDFIVWVENTIRSTPKKQRLLKEKLTSEDEKQFKERNLQDTKAMARFLLNYIGDHLAFADFAAGRKKHITAVNGAVTSYMRKRWGISKIRENGDLHHAVDALVIACTTDGMIQQVSRYAALRECEYVQTEGGSLAVSVHTGEVLKSFPYPWPEFRRELEARLGDDPRRAVISQRFPVYLNNDIPVRKLFVSRMPRRKVTGAAHKETIKSPKALQDGVVVTKRPLTSLKLDKNGEIANYYMPQSDRLLYEALKAQLMKYGGDGAKAFTQPFHKPKSDGTPGPIVNKVKLCEPTTLHVPVLKGTGVADNDSMVRIDVFYVEGEGYYFVPIYIADTLKKELPSKACVAFKPYEDWKAMSDENFIFSLYPNDLMRVTHKNKLKLTKAQKESTLPDTYETKQEMLYYISTNINTAAIACRTHDAAYEIKSMGIKTLEKLEKFTVDVLGEYHKVEREPRMAFNRK

SEQ ID NO: 18932 - protein, 1087 aa, unidentified
  REGION 1..1087: note = Cas Enzyme sequence
MIPYAIGFDIGITSVGWAVVALDSEDKPYGIINMGSRIFDAAEQPKTGASLAAPRREARSMRRRLRRHRHRLERIRHLLVIENVISQAELDTLFQGKLEDIYTLRVRALDTAVSNTDFARILLHIAQRRGFRSNRKSETAKEDGELLAAVSKNRALMVEKGYRTVGEMLLQDPLYAASKRNKGGQYIATVGRDMVAEEVRAIFRAQRQLGQPFASEELESRYLNILLSQRSFDEGPGEGSPYAGSQIERMIGKCTLEPEEPRAAKASYSFEYFTLLQNINHLRLIRGGESCPLSDAQRESLIALAHRTKDLNFSRIRKELDIPADTIFNAVSYKNADAYEEAEKKTKFCYLKAYHQMKAAFNKLSKDHFDSLTRQQKNELGRVLSTYRTSANIRPALAEAGLSEPEIDIAETMSFSKFGHISVKACDKLIPFLEKGLKYNDACAAAGYDFKAYGGEVRTHLLHPTEDDFSEITSPVVRRAISQTVKVLNAIIRERGCSPTFINIELAREMARDFAERSKMKKDMDENRARNEKIMERIRTEYGKENPTGQDLVKFKLWEEQHGECAYSQKHLSIEHLFDPDYAEVDHIIPYSISFDDGYKNKVLVLAEENRNKGNRLPLQYLQGKRREDFIVWVKNSIHDSRKTQRLLKESITSEDEKKFRERNLQDTKTMSRFLLNYISDHLEFSAFATGRKKHVTAVNGAITSYMRKRWGIAKIRENGDLHHAVDALVVACTTDGMIQQLSRYSALRECEYVQTETGSVAVSMHTGEVLKRCPYPWPEFRRELEARLGDDPCRAVISQRFPVYINGDIPVRKLFVSRMPRRKVTGAAHKETIKSPKALHEGIVVVKRALTDLKLDPKTGEIANYYMPQSDRLLYEALKEKLKKHGGDGAKAFAAPFHKPKSDGMPGPVVNKVKVCEPTTLNVPVLKGAGVADNDSMVRIDVFHVENDGYYFVPIYIADTLKAELPCKACVAYKPFEQWKEMSDENFIFSLYPNDLLRVTHKTKLKLTKAQKESTLPDTYETKQEMLYYIGADIHTAAISCRNHDNSYGIRGMGIKTLERLEKFTVDVLGEYHKVEKEPRMAFCRK

SEQ ID NO: 18933 - protein, 1048 aa, unidentified
  REGION 1..1048: note = Cas Enzyme sequence
MKRSPYMLRARAVHQRMESPYEVGRCLLHLAKFRGAGFLGQLEDAGEDGDTTKKDSQKSANLYRKLEVDLKESGQTVGEFLADRIRTASDTKGRIRRRKNFLDDGSVDFAIPRFLVKKEFDLIWAKQSPFFTQMTERLKAEVYEKIFKDNPHAPYAVGKCALDPDSGELRIPRMSRLADMRRIYEQVNNLRIRTSTAVLPLSQQMRDAVVEACMQGVTLKKSDLKRILKPFCDEAIVAINLADDEASIKGFCIARAFAGIPTWKDMAEEEQDAVLDFMAEPRLFPEDPRSPLMPEEEFLAECVRRLHMEDVEGAEEKVSRCLHELPDDRAMLGETASRRILEKLREGRIEIVDGKEVWYPLSNREAADACGYLAEEELARRIAGTFAKLPYYGEVLRHDVAPVHPWHEDKAAEEEARYGRFPNPVVHVALNQLRKVVNEVIDLYGKPVSIHVELAREFGMSAEKREELEREQKNREKENRKFDEKLREIGLPPSRWNRIKYRLWEEQGHQDIYTLKTIAASDLPSCQIDHIIPQSLGGSDSYANLVLTFASVNLAKGESSAYDFIQRHSPDAWPHILDRISDAKKYPKNKAWRFLEDAKERFLEGDEDQTDHRLTDTSYMAKMALRYLSCICPDVVPLRGGMTAKLRHLWGLDGLEYELMGLPTRSVLYDEATGEVQLDDWGRPARNPAWKAKPRIDQRHHAEDAIVLACASRGMMQRLAHDEKRGVRSVDFPVPFDKEAAGFRAEVFDFLNRVKPSPKAEHSLEGRLHESTRYRVLEEVPGTPGQYVCTYRRKLDAVKKLDDIKTGFGKYNTIPEVASIAEENRFKLSLVMRQYEDARRNLELRQQDSAKKKPVDERLILQEAFNLARREDSRMGFSYQDVLVLGLVNVDMESQSGYKPGGNYCVDFFEKQDGKVGWECIKLFDANQRGFLPDWKKAGHTHIWSLFKDDVLELQFTDEQKKELGLPPNAVSSWFRVQKFSENKLQVKMLQDARPLQDKDSGQICWVSGEKGLAFLTKAQARKVELSPFGKVVRKHRKLWDGKKKKKA

SEQ ID NO: 18934 - protein, 1135 aa, unidentified
  REGION 1..1135: note = Cas Enzyme sequence
MSKILGLDLGTNSIGWALIENTTILGMGSRVFPEGVINLGEGEGREISKNASRTDSRGKRRQFFRKRLRKRYLLKELAKHSLCPIPASLIRDWNGIEIFKNELLQEWLRRNPYELRAKAVSEKITLLELGRIFYHMIQRRGFLSNSRSAGSEVKESSTLFKGDTKIGKIGINETLQSIEKKKTLGSYLHSIFPKENEPFSGELERIRNRYTTRQMYIDEFEAIWEFQKNHHSELTNNLKTIIGGRKKDGYKEDGVLFHQRPLRSQKHLVGHCSFETKKTKCQLSAIPFEMFRVYQWVNTVSYDLNGERQKITPQEKEKIVALLLSKEKIKFKEIRQKINRLEAYYQFNYKDNEQIIGTHTISKLSNKKFFGKQWFNFSDTEQENIWHILSFFDDRDKLKEYAIKNWNFDEEKAIKISRFNLKEGYANLSRKAINNILPFLKLGFMYDIAVGLAGVKNVLGNSYKEHEQFVFDNVPEIVRSNLKGGYIEPLKQMMKNEFSCTEIQLKKLYHHSSSITTNEVLDRLPLGPEADKEIQKIKNPVVITALFEIRKLVNEIIDAYGKPNEIKVELARDLKASKKNRNDTRRKQQVLEKENDRVKGEIEKLGMRLNHTNILKYKLWEECNHTCPYTGKTITISQLFTSEIEIEHIFPWSRSLNDSFNNKTLCFTYENRAKENKTPYEFYSSQGDEKWEAIKLQALNCFKTKAKYPNCYTKFKHFVKKKHDEDFISRQLNDTRYISKEAKNYLSKICTKVLVAPGQMTATLRRHWGLNSILNKEDNTKTRDDHRHHAIDALVMACSTRSHLHELTKRNRYRKNHELKDFPDPWFNFRRDAEKAVEQILVSHKKTKNILTIRTRSTIKKGVKHRNIGVAARGQLHKESVYGKRKDVFTKELNYHIRKPLILLSAAEIPKIVDLEIKKIIYKAIEEIGLNIDDNRKPIVKTREDKKLFEQLLSKPFFLPNKNGNPVPIKKIRIQKKFSNAKPLKESKNQWVDLGKNHHVLIYKDFNGNLKEDVVTFWTAVNRKRKGKEVFQLPKDGKEMVTTLQKNELFLLGLKDDDIDWKNLNYNLLKKHLFKVQVLSSFFYEFRLSTDSTQNKDTKSKVFRRIQSFSDGKTGWKTHNPIKVKVNSIGKIEKI

SEQ ID NO: 18935 - protein, 1424 aa, unidentified
  REGION 1..1424: note = Cas Enzyme sequence
MHKIFGLDLGTNSIGWALRNPDLTDNQIEKFGVLTFNKGVGLGKTGEYSYAAERTRKRSTRRLYQSRKYRLWATLEILINEGFCPLSINNLNKWRKYNKDEAIKNNNGGRAYPVDDILFDQWIKLDFNGDGKPDYTSPYQLRKELAEKILDFNKEENKLKLGRALYHIAQRRGFKSSRKSADDARDIETKDDDTIADLQYSEKKKNKGIIEYFEKYPEAKTVGWLYALLEKDNIRIRQSIAQYAIRENYKDEIKYIFHFQQLRLLHPLFNKLVESGNNKNDGSIFYKRPLRSQKGLIGKCTLEPNKYRAPISHPAFELFRAWSFINNIKYKEYDNGYWQTLPLELKKAILQEKFFRKSKAYFPFAEIAEFISKKGYKWQLNYTLKTTVTGCPVSARLKDIFGDNYLQIKIEKTKAAKSEKAYYDLEDIWHILFSYEDQEYVESFAEQKLKLSPENVKQFVTAWNALPVGYGMLSLNAINKINRFLQKGLIYSEAVLLANLPEVIGENLWDGNEDFFIGHIAGIIEENRKQKTILNIVNNLVSQYKNLDKKFGYKNGDYILDDDDKKNIQQAIEETYGANKWNEKSEEEKSKTVNTVTNCYQAFFKTTGLTRKDINGERHFEVQSGNNIYYKSDSGYYQLPKLIDTLKEFLLTHFELTEKQLNNIYHPSEINIYPPAKPDKDGNTKLGSPKTGSFKNPMAMRTLHELRKLMNYMIETNQIDSDTRIVVEVARELNDANRRWAIEAWQRQREAENAEFALAIEELVKQKSVKASSQSNSDIDKMRLWYEQNGEEGIPPITDLKKEVKGVRWTDAKKDSYKQIAAQKSMIDKYRLWIEQECRCIYTGKIINITDLFNDNVIDFEHTIPRSISFDNSLANQTVCYADYNRTIKKNNIPYQLLDYDKIVERIDKWKEKVERIKQQIDFWKTKSKKASEKSWKDDAIRQRHLWQMELDYWKNKVDRFTMKEVTIGFKNSQKVDTQLISKYAFHYLKTYFEKVDVQKGSITAEFRKIYKLQTPDEKKDRSRHSHHAKDAAVLTLIPLAAKRDEILKTYYEYREQRKENYTIEPYKGFKREFVWNIDDSVFINNVSNNQSLTTAKRKIRKRGKEQYIPGTNKPMWATGDCIRGQLHQETFYGAIKPAKRDEKGNIIKDEKGEMMLEDKIRYVVRVPFQYKKDSNTPGFKTLDEILKQVVDFGLKQQIEKQVKDAGGLKEAFEKKMYLLDKNGKPHGNPIRHIRVWASVSEPLKIKKQTNLSKAEYKQHYYAGNTSNSYFAIYLGEGKKDFDFRNLLETAHALSTSNIKKPVELFSSHTTITKAKKETQVPLVYILESGMKVIFKKDEQEILQDIPEKELLKRLYVYTNFEKDGRLNLKYHLEARNKIEEKYSESEFDFINPKPTLRFSYAKYDFAVEGYDFILEMDGTIKWK

SEQ ID NO: 18936 - protein, 1225 aa, unidentified
  REGION 1..1225: note = Cas Enzyme sequence
MSKVLGLDLGTNSLGWAIVEKTEYGYSLLDKGVDIFQEGVAREKNNEKPAVQDRTDARALRRHYFRRRLRKIEVLKILIENDLCPRLSEELLTEWRKNKKYPLDEAFIRWQRTDDNIDKNPYHDRYRALTETLDLNKEDDRHALGRALYHLAQRRGFISNRKDAGKESEDGQVKQGIKNLTADMENAGCRYLGEYFHMLYLQKEKIRKKYTSRNEHYLAEFRAICAKQHLPEPLEQALYRAIFFQRPLKSQKGAVGKCTFEKRKSRCPVSHPHFEEFRMHSFINNIRIAAPEDNDFRPLTQAEAETIVPLFLRKSKPHFDFEEIARKIAGKGRYACKGDRNEAAYRFNYARIATVSGCPVTASLISVFGDEWLTEICRRYTLASGKSEQQILNDVWHALISFDDEERLRTWAREKLRLEEEQAATFAAIRMPQEYAALSLNAIEKMLPYLRAGYRYDEAVFIANLKAALPQTIYEDETHRHEIEQDIVRLLLDYKRNPYDKYDSKERRIEAYFSDNGLDVSRLHRLYHPSMIESYHVQRPDSNGLLQLGSPRTPSVRNPMAMRALFRLRILINRLLRDGKIDPATKINIEFSRGLNDANKRKAIEQYQREREAEHRRFADEIRKQYAAETGREIEPTETDILKYRLWEEQKHVCPYTGNQIRISDFIGSATDYDIEHTVPRSRGGDNSQMNNTLCENRFNREVKRAKLPSELSGHAEIMAHIEGFGWQEKIESLQKMVEAQVRKSKSAATKTEKDNAIQRRHYLQMQLAYWRGKIERFTMTEVPDGFSNRQGVDIGIIGRYARLYLKTVFERIYTVKGATTAEFRKMWGLQTEYAKKERVNHVHHCIDAITIACIGRSEYDHWARYVGDEERYLRNEGTRPQFEKPWPTFTEDVKAIADELLVSHHTPDNLPKQSRKRLRIRGKVQVDGQGKPIYMQGDTARGALHQQTFYGAIMRNDEIKHVVRKSLDQLQPADVEKIVDDAVKQKVKDAIECVGFKTAMNPAEHTIWMNREKAVPIRKVRIFTPSVTKPIHLKPQRDASAKAYKQDYLVTNDGNYCMAVYEGTDKRGKTRRSFEIVSNLEAAKYFKASADRTARPDLVPITDANGDPLKCLLKTGSMVLFYENSPEELHECTQKELAKRLYKVTGMSTLVLQQKYFYGTLTLKHHQEARPAGELKAKSGAWQSGEEYRPVISILHTQLNAYAEGYDFDMTVTGEIEFKHHPSC

SEQ ID NO: 18937 - protein, 1224 aa, unidentified
  REGION 1..1224: note = Cas Enzyme sequence
MTKILGLDLGTASIGWALVERNDTGYALLDQGVDIFQEGVAREKNSEKPAVQDRTAARALRRHYARRRLRKIDLLRVLVRHDLCPALTDEQLKDWKQKKIYPLTDKFIRWQRTDDRTDKNPYRDRYKALTETLDLDTQRDRYTLGRALYHLAQRRGFLSNRKDAGDESESGKVRQSIEGLTVDMEKAGCAYLGEYFYRLYARKEKIRTKYTSRNEHYLAEFRAICEKQRLADGLRKALHRAIFYQRPLKSQKGSVGRCTFEKDKSRCPASHPRFEEFRMLSFVNNIRITTPDDPEPRPLSRQETETILPLFTRKTKPHFDFEEIAKKLAGKGRYACQGDRGEAPYRFNFARTATVTGCPVTASLIALFGDDYLTKICDLYTLGAGKTREQILGDVWHALFSFDDEERLSAWAKQKLRLSDDEAGRFAAIRLPQDYAALSLHAINKILPYLREGYRYDEAVFVANLKAVLPSDIYSDESERSAIEADIAALITDFRRNPLNRGTTKEQCVRDYLRNCRGIDEKRLGRLYHPSMIEIYQTAQPDAQGILQLGSPRTPAVRNPMAMRALFRLRVLVNRLLRDGKIDRETKIHIEFARGLNDANRRKAIELYQRDREAERKAYADEIRRQYASESGREIEPTDDDILKYRLWKEQNHICPYTGKQIGLSDFMGDSARFDIEHTVPRARGGDNSQMNKTLCESRFNRELKRDKLPSELPNHADVMARIDELGWSKEIASLQKQIEMQRRKSKSATTKSEKDGAIQRRHVLQMQLDYWRGKYERFTMTEVPDGFSNRQGVDIGMIGKYARLYLKTVFERIHTVKGATTAEFRRMWGLQEEYARKERVNHTHHCLDAIVIACIGRNEYDRWAQYAGDEERYRRGEGAKPRFEKPWPTFTEDLEAVADRLLVAHHTPDNMPKQSRKRLRIRGRIRTGRNGETLYAQGDTARGALHQQTFYGAIERQGEVRYVVRKPLGQLQPSDVDNIVDDAVRQKVKEAIKAVGFKTAMDTESHPIWMNEQKRVPIRKVRIFAGKNISPKPLGGKKHRDLSALPHKRPVYVSYGSNYCMAIYEGKDNQGKLKRTFEIVSKLEAAQYFKASADKAARPDLVPQSDEKGFPLKCILKTGTMVLFYEETPEELYECTQQELAKRLYKLTKFSSMTTGNNSYGLCTFRHHREARPAGELKSKNGTWKVGEAYRPIINLLHTQLNAYVEGFDFELSVTGTVRFKHE

SEQ ID NO: 18938 - protein, 1224 aa, unidentified
  REGION 1..1224: note = Cas Enzyme sequence
MTKILGLDLGTASIGWALVERNDTEYALLDQGVDIFQEGVAREKNSEKPAVQDRTAARALRRHYARRRLRKIDLLRVLVRHDLCPALTDEQLKDWKQKKIYPLTDEFIRWQRTDDRTDKNPYRDRYKALTETLDLDTQRDRYTLGRALYHLAQRRGFLSNRKDAGDESESGKVRQSIEGLTVDMEKAGCAYLGEYFYRLYARKEKIRTKYTSRNEHYLAEFRAICEKQRLADDLRKALHRAIFYQRPLKSQKGSVGRCTFEKDKSRCPASHPRFEEFRMLSFVNNIRITTPDDPEPRPLSRQEAETILPLFTRKTKPHFDFEEIAKKLAGKGRYACQGDRGEAPYRFNFARTATVTGCPVTASLIALFGDDYLTKICDLYTLGAGKTREQILGDVWHALFSFDDEERLSAWAKQKLRLSDDEAGRFAAIRLPQDYAALSLHAINKILPYLREGYRYDEAVFVANLKAVLPPDIYSDESERNAIEADIAALITDFRRNPLNRGTTKEQCVRDYLRNCRGIDEKRLGRLYHPSMIEIYQTAQPDAQGVLQLGSPRTPAVRNPMAMRALFRLRGLVNRLLRDGKIDRETKIHIEFARGLNDANRRKAIELYQRDREAERKAYADEIRRQYASESGREIEPTDDDILKYRLWKEQNHICPYTGKRIGLSDFMGDSARFDIEHTVPRARGGDNSQMNKTLCENRFNRELKRDKLPSELPNHADVMARIDELGWPKEIASLQKQIEIQRRKSKSATTKSEKDGAIQRRHVLQMRLDYWRGKYERFTMTEVPDGFSNRQGVDIGIIGKYARLYLKTVFERIYTVKGATTAEFRRMWGLQEEYARKERVNHTHHCLDAIVIACIGRNEYDRWAQYAGDEERYRRGEGAKPRFEKPWPTFTEDLEAVAGRLLVAHHTPDNMPKQSRKRLRIRGRIRTGRNGETLYAQGDTARGALHQQTFYGAIERQGEVRYVVRKPLGQLQPSDVDKIVDDAVRQKVKEAIDAVGFKTAMDTESHPIWMNERKRIPIRKVRIFAGKNLSPKPLGEKRHRDLSALPHKRPVYVSYGSNYCMAVYEGKDNQGKLKRTFEIVSTLEAAQYFKASADKAARPDLVPQSDANGFPLKCILKTGTMVLFYEKTPEELHDCTQQELAKRLYKLTKFSSMTKGNRSYGLCTFRHHQEARPAGELDSKGTAWKAGEAYRPIISLYHTQLNAYVEGFDFELSVTGTVQFKHG

SEQ ID NO: 18939 - protein, 1224 aa, unidentified
  REGION 1..1224: note = Cas Enzyme sequence
MTKILGLDLGTASIGWALVERNDTEYALLDQGVDIFQEGVAREKNSEKPAVQDRTAARALRRHYARRRLRKIDLLRVLVRHDLCPALTDEQLKDWKQKKIYPLTDEFIRWQRTDDRTDKNPYRDRYKALTETLDLDTQRDRYTLGRALYHLAQRRGFLSNRKDAGDESESGKVRQSIEGLTADMEKAGCSYLGEYFYRLYARKEKIRTKYTSRNEHYLAEFRAICEQQRLADDLRKALHRAIFYQRPLKSQKGSVGRCTFEKDKSRCPASHPRFEEFRMLSFVNNIRITTPDDPEPRPLSRQEAETILPLFTRKTKPHFDFEEIAKKLAGKGRYACQGDRGEAPYRFNFARTATVTGCPVTASLIALFGDDYLTKICDLYTLGAGKTREQILGDVWHALFSFDDEERLSAWAKQKLRLSDDEAGRFAAIRLPQDYAALSLHAINEILPYLREGYRYDEAVFVANLKAVLPPDIYSDESERNAIEADIAALITDFRQNPLNRGTTKEQCVRDYLRNCRGIDEKRLGRLYHPSMIEIYQTAQPDAQGILQLGSPRTPAVRNPMAMRALFRLRVLVNRLLRDGKIDRETKIHIEFARGLNDANRRKAIELYQRDREAERKAYADEIRRQYASESGREIEPTDDDILKYRLWKEQNHICPYTGKRIGLSDFMGDSARFDIEHTVPRARGGDNSQMNKTLCENRFNRELKRDKLPSELPNHADVMARIDELGWPKEIASLQKQIEIQRRKSKSATTKSEKDGAIQRRHILQMRLDYWRGKYERFTMTEVPDGFSNRQGVDIGIIGKYARLYLKTVFERIYTVKGATTAEFRRMWGLQEEYAQKERVNHTHHCLDAIVIACIGRNEYDRWAQYAGDEERYRRGEGAKPRFEKPWPTFTEDLEAVADRLLVAHHTPDNMPKQSRKRLRIRGRIRTGRNGETLYAQGDTARGALHQQTFYGAIERQGEVRYVVRKPLGQLQPSDVDNIVDDAVRQKVKEAIDAVGFKTAMDTESHPIWMNEQKRVPIRKVRIFAGKNISPKSLGGKKHRDLSALPHKRPVYVSYGSNYCMAVYEGEDKRGKLKRTFEIVSTLEAAQYFKASADKAARPDLVPQSDANGFPLKCILKTGTMVLFYEETPEELYDCTQQELAKRLYKLTKFSSMTTGNNSYGLCTFRHHREARPAGELKPKGGAWKAGEAYRPLISLYHTQLNAYVEGFDFELSVTGTVRFKHE

SEQ ID NO: 18940 - protein, 1224 aa, unidentified
  REGION 1..1224: note = Cas Enzyme sequence
MTKILGLDLGTASIGWALVERNDTEYALLDQGVDIFQEGVAREKNSEKPAVQDRTAARALRRHYARRRLRKIDLLRVLVRHDLCPALTDEQLKDWKQKKIYPLTDEFIRWQRTDDRTDKNPYRDRYKALTETLDLDTQRDRYTLGRALYHLAQRRGFLSNRKDAGDESESGKVRQSIEGLTADMEKAGCSYLGEYFYRLYARKEKIRTKYTSRNEHYLAEFRAICEKQRLADDLRKALHRAIFYQRPLKSQKGSVGRCTFEKDKSRCPASHPRFEEFRMLSFVNNIRITTPDDPEPRPLSRQEAETILPLFTRKTKPHFDFEEIAKKLAGKGRYACQGDRGEAPYRFNFARTATVTGCPVTASLIALFGDDYLTKICDLYTLGAGKTREQILGDVWHALFSFDDEERLSAWAKQKLRLSDDEAGRFAAIRLPQDYAALSLHAINKILPYLREGYRYDEAVFVANLKAVLPPDIYSDESERNAIEADIAALITDFRRNPLNRGTTKEQCVRDYLRNCRGIDEKRLGRLYHPSMIEIYQTAQPDAQGVLQLGSPRTPAVRNPMAMRALFRLRVLVNRLLRDGKIDRETKIHIEFARGLNDANRRKAIELYQRDREAERKAYADEIRRQYASESGREIEPTDDDILKYRLWKEQNHICPYTGKQIGLSDFMGDSARFDIEHTVPRARGGDNSQMNKTLCENRFNRELKRDKLPSELPNHADVMARIDELGWPKEIASLQKQIEIQRRKSKSATTKSEKDGAIQRRHILQMRLDYWRGKYERFTMTEVPDGFSNRQGVDIGIIGKYARLYLKTVFERIYTVKGATTAEFRRMWGLQEEYAQKERVNHTHHCLDAIVIACIGRNEYDRWAQYAGDEERYRRGEGAKPRFEKPWPTFTEDLEAVAGRLLVAHHTPDNMPKQSRKRLRIRGRIRTGRNGETLYAQGDTARGALHQQTFYGAIERQGEVRYVVRKPLGQLQPSDVDKIVDDAVRQKVKEAIDAVGFKTAMDTESHPIWMNERKRIPIRKVRIFAGKNLSPKPLGEKRHRDLSALPHKRPVYVSYGSNYCMAVYEGKDNQGKLKRTFEIVSTLEAAQYFKASADKAARPDLVPQSDANGFPLKCILKTGTMVLFYEKTPEELHDCTQQELAKRLYKLTKFSSMTKGNRSYGLCTFRHHQEARPAGELDSKGTAWKAGEAYRPIISLYHTQLNAYVEGFDFELSVTGTVQFKHG

SEQ ID NO: 18941 - protein, 1224 aa, unidentified
  REGION 1..1224: note = Cas Enzyme sequence
MTKILGLDLGTASIGWALVERNDTEYALLDQGVDIFQEGVAREKNSEKPAVQDRTAARALRRHYARRRLRKIDLLRVLVRHDLCPALTDEQLKDWKQKKIYPLTDEFIRWQRTDDRTDKNPYRDRYKALTETLDLDTQRDRYTLGRALYHLAQRRGFLSNRKDAGDESESGKVRQNIEDLTVDMEKAGCAYLGEYFYRLYARKEKIRTKYTSRNEHYLAEFRAICEKQRLADDLRKALHRAIFYQRPLKSQKGSVGRCTFEKDKSRCPASHPRFEEFRMLSFVNNIRITTPDDPEPRPLSRQETETILPLFTRKTKPHFDFEEIAKKLAGKGRYACQGDRGEAPYRFNFARTATVTGCPVTASLIALFGDDYLTKICDLYTLGAGKTREQILGDVWHALFSFDDEERLSAWAKQKLRLSDDEAGRFAAIRLPQDYAALSLHAINKILPYLREGYRYDEAVFVANLKAVLPSDIYSDESERSAIEADIAALITDFRRNPLNRGTTKEQCVRDYLRNCRGIDEKRLGRLYHPSMIEIYQTAQPDAQGILQLGSPRTPAVRNPMAMRALFRLRVLVNRLLRDGKIDRETKIHIEFARGLNDANRRKAIELYQRDREAERKAYADEIRRQYASESGREIEPTDDDILKYRLWKEQNHICPYTGKQIGLSDFMGDSARFDIEHTVPRARGGDNSQMNKTLCESRFNRELKRDKLPSELPNHADVMARIDEFGWPEKIAGLQKQIEMQRRKSKSATTKSEKDGAIQRRHVLQMQLDYWRGKYERFTMTEVPDGFSNRQGVDIGMIGKYARLYLKTVFERIHTVKGATTAEFRRMWGLQEEYARKERVNHTHHCLDAIVIACIGRNEYDRWAQYAGDEERYRRGEGAKPRFEKPWPTFTEDLEAVADRLLVAHHTPDNMPKQSRKRLRIRGRIRTGRNGETLYAQGDTARGALHQQTFYGAIERQGEVRYVVRKPLGQLQPSDVDKIVDDAVRQKVKEAIDAVGFKTAMDTESHPIWMNERKRIPIRKVRIFAGKNLSPKPLGEKRHRDLSALPHKRPVYVSYGSNYCMAVYEGKDNQGKLKRTFEIVSTLEAAQYFKASADKAARPDLVPQSDANGFPLKCILKTGTMVLFYEKTPEELHDCTQQELAKRLYKLTKFSSMTKGNRSYGLCTFRHHQEARPAGELDSKGTAWKAGEAYRPIISLYHTQLNAYVEGFDFELSVTGTVQFKHG

SEQ ID NO: 18942 - protein, 1224 aa, unidentified
  REGION 1..1224: note = Cas Enzyme sequence
MTKILGLDLGTASIGWALVERNDTGYALLDQGVDIFQEGVAREKNSEKPAVQDRTAARALRRHYARRRLRKIDLLRVLVRHDLCPALTDEQLKDWKQKKIYPLTDEFIRWQRTDDRTDKNPYRDRYKALTETLDLDTQRDRYTLGRALYHLAQRRGFLSNRKDAGDESESGKVRQSIEGLTVDMEKAGCAYLGEYFYRLYARKEKIRTKYTSRNEHYLAEFRAICEKQRLADDLRKALHRAIFYQRPLKSQKGSVGRCTFEKDKSRCPASHPRFEEFRMLSFVNNIRITTPDDPEPRPLSRQETETILPLFRRRTKSHFDFEEIAKKLAGKGRYACQGDRGEAPYRFNFARTATVTGCPVTASLIALFGDDYLTKICDLYTLGAGKTREQILGDVWHALFSFDDEERLSAWAKQKLRLSDDEAGRFAAIRLPQDYAALSLHAINKILPYLREGYRYDEAVFVANLKAVLPPDIYSDESERSAIEADIAALITDFRQNPLNRGTTKEQCVRDYLRNCRGIDEKRLGRLYHPSMIEIYQTAQPDAQGVLQLGSPRTPAVRNPMAMRALFRLRVLVNRLLRDGKIDRETKIHIEFARGLNDANRRKAIELYQRDREAERKAYADEIRRQYASESGREIEPTDDDILKYRLWKEQNHICPYTGKQIGLSDFMGDSARFDIEHTVPRARGGDNSQMNKTLCESRFNRELKRDKLPSELPNHADVMARIEELGWPEKIAGLQKQIEIQRRKSKSATTKSEKDGAIQRRHVLQMQLDYWRGKYERFTMTEVPDGFSNRQGVDIGIIGKYARLYLKTVFERIYTVKGATTAEFRRMWGLQEEYARKERVNHTHHCLDAIVIACIGRNEYDRWAQYAGDEERYRRGEGAKPRFEKPWPTFTEDLEAVADRLLVAHHTPDNMPKQSRKRLRIRGRIRTGRNGETLYAQGDTARGALHQQTFYGAIERQGEVRYVVRKPLGQLQPSDVDNIVDDAVRQKVKEAIKAVGFKTAMDTESHPIWMNEQKRVPIRKVRIFAGKNISPKPLGGKKHRDLSALPHKRPVYVSYGSNYCMAIYEGKDNQGKLKRTFEIVSKLEAAQYFKASADKAARPDLVPQSDEKGFPLKCILKTGTMVLFYEETPEELYECTQQELAKRLYKLTKFSSMTTGNNSYGLCTFRHHREARPAGELKSKNGTWKVGEAYRPIINLLHTQLNAYVEGFDFELSVTGTVRFKHE

SEQ ID NO: 18943 - protein, 947 aa, unidentified
  REGION 1..947: note = Cas Enzyme sequence
RMLSFVNNIRITTPDDPEPRPLSRQETETILPLFTRKTKPHFDFEEIAKKLAGKGRYACQGDRGEAPYRFNFARTATVTGCPVTASLIALFGDDYLTKICDLYTLGAGKTREQILGDVWHALFSFDDEERLSAWAKQKLRLSDDEAGRFAAIRLPQDYAALSLHAINKILPYLREGYRYDEAVFVANLKAVLPSDIYSDESERSAIEADIAALITDFRRNPLNRGTTKEQCVRDYLRNCRGIDEKRLGRLYHPSMIEIYQTAQPDAQGILQLGSPRTPAVRNPMAMRALFRLRVLVNRLLRDGKIDRETKIHIEFARGLNDANRRKAIELYQRDREAERKAYADEIRRQYASESGREIEPTDDDILKYRLWKEQNHICPYTGKQIGLSDFMGDSARFDIEHTVPRARGGDNSQMNKTLCESRFNRELKRDKLPSELPNHADVMARIDELGWPKEIASLQKQIEIQRRKSKSATTKSEKDGAIQRRHILQMRLDYWRGKYERFTMTEVPDGFSNRQGVDIGIIGKYARLYLKTVFERIYTVKGATTAEFRRMWGLQEEYARKERVNHTHHCLDAIVIACIGRNEYDRWAQYAGDEERYRRGEGAKPRFEKPWPTFTEDLEAVADRLLIAHHTPDNMPKQSRKRLRIRGRIRTGKNGETLYAQGDTARGALHQQTFYGAIERKGEVKYVVRKPLGQLQPSDVDNIVDDAVRQKVKEAIDAVGFKTAMDTESHPIWMNEQKRVPIRKVRIFAGKNISPKPLGGKKHRDLSALPHKRPVYVSYGSNYCMAIYKGKDNQGKLKRTFEIVSTLEAAQYFKASADKAARPDLVPQSDANGFPLKCILKTGTMVLFYEETPEELYECTQQELAKRLYKLTKFSSMTTGNNSYGLCTFRHHQEARPAGELKPKGGAWKAGEAYRPLISLYHTQLNAYVEGFDFELSVTGTVRFKHE

SEQ ID NO: 18944 - protein, 1228 aa, unidentified
  REGION 1..1228: note = Cas Enzyme sequence
MDANMTKILGLDLGTASIGWALVERNDTGYALLDQGVDIFQEGVAREKNSEKPAVQDRTAARALRRHYARRRLRKIDLLRVLVRHDLCPALTDEQLKDWKQKKIYPLTDEFIRWQRTDDRTDKNPYRDRYKALTETLDLDTQRDRYTLGRALYHLAQRRGFLSNRKDAGDESESGKVRQSIEGLTVDMEKAGCSYLGEYFYRLYARKEKIRTKYTSRNEHYLAEFRAICEKQRLADDLRKALHRAIFYQRPLKSQKGSVGRCTFEKDKSRCPASHPRFEEFRMLSFVNNIRITTPDDPEPRPLSRQETETILPLFTRKTKPHFDFEEIAKKLAGKGRYACQGDRGEAPYRFNFARTATVTGCPVTASLIALFGDDYLTKICDLYTLGAGKTREQILGDVWHALFSFDDEERLSAWAKQKLRLSDDEAGRFAAIRLPQDYAALSLHAINKILPYLREGYRYDEAVFVANLKAVLPSDIYSDESERSAIEADIAALITDFRRNPLNRGTTKEQCVRDYLRNCRGIDEKRLGRLYHPSMIEIYQTAQPDAQGILQLGSPRTPAVRNPMAMRALFRLRVLVNRLLRDGKIDRETKIHIEFARGLNDANRRKAIELYQRDREAERKAYADEIRRQYASESGREIEPTDDDILKYRLWKEQNHICPYTGKQIGLSDFMGDSARFDIEHTVPRARGGDNSQMNKTLCESRFNRELKRDKLPSELPNHADVMARIDELGWPKEIASLQKQIEIQRRKSKSATTKSEKDGAIQRRHILQMRLDYWRGKYERFTMTEVPDGFSNRQGVDIGIIGKYARLYLKTVFERIYTVKGATTAEFRRMWGLQEEYARKERVNHTHHCLDAIVIACIGRNEYDRWAQYAGDEERYRRGEGAKPRFEKPWPTFTEDLEAVADRLLIAHHTPDNMPKQSRKRLRIRGRIRTGKNGETLYAQGDTARGALHQQTFYGAIERKGEVKYVVRKPLGQLQPSDVDNIVDDAVRQKVKEAIDAVGFKTAMDTESHPIWMNEQKRVPIRKVRIFAGKNISPKPLGGKKHRDLSALPHKRPVYVSYGSNYCMAIYKGKDNQGKLKRTFEIVSTLEAAQYFKASADKAARPDLVPQSDANGFPLKCILKTGTMVLFYEETPEELYECTQQELAKRLYKLTKFSSMTTGNNSYGLCTFRHHQEARPAGELKPKGGAWKAGEAYRPLISLYHTQLNAYVEGFDFELSVTGTVRFKHE

SEQ ID NO: 18945 - protein, 1224 aa, unidentified
  REGION 1..1224: note = Cas Enzyme sequence
MTKILGLDLGTASIGWALVERNDTEYALLDQGVDIFQEGVAREKNSEKPAVQDRTAARALRRHYARRRLRKIDLLRVLVRHDLCPALTDEQLKDWKQKKIYPLTDEFIRWQRTDDRTDKNPYRDRYKALTETLDLDTQRDRYTLGRALYHLAQRRGFLSNRKDAGDESESGKVRQSIEGLTADMEKAGCSYLGEYFYRLYARKEKIRTKYTSRNEHYLAEFRAICEKQRLADDLRKALHRAIFYQRPLKSQKGSVGRCTFEKDKSRCPASHPRFEEFRMLSFVNNIRITTPDDPEPRPLSRQEAETILPLFTRKTKPHFDFEEIAKKLAGKGRYACQGDRGEAPYRFNFARTATVTGCPVTASLIALFGDDYLTKICDLYTLGAGKTREQILGDVWHALFSFDDEERLSAWAKQKLRLSDDEAGRFAAIRLPQDYAALSLHAINKILPYLREGYRYDEAVFVANLKAVLPPDIYSDESERNAIEADIAALITDFRQNPLNRGTTKEQCVRDYLRNCRGIDEKRLGRLYHPSMIEIYQTAQPDAQGILQLGSPRTPAVRNPMAMRALFRLRVLVNRLLRDGKIDRETKIHIEFARGLNDANRRKAIELYQRDREAERKAYADEIRRQYASESGREIEPTDDDILKYRLWKEQNHICPYTGKRIGLSDFMGDSARFDIEHTVPRARGGDNSQMNKTLCENRFNRELKRDKLPSELPNHADVMARIDELGWPKEIASLQKQIEIQRRKSKSATTKSEKDGAIQRRHVLQMRLDYWRGKYERFTMTEVPDGFSNRQGVDIGIIGKYARLYLKTVFERIYTVKGTTTAEFRRMWGLQEEYARKERVNHTHHCLDAIVIACIGRNEYDRWAQYAGDEERYRRGEGAKPRFEKPWPTFTEDLEAVADRLLVAHHTPDNMPKQSRKRLRIRGRIRTGRNGETLYAQGDTARGALHQQTFYGAIERQGEVRYVVRKPLGQLQPSDVDNIVDDAVRQKVKEAIDAVGFKTAMDTESHPIWMNEQKRVPIRKVRIFVGKNISPKPLGGKKHRDLSALPHKRPVYVSYGSNYCMAIYEGKDNQGKLKRTFEIVSTLEAAQYFKASADKAARPDLVPQSDEKGFPLKCILKTGTMVLFYEETPEELYDCTQQELAKRLYKLTKFSSMTTGNNSYGLCTFRHHREARPAGELKPKGGAWKAGEAYRPLISLYHTQLNAYVEGFDFELSVTGTVRFKHE

SEQ ID NO: 18946 - protein, 1228 aa, unidentified
  REGION 1..1228: note = Cas Enzyme sequence
MDADMTKILGLDLGTASIGWALVERNDTGYALLDQGVDIFQEGVAREKNSEKPAVQDRTAARALRRHYARRRLRKIDLLRVLVRHDLCPALTDEQLKDWKQKKIYPLTDEFIRWQRTDDRTDKNPYRDRYKALTETLDLDTQRDRYTLGRALYHLAQRRGFLSNRKDAGDESESGKVRQNIEDLTVDMEKAGCAYLGEYFYRLYARKEKIRTKYTSRNEHYLAEFRAICEKQRLADDLRKALHRAIFYQRPLKSQKGSVGRCTFEKGKSRCPVSHPRFEEFRMLSFVNNIRITTPDDPEPRPLSRQETETILPLFRRRTKSHFDFEEIAKKLAGKGRYACQGDRSEAPYRFNFARTATVTGCPVTASLIALFGDDYLTKICDLYTLGVGKTREQILGDVWHALFSFDDEERLSAWAKQKLRLSDDEAGRFAAIRLPQDYAALSLHAINKILPYLREGYRYDEAVFVANLKAVLPPDIYSDESERNAIEADIAALITDFRRNPLNRGTTKEQCVRDYLRNCRGIDEKRLGRLYHPSMIEIYQTAQPDAQGVLQLGSPRTPAVRNPMAMRALFRLRVLVNRLLRDGKIDRETKIHIEFARGLNDANRRKAIELYQRDREAERKAYADEIRRQYASESGREIEPTDDDILKYRLWKEQNHICPYTGKRIGLSDFMGDSARFDIEHTVPRARGGDNSQMNKTLCENRFNRELKRDKLPSELPNHADVMARIDELGWPKEIASLQKQIEIQRRKSKSATTKSEKDGAIQRRHILQMRLDYWRGKYERFTMTEVPDGFSNRQGVDIGIIGKYARLYLKTVFERIYTVKGATTAEFRRMWGLQEEYARKERVNHTHHCLDAIVIACIGRNEYDRWAQYAGDEERYRRGEGAKPRFEKPWPTFTEDLEAVADRLLVAHHTPDNMPKQSRKRLRIRGRIRTGRNGETLYAQGDTARGALHQQTFYGAIERQGEVRYVVRKPLGQLQPSDVDNIVDDAVRQKVKEAIDAVGFKTAMDTESHPIWMNEQKRVPIRKVRIFAGKNISPKPLGGKKHRDLSALPHKRPVYVSYGSNYCMAIYEGKDNQGKLKRTFEIVSTLEAAQYFKTSADKAARPDLVPQSDEKGFPLKCILKTGTMVLFYEETPEELYECTQQELAKRLYKLTKFSSMTTGNNSYGLCTFRHHREARPAGELKSKNGTWKVGEAYRPIINLLHTQLNAYVEGFDFELSVTGTVRFKHE

SEQ ID NO: 18947 - protein, 1228 aa, unidentified
  REGION 1..1228: note = Cas Enzyme sequence
MDANMTKILGLDLGTASIGWALVERNDTGYALLDQGVDIFQEGVAREKNSEKPAVQDRTAARALRRHYARRRLRKIDLLRVLVRHDLCPALTDEQLKDWKQKKIYPLTDEFIRWQRTDDRTDKNPYRDRYKALTETLDLDTQRDRYTLGRALYHLAQRRGFLSNRKDAGDESESGKVRQSIEGLTADMEKAGCSYLGEYFYRLYARKEKIRTKYTSRNEHYLAEFRAICEKQRLADDLRKALHRAIFYQRPLKSQKGSVGRCTFEKDKSRCPASHPRFEEFRMLSFVNNIRITTPDDPEPRPLSRQETETILPLFTRKTKPHFDFEEIAKKLAGKGRYACQGDRGEAPYRFNFARTATVTGCPVTASLIALFGDDYLTKICDLYTLGAGKTREQILGDVWHALFSFDDEERLSAWAKQKLRLSDDEAGRFAAIRLPQDYAALSLHAINKILPYLREGYRYDEAVFVANLKAVLPPDIYSDESERNAIEADIAALITDFRRNPLNRGTTKEQCVRDYLRNCRGIDEKRLGRLYHPSMIEIYQTAQPDAQGVLQLGSPRTPAVRNPMAMRALFRLRVLVNRLLRDGKIDRETKIHIEFARGLNDANRRKAIELYQRDREAERKAYADEIRRQYASESGREIEPTDDDILKYRLWKEQNHICPYTGKRIGLSDFMGDSARFDIEHTVPRARGGDNSQMNKTLCENRFNRELKRDKLPSELPNHADVMARIDELGWPKEIASLQKQIEIQRRKSKSATTKSEKDGAIQRRHILQMRLDYWRGKYERFTMTEVPDGFSNRQGVDIGIIGKYARLYLKTVFERIYTVKGATTAEFRRMWGLQEEYARKERVNHTHHCLDAIVIACIGRNEYDRWAQYAGDEERYRRGEGAKPRFEKPWPTFTEDLEAVADRLLVAHHTPDNMPKQSRKRLRIRGRIRTGRNGETLYAQGDTARGALHQQTFYGAIERQGEVRYVVRKPLGQLQPSDVDNIVDDAVRQKVKEAIDAVGFKTAMDTESHPIWMNEQKRVPIRKVRIFAGKNISPKPLGGKKHRDLSALPHKRPVYVSYGSNYCMAIYEGKDNQGKLKRTFEIVSTLEAAQYFKTSADKAARPDLVPQSDEKGFPLKCILKTGTMVLFYEETPEELYECTQQELAKRLYKLTKFSSMTTGNNSYGLCTFRHHREARPAGELKSKNGTWKVGEAYRPIINLLHTQLNAYVEGFDFELSVTGTVRFKHE

SEQ ID NO: 18948 - protein, 1228 aa, unidentified
  REGION 1..1228: note = Cas Enzyme sequence
MDANMTKILGLDLGTASIGWALVERNDTGYALLDQGVDIFQEGVAREKNSEKPAVQDRTAARALRRHYARRRLRKIDLLRVLVRHDLCPALTDEQLKDWKQKKIYPLTDEFIRWQRTDDRTDKNPYRDRYKALTETLDLDTQRDRYTLGRALYHLAQRRGFLSNRKDAGDESESGKVRQNIEDLTVDMEKAGCAYLGEYFYRLYARKEKIRTKYTSRNEHYLAEFRAICEKQRLADDLRKALHRAIFYQRPLKSQKGSVGRCTFEKDKSRCPASHPRFEEFRMLSFVNNIRITTPDDPEPRPLSRQETETILPLFTRKTKPHFDFEEIAKKLAGKGRYACQGDRGEAPYRFNFARTATVTGCPVTASLIALFGDDYLTKICDLYTLGAGKTREQILGDVWHALFSFDDEERLSAWAKQKLRLSDDEAGRFAAIRLPQDYAALSLHAINKILPYLREGYRYDEAVFVANLKAVLPSDIYSDESERSAIEADIAALITDFRRNPLNRGTTKEQCVRDYLRNCRGIDEKRLGRLYHPSMIEIYQTAQPDAQGILQLGSPRTPAVRNPMAMRALFRLRVLVNRLLRDGKIDRETKIHIEFARGLNDANRRKAIELYQRDREAERKAYADEIRRQYASESGREIEPTDDDILKYRLWKEQNHICPYTGKQIGLSDFMGDSARFDIEHTVPRARGGDNSQMNKTLCESRFNRELKRDKLPSELPNHADVMARIDEFGWPEKIAGLQKQIEMQRRKSKSATTKSEKDGAIQRRHVLQMQLDYWRGKYERFTMTEVPDGFSNRQGVDIGMIGKYARLYLKTVFERIYTVKGATTAEFRRMWGLQEEYARKERVNHTHHCLDAIVIACIGRNEYDRWAQYAGDEERYRRGEGAKPRFEKPWPTFTEDLEAVAGRLLVAHHTPDNMPKQSRKRLRIRGRIRTGRNGETLYAQGDTARGALHQQTFYGAIERQGEVRYVVRKPLGQLQPADVDKIVDDAVRQKVKEAIDAVGFKTAMDTESHPIWMNEQKRVPIRKVRIFAGKNISPKPLGEKKHRDLSVHPHKRPVYVSYGSNYCMAVYEGKDKRGKLKRTFEIVSTLEAAQYFKASADKAARPDLVPQSDEKGFPLKCILKTGTMVLFYEETPEELYECTQQELAKRLYKLTKFSSMTTGNNSYGLCTFRHHREARPAGELKSKNGTWKVGEAYRPIINLLHTQLNAYVEGFDFELSVTGTVRFKHE

SEQ ID NO: 18949 - protein, 1228 aa, unidentified
  REGION 1..1228: note = Cas Enzyme sequence
MDADMTKILGLDLGTASIGWALVERNDTGYALLDQGVDIFQEGVAREKNSEKPAVQDRTAARALRRHYARRRLRKIDLLRVLVRHDLCPALTDEQLKDWKQKKIYPLTDEFIRWQRTDDRTDKNPYRDRYKALTETLDLDTQRDRYTLGRALYHLAQRRGFLSNRKDAGDESESGKVRQNIEDLTVDMEKAGCAYLGEYFYRLYARKEKIRTKYTSRNEHYLAEFRAICEKQRLADDLRKALHRAIFYQRPLKSQKGSVGRCTFEKGKSRCPVSHPRFEEFRMLSFVNNIRITTPDDPEPRPLSRQETETILPLFRRRTKSHFDFEEIAKKLAGKGRYACQGDRSEAPYRFNFARTATVTGCPVTASLIALFGDDYLTKICDLYTLGVGKTREQILGDVWHALFSFDDEERLSAWAKQKLRLSDDEAGRFAAIRLPQDYAALSLHAINKILPYLREGYRYDEAVFVANLKAVLPPDIYSDESERSAIEADIAALITDFRRNPLNRGTTKEQCVRDYLRNCRGIDEKRLGRLYHPSMIEIYQTAQPDAQGILQLGSPRTPAVRNPMAMRALFRLRVLVNRLLRDGKIDRETKIHIEFARGLNDANRRKAIELYQRDREAERKAYADEIRRQYASESGREIEPTDDDILKYRLWKEQNHICPYTGKRIGLSDFMGDSARFDIEHTVPRARGGDNSQMNKTLCENRFNRELKRDKLPSELPNHADVMARIDELGWPKEIASLQKQIEIQRRKSKSATTKSEKDGAIQRRHVLQMQLDYWRGKYERFTMTEVPDGFSNRQGVDIGIIGKYARLYLKTVFERIYTVKGATTAEFRRMWGLQEEYARKERVNHTHHCLDAIVIACIGRNEYDRWAQYAGDEERYRRGEGAKPRFEKPWPTFTEDLEAVADRLLVAHHTPDNMPKQSRKRLRIRGRIRTGRNGETLYAQGDTARGALHQQTFYGAIERQGEVRYVVRKPLGQLQPSDVDNIVDDAVRQKVKEAIKAVGFKTAMDTESHPIWMNEQKRVPIRKVRIFAGKNISPKPLGGKKHRDLSALPHKRPVYVSYGSNYCMAIYEGKDNQGKLKRTFEIVSKLEAAQYFKASADKAARPDLVPQSDEKGFPLKCILKTGTMVLFYEETPEELYECTQQELAKRLYKLTKFSSMTTGNNSYGLCTFRHHREARPAGELKSKNGTWKVGEAYRPIINLLHTQLNAYVEGFDFELSVTGTVRFKHE

SEQ ID NO: 18950 - protein, 1224 aa, unidentified
  REGION 1..1224: note = Cas Enzyme sequence
MTKILGLDLGTASIGWALVERNDTEYALLDQGVDIFQEGVAREKNSEKPAVQDRTAARALRRHYARRRLRKIDLLRVLVRHDLCPALTDEQLKDWKQKKIYPLTDEFIRWQRTDDRTDKNPYRDRYKALTETLDLDTQRDRYTLGRALYHLAQRRGFLSNRKDAGDESESGKVRQSIEGLTVDMEKAGCAYLGEYFYRLYARKEKIRTKYTSRNEHYLAEFRAICEKQRLADDLRKALHRAIFYQRPLKSQKGSVGRCTFEKDKSRCPASHPRFEEFRMLSFVNNIRITTPDDPEPRPLSRQEAETILPLFTRKTKPHFDFEEIAKKLAGKGRYACQGDRGEAPYRFNFARTATVTGCPVTASLIALFGDDYLTKICDLYTLGAGKTREQILGDVWHALFSFDDEERLSAWAKQKLRLSDDEAGRFAAIRLPQDYAALSLHAINKILPYLREGYRYDEAVFVANLKAVLPPDIYSDESERNAIEADIAALITDFRRNPLNRGTTKEQCVRDYLRNCRGIDEKRLGRLYHPSMIEIYQTAQPDAQGILQLGSPRTPAVRNPMAMRALFRLRVLVNRLLRDGKIDRETKIHIEFARGLNDANRRKAIELYQRDREAERKAYADEIRRQYASESGREIEPTDDDILKYRLWKEQNHICPYTGKRIGLSDFMGDSARFDIEHTVPRARGGDNSQMNKTLCENRFNRELKRDKLPSELPNHADVMARIDELGWPKEIASLQKQIEIQRRKSKSATTKSEKDGAIQRRHILQMRLDYWRGKYERFTMTEVPDGFSNRQGVDIGIIGKYARLYLKTVFERIYTVKGATTAEFRRMWGLQEEYARKERVNHTHHCLDAIVIACIGRNEYDRWAQYAGDEERYRRGEGAKPRFEKPWPTFTEDLEAVADRLLVAHHTPDNMPKQSRKRLRIRGRIRTGRNGETLYAQGDTARGALHQQTFYGAIERQGEVRYVVRKPLGQLQPSDVDNIVDDAVRQKVKEAIDAVGFKTAMDTESHPIWMNEQKRVPIRKVRIFVGKNISPKPLGGKKHRDLSALPHKRPVYVSYGSNYCMAIYEGKDNQGKLKRTFEIVSTLEAAQYFKASADKAARPDLVPQSDEKGFPLKCILKTGTMVLFYEETPEELYDCTQQELAKRLYKLTKFSSMTTGNNSYGLCTFRHHREARPAGELKPKGGAWKAGEAYRPLISLYHTQLNAYVEGFDFELSVTGTVRFKHE

SEQ ID NO: 18951 - protein, 1224 aa, unidentified
  REGION 1..1224: note = Cas Enzyme sequence
MTKILGLDLGTASIGWALVERNDTGYALLDQGVDIFQEGVAREKNSEKPAVQDRTAARALRRHYARRRLRKIDLLRVLVRHDLCPALTDEQLKDWKQKKIYPLTDEFIRWQRTDDRTDKNPYRDRYKALTETLDLDTQRDRYTLGRALYHLAQRRGFLSNRKDAGDESESGKVRQSIEGLTVDMEKAGCAYLGEYFYRLYARKEKIRTKYTSRNEHYLAEFRAICEKQRLADDLRKALHRAIFYQRPLKSQKGSVGRCTFEKDKSRCPASHPRFEEFRMLSFVNNIRITTPDDPEPRPLSRQETETILPLFRRRTKSHFDFEEIAKKLAGKGRYACQGDRGEAPYRFNFARTATVTGCPVTASLIALFGDDYLTKICDLYTLGAGKTREQILGDVWHALFSFDDEERLSAWAKQKLRLSDDEAGRFAAIRLPQDYAALSLHAINKILPYLREGYRYDEAVFVANLKAVLPPDIYSDESERSAIEADIAALITDFRQNPLNRGTTKEQCVRDYLRNCRGIDEKRLGRLYHPSMIEIYQTAQPDAQGVLQLGSPRTPAVRNPMAMRALFRLRVLVNRLLRDGKIDRETKIHIEFARGLNDANRRKAIELYQRDREAERKAYADEIRRQYASESGREIEPTDDDILKYRLWKEQNHICPYTGKQIGLSDFMGDSARFDIEHTVPRARGGDNSQMNKTLCESRFNRELKRDKLPSELPNHADVMARIEELGWPEKIAGLQKQIEIQRRKSKSATTKSEKDGAIQRRHVLQMQLDYWRGKYERFTMTEVPDGFSNRQGVDIGIIGKYARLYLKTVFERIYTVKGATTAEFRRMWGLQEEYARKERVNHTHHCLDAIVIACIGRNEYDRWAQYAGDEERYRRGEGAKPRFEKPWPTFTEDLEAVADRLLVAHHTPDNMPKQSRKRLRIRGRIRTGRNGETLYAQGDTARGALHQQTFYGAIERQGEVRYVVRKPLGQLQLADVDNIVDDVVRQKVKEAIDAVGFKTAMDTESHPIWMNEQKRVPIRKVRIFAGKNISPKSLGGKKHRDLSALPHKRPVYVSYGSNYCMAVYEGEDKRGKLKRTFEIVSTLEAAQYFKASADKAARPDLVPQSDANGFPLKCILKTGTMVLFYEKTPEELYECTQQELAKRLYKLTKFSSMTTGNSSYGSCTFRHHQEARPAKELKPKGGTWKVGEAYRPIISLLHTQLNAYVEGFDFELSVTGTVRFKHE

SEQ ID NO: 18952 - protein, 1223 aa, unidentified
  REGION 1..1223: note = Cas Enzyme sequence
MTKILGLDLGTASIGWALVERNDTEYALLDQGVDIFQEGVAREKNSEKPAVQDRTAARALRRHYARRRLRKIDLLRVLVRHDLCPALTDEQLKDWKQKKIYPLTDEFIRWQRTDDRTDKNPYRDRYKALTETLDLDTQRDRYTLGRALYHLAQRRGFLSNRKDAGDESESGKVRQSIEGLTADMEKAGCSYLGEYFYRLYARKEKIRTKYTSRNEHYLAEFRAICEKQRLADDLRKALHRAIFYQRPLKSQKGSVGRCTFEKGKSRCPVSHPRFEEFRMLSFVNNIRITTPDDPEPRPLSRQETETILPLFTRKTKPHFDFEEIAKKLAGKGRYACQGDRGEAPYRFNFARTATVTGCPVTASLIALFGDDYLTKICDLYTLGAGKTREQILGDVWHALFSFDDEERLSAWAKQKLRLSDDEAGRFAAIRLPQDYAALSLHAINKILPYLREGYRYDEAVFVANLKAVLPSDIYSDESERSAIEADIAALITDFRRNPLNRGTTKEQCVRDYLRNCRGIDEKRLGRLYHPSMIEIYQTAQPDAQGILQLGSPRTPAVRNPMAMRALFRLRVLVNRLLRDGKIDRETKIHIEFARGLNDANRRKAIELYQRDREAERKAYADEIRRQYASESGREIEPTDDDILKYRLWKEQNHICPYTGKQIGLSDFMGDSARFDIEHTVPRARGGDNSQMNKTLCESRFNRELKRDKLPSELPNHADVMARIDELGWPKEIASLQKQIEIQRRKSKSATTKSEKDGAIQRRHILQMRLDYWRGKYERFTMTEVPDGFSNRQGVDIGIIGKYARLYLKTVFERIYTVKGATTAEFRRMWGLQEEYARKERVNHTHHCLDAIVIACIGRNEYDRWAQYAGDEERYRRGEGAKPRFEKPWPTFTEDLEAVADRLLVAHHTPDNMPKQSRKRLRIRGRIRTGKNGETLYAQGDTARGALHQQTFYGAIEREGEVRYVVRKPLGQLQPADVDKIVDDAVRQKVKEAIDAVGFKTAMDTESHPIWMNEQKRVPIRKVRIFAGKISPKPLGGKKHRDLSALPHKRPVYVSYGSNYCMAVYEGKDNQGEPERTFEIVSTLEAAQYFKASADKTARPDLVPQSDENGFPLKCILKTGTMVLFYEKTPEELYDCTQQELAKRLYKLTKFSSTLKGNRSSGSCTFRHHREARPAKELKPKGGAWKAGEAYRPLISLYHTQLNAYVEGFDFELSVTGTVRFKHE

SEQ ID NO: 18953 - protein, 1224 aa, unidentified
  REGION 1..1224: note = Cas Enzyme sequence
MTKILGLDLGTASIGWALVERNDTEYALLDQGVDIFQEGVAREKNSEKPAVQDRTAARALRRHYARRRLRKIDLLRVLVRHDLCPALTDEQLKDWKQKKIYPLTDEFIRWQRTDDRTDKNPYRDRYKALTETLDLDTQRDRYTLGRALYHLAQRRGFLSNRKDAGDESESGKVRQSIEGLTVDMEKAGCAYLGEYFYRLYARKEKIRTKYTSRNEHYLAEFRAICEKQRLADGLRKALHRAIFYQRPLKSQKGSVGRCTFEKDKSRCPASHPRFEEFRMLSFINNIRITTPDDPEPRPLSRQETETILPLFTRKTKPHFDFEEIAKKLAGKGRYACQGDRGEAPYRFNFARTATVTGCPVTASLIALFGDDYLTKICDLYTLGAGKTREQILGDVWHALFSFDDEERLSAWAKQKLRLSDDEAGRFAAIRLPQDYAALSLHAINKILPYLREGYRYDEAVFVANLKAVLPSDIYSDESERSAIEADITALITDFRRNPLNRGTTKEQCVRDYLRNCRGIDEKRLGRLYHPSMIEIYQTAQPDAQGVLQLGSPRTPAVRNPMAMRALFRLRVLVNRLLRDGKIDRETKIHIEFARGLNDANRRKAIELYQRDREAERKAYADEIRRQYASESGREIEPTDDDILKYRLWKEQNHICPYTGKQIGLSDFMGDSARFDIEHTVPRARGGDNSQMNKTLCESRFNRELKRDKLPSGLPNHADVMARIEELGWPEKIAGLQKQIEIQRRKSKSATTKSEKDGAIQRRHVLQMQLDYWRGKYERFTMTEVPDGFSNRQGVDIGIIGKYARLYLKTVFERIYTVKGATTAEFRRMWGLQEEYARKERVNHTHHCLDAIVIACIGRNEYDRWAQYAGDEERYRRGEGAKPRFEKPWPTFTEDLEAVADRLLVAHHTPDNMPKQSRKRLRIRGRIRTGRNGETLYAQGDTARGALHQQTFYGAIERQGEVRYVVRKPLGQLQLADVDNIVDDAVRQKVKEAIDAVGFKTAMDTESHPIWMNEQKRVPIRKVRIFAGKNISPKSLGGKKHRDLSALPHKRPVYVSYGSNYCMAVYEGEDKRGKLKRTFEIVSTLEAAQYFKASADKAARPDLVPQSDANGFPLKCILKTGTMVLFYEETPEELYECTQQELAKRLYKLTKFSSMTTGNSSYGSCTFRHHQEARPAKELKPKGGTWKVGEAYRPIISLLHTQLNAYVEGFDFELSVTGTVRFKHE

SEQ ID NO: 18954 - protein, 1224 aa, unidentified
  REGION 1..1224: note = Cas Enzyme sequence
MTKILGLDLGTASIGWALVERNDTEYALLDQGVDIFQEGVAREKNSEKPAVQDRTAARALRRHYARRRLRKIDLLRVLVRHDLCPALTDEQLKDWKQKKIYPLTDEFIRWQRTDDRTDKNPYRDRYKALTETLDLDTQRDRYTLGRALYHLAQRRGFLSNRKDAGDESESGKVRQSIEGLTVDMEKAGCAYLGEYFYRLYARKEKIRTKYTSRNEHYLAEFRAICEKQRLADGLRKALHRAIFYQRPLKSQKGSVGRCTFEKDKSRCPASHPRFEEFRMLSFINNIRITTPDDPEPRPLSRQETETILPLFTRKTKPHFDFEEIAKKLAGKGRYACQGDRGEAPYRFNFARTATVTGCPVTASLIALFGDDYLTKICDLYTLGAGKTREQILGDVWHALFSFDDEERLSAWAKQKLRLSDDEAGRFAAIRLPQDYAALSLHAINKILPYLREGYRYDEAVFVANLKAVLPSDIYSDESERSAIEADITALITDFRRNPLNRGTTREQCVRDYLRNCRGIDEKRLGRLYHPSMIEIYQTAQPDAQGVLQLGSPRTPAVRNPMAMRALFRLRVLVNRLLRDGKIDRETKIHIEFARGLNDANRRKAIELYQRDREAERKAYADEIRRQYASESGREIEPTDDDILKYRLWKEQNHICPYTGKQIGLSDFMGDSARFDIEHTVPRARGGDNSQMNKTLCESRFNRELKRDKLPSELPNHADVMARIEELGWPEKIAGLQKQIEIQRRKSKSATTKSEKDGAIQRRHVLQMQLDYWRGKYERFTMTEVPDGFSNRQGVDIGIIGKYARLYLKTVFERIYTVKGATTAEFRRMWGLQEEYARKERVNHTHHCLDAIVIACIGRNEYDRWAQYAGDEERYRRGEGAKPRFEKPWPTFTEDLEAVADRLLVAHHTPDNMPKQSRKRLRIRGRIRTGRNGETLYAQGDTARGALHQQTFYGAIERQGEVRYVVRKPLGQLQLADVDNIVDDAVRQKVKEAIDAVGFKTAMDTESHPIWMNEQKRVPIRKVRIFAGKNISPKSLGGKKHRDLSALPHKRPVYVSYGSNYCMAVYEGEDKRGKLKRTFEIVSTLEAAQYFKASADKAARPDLVPQSDANGFPLKCILKTGTMVLFYEETPEELYECTQQELAKRLYKLTKFSSMTTGNSSYGSCTFRHHQEARPAKELKPKGGTWKVGEAYRPIISLLHTQLNAYVEGFDFELSVTGTVRFKHE

SEQ ID NO: 18955 - protein, 1223 aa, unidentified
  REGION 1..1223: note = Cas Enzyme sequence
MTKILGLDLGTASIGWALVERNDTEYALLDQGVDIFQEGVAREKNSEKPAVQDRTAARALRRHYARRRLRKIDLLRVLVRHDLCPALTDEQLKDWKQKKIYPLTDEFIRWQRTDDRTDKNPYRDRYKALTETLDLDTQRDRYTLGRALYHLAQRRGFLSNRKDAGDESESGKVRQSIEGLTADMEKAGCSYLGEYFYRLYARKEKIRTKYTSRNEHYLAEFRAICEQQRLADDLRKALHRAIFYQRPLKSQKGSVGRCTFEKDKSRCPASHPRFEEFRMLSFVNNIRITTPDDPEPRPLSRQEAETILPLFTRKTKPHFDFEEIAKKLAGKGRYACQGDRGEAPYRFNFARTATVTGCPVTASLIALFGDDYLTKICDLYTLGAGKTREQILGDVWHALFSFDDEERLSAWAKQKLRLSDDEAGRFAAIRLPQDYAALSLHAINKILPYLREGYRYDEAVFVANLKAVLPPDIYSDESERNAIEADIAALITDFRQNPLNRGTTKEQCVRDYLRNCRGIDEKRLGRLYHPSMIEIYQTALPDAQGILQLGSPRTPAVRNPMAMRALFRLRVLVNRLLRDGKIDRETKIHIEFARGLNDANRRKAIELYQRNREAERKAYADEIRRQYASESGREIEPTDDDILKYRLWKEQNHICPYTGKQIGLSDFMGDSARFDIEHTVPRARGGDNSQMNKTLCESRFNRELKRDKLPSELPNHADVMARIDELGWPKEIASLQKQIEMQRRKSKSATTKSEKDGAIQRRHVLQMQLDYWRGKYERFTMTEVPDGFSNRQGVDIGMIGKYARLYLKTVFERIYTVKGATTAEFRRMWGLQEEYARKERVNHTHHCLDAIVIACIGRNEYDRWAQYAGDEERYRRGEGAKPRFEKPWPTFTEDLEAVAGRLLVAHHTPDNMPKQSRKRLRIRGRIRTGRNGEMLYAQGDTARGALHQQTFYGAIAHQGKVKYVVRKPLGQLQPPDVDKIVDDTVRQKVKEAIDAVGFKTAMDTESHPIWMNEQKRVPIRKVRIFAGKISPKPLGGKKHRDLSALPHKRPVYVSYGSNYCMAVYEGEDKRGKLKRTFEIVSTLEAAQYFKASADKAARPDLVPQSDANGFPLKCILKTGTMVLFYEETPEELYDCTQQELAKRLYKLTKFSSMTTGNNSYGLCTFRHHQEARPAGELDSKGTAWKAGEAYRPIINLLHTQLNAYVEGFDFELSVTGTVQFKHG

SEQ ID NO: 18956 - protein, 1224 aa, unidentified
  REGION 1..1224: note = Cas Enzyme sequence
MTKILGLDLGTASIGWALVERNDTGYALLDQGVDIFQEGVAREKNSEKPAVQDRTAARALRRHYARRRLRKIDLLRVLVRHDLCPALTDEQLKDWKQKKIYPLTDEFIRWQRTDDRTDKNPYRDRYKALTETLDLDTQRDRYTLGRALYHLAQRRGFLSNRKDAGDESESGKVRQSIEGLTVDMEKAGCAYLGEYFYRLYARKEKIRTKYTSRNEHYLAEFRAICEKQRLADGLRKALHRAIFYQRPLKSQKGSVGRCTFEKDKSRCPASHPRFEEFRMLSFVNNIRITTPDDPEPRPLSRQETETILPLFTRKTKPHFDFEEIAKKLAGKGRYACQGDRGEAPYRFNFARTATVTGCPVTASLIALFGDDYLTKICDLYTLGAGKTREQILGDVWHALFSFDDEERLSAWAKQKLRLSDDEAGRFAAIRLPQDYAALSLHAINKILPYLREGYRYDEAVFVANLKAVLPSDIYSDESERSAIEADIAALITDFRRNPLNRGTTKEQCVRDYLRNCRGIDEKRLGRLYHPSMIEIYQTAQPDAQGILQLGSPRTPAVRNPMAMRALFRLRVLVNRLLRDGKIDRETKIHIEFARGLNDANRRKAIELYQRDREAERKAYADEIRRQYASESGREIEPTDDDILKYRLWKEQNHICPYTGKRIGLSDFMGDSARFDIEHTVPRARGGDNSQMNKTLCENRFNRELKRDKLPSELPNHADVMARIDELGWPKEIASLQKQIEIQRRKSKSATTKSEKDGAIQRRHILQMRLDYWRGKYERFTMTEVPDGFSNRQGVDIGIIGKYARLYLKTVFERIYTVKGATTAEFRRMWGLQEEYARKERVNHTHHCLDAIVIACIGRNEYDRWAQYAGDEERYRRGEGAKPRFEKPWPTFTEDLEAVADRLLIAHHTPDNMPKQSRKRLRIRGRIRTGKNGETLYAQGDTARGALHQQTFYGAIERKGEVKYVVRKPLGQLQPSDVDNIVDDAVRQKVKEAIDAVGFKTAMDTESHPIWMNEQKRVPIRKVRIFAGKNISPKPLGGKKHRDLSALPHKRPVYVSYGSNYCMAIYEGKDNQGKLKRTFEIVSTLEAAQYFKASADKAARPDLVPQSDANGFPLKCILKTGTMVLFYEETPEELYECTQQELAKRLYKLTKFSSMTTGNNSYGLCTFRHHQEARPAGELKPKGGAWKAGEAYRPLISLYHTQLNAYVEGFDFELSVTGTVRFKHE

SEQ ID NO: 18957 - protein, 1224 aa, unidentified; identical to SEQ ID NO: 18956
  REGION 1..1224: note = Cas Enzyme sequence

SEQ ID NO: 18958 - protein, 1228 aa, unidentified
  REGION 1..1228: note = Cas Enzyme sequence
MDADMTKILGLDLGTASIGWALVERNDTGYALLDQGVDIFQEGVAREKNSEKPAVQDRTAARALRRHYARRRLRKIDLLRVLVRHDLCPALTDEQLKDWKQKKIYPLTDEFIRWQRTDDRTDKNPYRDRYKALTETLDLDTQRDRYTLGRALYHLAQRRGFLSNRKDAGDESESGKVRQNIEDLTVDMEKAGCAYLGEYFYRLYARKEKIRTKYTSRNEHYLAEFRAICEKQRLADDLRKALHRAIFYQRPLKSQKGSVGRCTFEKGKSRCPVSHPRFEEFRMLSFVNNIRITTPDDPEPRPLSRQETETILPLFRRRTKSHFDFEEIAKKLAGKGRYACQGDRSEAPYRFNFARTATVTGCPVTASLIALFGDDYLTKICDLYTLGAGKTREQILGDVWHALFSFDDEERLSAWAKQKLRLSDDEAGRFAAIRLPQDYAALSLHAINKILPYLREGYRYDEAVFVANLKAVLPPDIYSDESERSAIEADIAALITDFRRNPLNRGTTKEQCVRDYLRNCRGIDEKRLGRLYHPSMIEIYQTALPDAQGILQLGSPRTPTVRNPMAMRALFRLRVLVNRLLRDGKIDRETKIHIEFARGLNDANRRKAIELYQRDREAERKAYADEIRRQYASESGREIEPTDDDILKYRLWKEQNHICPYTGKQIGLSDFMGDSARFDIEHTVPRARGGDNSQMNKTLCESRFNRELKRDKLPSELPNHADVMARIDEFGWPEKIAGLQKQIEMQRRKSKSATTKSEKDGAIQRRHVLQMQLDYWRGKYERFTMTEVPDGFSNRQGVDIGMIGKYARLYLKTVFERIHTVKGATTAEFRRMWGLQEEYARKERVNHTHHCLDAIVIACIGRNEYDRWAQYAGDEERYRRGEGAKPRFEKPWPTFTEDLEAVAGRLLVAHHTPDNMPKQSRKRLRIRGRIRTGRNGETLYAQGDTARGALHQQTFYGAIERQGEVRYVVRKPLGQLQPSDVDKIVDDAVRQKVKEAIKAVGFKTAMDTESHPIWMNEQKRVPIRKVRIFAGKNISPKPLGGKKHRDLSALPHKRPVYVSYGSNYCMAVYEGKDNQGELKRTFEIVSTLEAAQYFKASADKAARPDLVPQSDANGFPLKCILKTGTMVLFYEETPEELYDCTQQELAKRLYKLTKFSSMTKGNRSYGSCTFRHHQEARPAKELKPKGGTWKVGEAYRPIINLLHTQLNAYVEGFDFELSVTGTVRFKHE

SEQ ID NO: 18959 - protein, 1228 aa, unidentified
  REGION 1..1228: note = Cas Enzyme sequence
MDANMTKILGLDLGTASIGWALVERNDTGYALLDQGVDIFQEGVAREKNSEKPAVQDRTAARALRRHYARRRLRKIDLLRVLVRHDLCPALTDEQLKDWKQKKIYPLTDEFIRWQRTDDRTDKNPYRDRYKALTETLDLDTQRDRYTLGRALYHLAQRRGFLSNRKDAGDESESGKVRQSIEGLTVDMEKAGCAYLGEYFYRLYARKEKIRTKYTSRNEHYLAEFRAICEKQRLADDLRKALHRAIFYQRPLKSQKGSVGRCTFEKGKSRCPVSHPRFEEFRMLSFVNNIRITTPDDPEPRPLSRQETETILPLFTRKTKPHFDFEEIAKKLAGKGRYACQGDRGEAPYRFNFARTATVTGCPVTASLIALFGDDYLTKICDLYTLGAGKTREQILGDVWHALFSFDDEERLSAWAKQKLRLSDDEAGRFAAIRLLQDYAALSLHAINKILPYLREGYRYDEAVFVANLKAVLPSDIYSDESERSAIEADIAALITDFRRNPLNRGTTKEQCVRDYLRNCRGIDEKRLGRLYHPSMIEIYQTALPDAQGILQLGSPRTPTVRNPMAMRALFRLRVLVNRLLRDGKIDRETKIHIEFARGLNDANRRKAIELYQRDREAERKAYADEIRRQYASESGREIEPTDDDILKYRLWKEQNHICPYTGKQIGLSDFMGDSARFDIEHTVPRARGGDNSQMNKTLCESRFNRELKRDKLPSELPNHADVMARIDEFGWPEKIAGLQKQIEMQRRKSKSATTKSEKDGAIQRRHVLQMQLDYWRGKYERFTMTEVPDGFSNRQGVDIGMIGKYARLYLKTVFERIYTVKGATTAEFRRMWGLQEEYARKERVNHTHHCLDAIVIACIGRNEYDRWAQYAGDEERYRRGEGAKPRFEKPWPTFTEDLEAVAGRLLVAHHTPDNMPKQSRKRLRIRGRIRTGRNGETLYAQGDTARGALHQQTFYGAIERQGEVRYVVRKPLGQLQPSDVDKIVDDAVRQKVKEAIKAVGFKTAMDTESHPIWMNEQKRVPIRKVRIFAGKNISPKPLGGKKHRDLSALPHKRPVYVSYGSNYCMAVYEGKDNQGELKRTFEIVSTLEAAQYFKASADKAARPDLVPQSDANGFPLKCILKTGTMVLFYEETPEELYDCTQQELAKRLYKLTKFSSMTKGNRSYGSCTFRHHQEARPAKELKPKGGTWKVGEAYRPIINLLHTQLNAYVEGFDFELSVTGTVRFKHE

SEQ ID NO: 18960 - protein, 1228 aa, unidentified
  REGION 1..1228: note = Cas Enzyme sequence
MDADMTKILGLDLGTASIGWALVERNDTGYALLDQGVDIFQEGVAREKNSEKPAVQDRTAARALRRHYARRRLRKIDLLRVLVRHDLCPALTDEQLKDWKQKKIYPLTDEFIRWQRTDDRTDKNPYRDRYKALTETLDLDTQRDRYTLGRALYHLAQRRGFLSNRKDAGDESESGKVRQNIEDLTVDMEKAGCAYLGEYFYRLYARKEKIRTKYTSRNEHYLAEFRAICEKQRLADDLRKALHRAIFYQRPLKSQKGSVGRCTFEKGKSRCPVSHPRFEEFRMLSFVNNIRITTPDDPEPRPLSRQETETILPLFRRRTKSHFDFEEIAKKLAGKGRYACQGDRSEAPYRFNFARTATVTGCPVTASLIALFGDDYLTKICDLYTLGAGKTREQILGDVWHALFSFDDEERLSAWAKQKLRLSDDEAGRFAAIRLPQDYAALSLHAINKILPYLREGYRYDEAVFVANLKAVLPPDIYSDESERSAIEADIAALITDFRRNPLNRGTTKEQCVRDYLRNCRGIDEKRLGRLYHPSMIEIYQTALSDAQGILQLGSPRTPTVRNPMAMRALFRLRVLVNRLLRDGKIDRETKIHIEFARGLNDANRRKAIELYQRDREAERKAYADEIRRQYASESGREIEPTDDDILKYRLWKEQNHICPYTGKQIGLSDFMGDSARFDIEHTVPRARGGDNSQMNKTLCESRFNRELKRDKLPSELPNHADVMARIDEFGWPEKIAGLQKQIEMQRRKSKSATTKSEKDGAIQRRHVLQMQLDYWRGKYERFTMTEVPDGFSNRQGVDIGMIGKYARLYLKTVFERIHTVKGATTAEFRRMWGLQEEYARKERVNHTHHCLDAIVIACIGRNEYDRWAQYAGDEERYRRGEGAKPRFEKPWPTFTEDLEAVAGRLLVAHHTPDNMPKQSRKRLRIRGRIRTGRNGETLYAQGDTARGALHQQTFYGAIERQGEVRYVVRKPLGQLQPSDVDKIVDDAVRQKVKEAIKAVGFKTAMDTESHPIWMNEQKRVPIRKVRIFAGKNISPKPLGGKKHRDLSALPHKRPVYVSYGSNYCMAVYEGKDNQGELKRTFEIVSTLEAAQYFKASADKAARPDLVPQSDANGFPLKCILKTGTMVLFYEETPEELYDCTQQELAKRLYKLTKFSSMTKGNRSYGSCTFRHHQEARPAKELKPKGGTWKVGEAYRPIINLLHTQLNAYVEGFDFELSVTGTVRFKHE
